United States Patent Application Publication US 2020/0109395 A1 - sequence listing, part 9

SEQ ID NO: 40073 - protein, 541 aa, Streptomyces sp. NRRL F-4707
MVGRTSSSGQDASQETHRRLDAYTYLSAPERLEHLAIMRVFCGTLLADLAVPDLLAKLRQAGGPAAGLDADTLTVRLEQLVKWGNLLRSSHTVKASSISEYQRSRARYQLSKLGERIQRDADGVLAEADAAREVSNELLAVVERGLRELAELVTAPGGIEPQDGLERVSTLFVQFTEFADSIRDFYAYLGQVLARYDLDSAEYQGFKELLLDYVEAITEDVAFRAPRISAALDTLWPYVPGLLARLDAHAQGLTGLSPQGDGRLETRVQRSRGRELTDWEGLRGWFNDTDGQGSQVDQLRDATLRALQSLLANAKRMLRSATGEMSRRKDLLRLARWFEEAAPQDAHDIAVAAFGLYGARHLGIPPATDEVVPAYTSWWTGPVVEVPVALRERGSRAQRGRTSAVEDHSAQKRRLRDEARERAAARAAAADELRSASGRFAEVRLTSAALGLLLELLATALGNAQLRRRAGTDGAGATEFDLDQAHSEDAELGVRLTVRRTAGARCVLHSVDGDLLLDDLELDVGRTSSDTADGDAEVSVS

SEQ ID NO: 40074 - protein, 441 aa, Streptomyces sp. NRRL F-4707
MSLPSTHDVALAAERRSAARLLLAHPLVTSDGPHADLFPLIRRHADWLGKRFQQVLGYRLLVDSSYARLFKAALGAGAGHRLERSTGTPFTPHTYACLALALSVLVTAPEQLLLSQLVADIRAAAADAEIELDETGRAAGKRTLVAALRLLVRWGVLIETEGHVAALAQDAGGEALITVDRELARVIVAGPLAQARDGADLVRRAADPGFGGPRTYVRRMLVETPVVYLDELTDAERDWLRTRQRREAQAFSELLGLEMEIRAEGVALVDPEDELTDLHLPGTGTVAQAALLLVERLVERLRPQEPGHPAIGGTLVIGVAVPDGLVDELLAELVAEYGQRSNWQRDYLEDIRALREAVLDLLARMRLMARTGRLRAEGYGLPEGYADEAPEGRTVTDVRGVRPGGDGWVLLAAAARYATHVTVRPATAAGKGTVVQEELPL

SEQ ID NO: 40075 - protein, 1402 aa, Streptomyces sp. NRRL F-4707
MPRSGPTTTAGTRFRLHRAGIQNVWQYDEQEFAFGDGRLLLRGKNGAGKSKALEMLLPYLLDGDSRALDATGTGRTTLAWLMLEGFEQTNRLGYLWVEFRGTTDGGDHRHLTLGAAIRASKSTQKALPTFFVTPLRVGEDLHLVESGRPLPVDRLKEIVGSDNVTDRAVVHRSRVARELFGITDATRYRNLTQLLHRLRRPTVGDRIEHGGLASLLSETLPGLDEDVVEKVARNLHDLDAVRDELGRLERTDTALRTFLTSYRGYLSGVLRTCAQAVSGELEVLAQRRRAAGDAAQRTSELRTQEEEAEARLETLRDEEEAARTDLAALHASHAYRSLRELSERRTTVEALHTAAVAAFTALSKAHGAEEGAAERLADGVDHLGSRLTELGTEHRELLTQAEKAGLPTGHLGEAVALPRTVRSQAGETELTAPDGERHIVQHRSVVHVDTAAVQDGLRSWQAQLEDAETVVKNRTRMVQEVTRLTAQAEKARSRAEQADTERERLESEAEEAAGRLDAGREKVAEESGAYARRVAGWVTHTRAALGSGCPPLDPVHAVVTCESSADAPFADRTLPPDIDGQAWQAAHAALESYGEELTGRRDALALTVGRLDEELGRLASQKRDWERRTDPEPPVPYHRVTERTPGTGAPFYRLVDFVDGLSPAYRAGLEAALEASGILDAWVGADGALVDSGTRDTLLRPGSAAPDGPTLASALSPAPQPGCGVTSEQVEHLLTAIALAPAGETTAHDAVHYDGTWRLGILSGRHHKSDAEYLGAAVRAETRRRILAELEKQLTQTEQRLTDARHELTEADARRRAIRFAEQDFPRARGLADAWSRAESDERTLRDLTAKATSAARLAEEARALAVAARTEADATATAYDLRSDPAELERVRTALAALLTGIGHLRRAIGSTGERLGAHHTDAERYERARKDRLDAEENYRIHLTGLRTAQQDLRTREEAIGATEEEILTREQEARQRIAHAAEAVPAAQRIRNDLHDRRVRAEEEEKRLREGLTAQETAVIATGGALRGALGRPEVVRGAGVDRSALPEDVVDDPGSDVRSRLRALKALADAVQQALGRPKGEVSDSTLLNRHTELRDQLAGGYDAQLDERDGIKVCRLIDDHGSHDVAAVGERIAVQAAEARGRLTEREREVFQRFLTGELGDHLSAQVITAANLVAALNDTLRTVRTSHGLGVELLWKLDEDVDADVRAAVNLLRSPSSLRTREQTEQLREVLQRRIEDARRADPSAGYAAHLRTALDYRDWFRFHTFVVEDAAPGRRRKLTGRTGLSQGEQRVLSYLVLFAAAAAHFTSLAESAPHAPRLILLDDAFAKVDEPTHGRLGRILVDLDLDFVLTSERLMGNWPEVPSLHIYECLRDPHVRGVATLHYTWNGRHRRLVSV

SEQ ID NO: 40076 - protein, 423 aa, Streptomyces sp. NRRL F-4707
MSKLPTATRDWLAGPGLTRLWEAVRKRLESNGVQATGSLRLTSVSTQERNDLSLLLGKPVTGAAVTVRLDALDTRLRASAAGLGLREVLEELGPPLTDRRAVRAGIAARREHVWSSLASALDASPLAGQDWTGQWYDLLRRTGVPRVVTPETAVRTLQQAVQVLTVLLGPERGGTRGRGELAALATGSAHGLDDGTWLARLVQRGIALAHGTEFPGDAVGRRALWRLVSVTPDEVSSTVLTYGLRPVGGGWREQALRQRADHHAEAHLTPRDLHDLQLQLPAEIVIHICENPRVVEAAADAGCVRPVVCTSGSAATVVLTLLDALAATGCRFAYHGDFDWPGIALANRIILRYEAQPWRMGAEDYEHLAARSQAEGIPQLPLDGQPVSAAWDPGLAPAMTALGVALHEEVTLDLLVDDLSGRT

SEQ ID NO: 40077 - protein, 540 aa, Streptomyces sp. WM6372
MGEQAQDSSPETGRDDTWQRLNAYAYLSAPERLEYIAVMRVFCGTLLADLAVPDVLAKLAGSGGPAVPLDAETLTARLERLVHWGALLRSSHSVKASSITEYQRSRSRYQLSKLGERIQRDADEVLTGADAAREVSSELLALVERGLRELNELVQRPGGIEPQDALERVSTLFVQFTEFADSVRDFYAYLGQVLARYDLDSAEYQGFKELLLDYVEAIREDVAFRAPRIASVLDLLWPHLPGLLERLDTHARGLSGVPGAGGQPEVRVQRSRGREKADWEGLRGWFTDVDGQGSQVDQLRDATMRALQSLLTNAKRMLRSASGEMSRRKDLLRLARWFNVAAPEEAHDIAVAAFGLYGARHLGVPPASDEAVPAYTSWWNGPVVEVPVALRERGSRAQRGRASAMENHSAQKRHLQEAARAQAEARRAAADELRSAAGRFADVRLTSAALGLLLELLATALGNARLRRTGVGDLDEAQEFGLESAQSEDAELGIRLTVRRSSGAKTVLHSADGDLVLDDLELEIGRAAGTAGREVEMSVS

SEQ ID NO: 40078 - protein, 431 aa, Streptomyces sp. WM6372
MATERRAAGRLLLAHPLVTSVGPYADLFPLIRRHADWLGKRFQQVLGYRLLVDTSYARLFKAGLGAGAGHRLERSTGTAFTPRTYSCLALALSVLVTAPEQMLLSQLVADIRAAAADAGVKLEETGRAVEKRTLVAALRQLIDWGVLTETEGSVGSLVQEEGAEALITVDREIARIIISGPLTQSLDGADLVRRAADPGFGGPRTYVRRMLVETPVVYLDELTDTERDWLRTRQRREAQAFSELLGLEAEIRGEGVALVDPEEELTDLHLPGTGTVAQASLLLVERLVERLRPAEPGHPATGGRLVIGVTLPDDLVDELLAELITEYGQRGNWQRDYLEDPSSLRKAVLDLLSRMRMVAPVGPLRSTGQGIPEGYSDTVPEGRSVTDVLGARAAGTDWILLAAAARYATHVTERRPAGATPGIDIQQEMPL

SEQ ID NO: 40079 - protein, 1410 aa, Streptomyces sp. WM6372
MTPGANGPIPLQRSVTSAGTRFRLHRAGILNVWQYDEQEFDFGDGRLLLRGKNGAGKSKALEMLLPYLLDGDSRALDATGTGRTSLVWLMLDGFEQTNRLGYLWVEFHMTTDNGGDRYLTLGAAIRASKSTKKAVPVFFVTPLRVGEDFRLVEAGRPLPVDRLKEAVGAENVTDRSVQHRSRVARELFGITDATRYRNLTQLLHRLRRPTVGDRIESGGLASLLSETLPGLDDDVVEKVARNLHDLDAVREELGRLERTDRALRTFLGDYRDYLSGVLLRTAKKVDGELDALAQRRLQAGDASKKTGALKGREAEAKARLSALREEEQAARTELDALRASSAYRSLEELSERRTTVGALETAAGTSFAALTKAHDTEEGAADRLAEGIAHLGERLGELGTDHRELVVQAEKAGLPTGHLGETVGLPRTDVAGASTAELTGPDAQVHIVRHHRVIAVDATAAESALRSWQGQLEDAGTVVKHRTRRVQEVVGLVAQVVEMRGRAAVADAEHERLEGEAEDAAGRLEGHREKVAEESGGYLRQVEAWLEHVRAVAGPDCPLLNPVRATVACETSSEAPFAERVLPPDIDGQAKRTALTVLEPYGVQLTEQRDALALRVARLAEEHDLLTREKEEWERRTDPEPPVPYHRTAERDPSTGAPFYRLVDFADDLSPTNRAGLEAALEASGVLDAWVTSDGTLLDPLTRNVLLQPGTVPQGGSTLASALRPTAQPDSGISPERVQHLLAAIALAPAQDVAATSSVYYDGSWRLGPLRGHHSKDGAEYVGAAVRAETRRRKIAELEARWAEAEKLLSDYRGQLDGLDSIRRDLASAERDFPQPQSLTLAWHELDSGEKDLRNLTAKATKAARLAEEARTRAVAARSEAEATATAHDLPTDADALENVRIALATLLGGIGGMCRAIRGVADGLDRHRADHTRYARAHRDRLEAAEGHGLRLGELRRAQQDLRTREEAIGSSEEEILAREEETKQRIASATEAQPGAQRGHDDLRDRRVRAEEDEKRSRELLLEQQTAVITAGSTLRGAVGRPEVIGGAGLDRSSLPALLLDDPAADVRDRIRSLRELADAVRGGLDRSRKEVSDSTLLNGHTALRDQLAGGYDAQLEELAGIKICRLVDDHGPHYVAVVGERIADRAAEARGRLTERESEVFQRFLTGELGDHLSTQVVTAANLVSALNDTLKTVRTSHGLGVELQWKLDEDVDADVRAAVELLRSPSSLRTREQGEQLREVLQRRIEDARRTDPSAGYAAHLRTALDYRDWFRFHTFVVEDAVPGRKRKLTGRTGLSQGEQRVLSYLVLFAAAAAHFTTLGESAPHAPRLILLDDAFAKVDEPTHGRLGRILVDLDLDFVLTSERLMGNWAEVPSLHIYECLRDPHARGVATLHYTWNGRHRRLVSV

SEQ ID NO: 40080 - protein, 420 aa, Streptomyces sp. WM6372
MSRIPAATHDWLAGPGLVRLWESARKRLEGNGLQATGSVRLSGLAVKERNDLSLLLGKPITGATATVQLDSLDIRLRSSAAGLGLRDVLQELGPPLTDRRAARTEAQARRDQVWSSLASSLEGCQLTNEDWAWRWYDGLRRTGVPNGVTPATAVRTLQQAVHALTLLFGPGRAGTWGRGDLAAEATGSAHGLDDGTWLARLVQRGIALAHDTELPDDAAGRRALWRFASVTPDEVSSTVLAYGLRPDGGGWRERSLYERAVHHVETHLTLRDLHALRLSLSAGTLIRICENPRVVEAAADAACSQPLVCTSGSAATAVLTLLDALAATGCRFAYHGDFDWPGIALANRVVHRYGAEPWRMGAEDYEQLAASTQARNVPQHPLTGPPTTADWDPGLAPAMAALGIALHEEATLDLLVADLA

SEQ ID NO: 40081 - protein, 481 aa, Saccharothrix sp. NRRL B-16348
MDARDHQRTYLAIMRLFTSTLLADLSAGEVAGALAGAEREGRVEPGESRIENVINRLRQLVEWGNLVQGRREVVASSIAEFQHGSVRYQVSKLAVRVQRDVDELLRVPEGAREVSRELLPAVERGLDRLGQSLSDALISGAPRSREVLAEQVTTLFLQHAELAATVRDFYAYLGQVVTRHHLAPEEISGFRNLLVEYIQMVVEDVLRHTPAIADALARVTSARSELLRLLGRADLGDQVERARGRSAEDWQELTDWFVDRPGRPSQVTALREATARAIGSLLASVKRATSGGGLLPSRRAELLKLAAWFDSGTRAEAHELYAAAFGLYSARHVSPAPEHDRDNERTPWRDGPVVDVQVSVRSRGDRGARGRTSRILDDPMTEQSLLAEAREADERRAASVAELAAAAPRLASTTLSGEALEVLCELLTLAMAQRDTAADSGSATDPVRGLRVTVSHEAGRSTRIRSAAGTLTLHDSTLVLD

SEQ ID NO: 40082 - protein, 388 aa, Saccharothrix sp. NRRL B-16348
MFDDLSEIDAANVVRCARTLLRRPLLRADGPDGELLTLVYRHRAALQDLFARQLGYRLVVERRFARLYKSGPGPDDSRGVLGMSPRGYAYVALTMAVLTGVGRQALLSRLVADVRAAAVEAGLTVVDDVADRRALTAALRHLVSLGVLHETEGTVDVQAEALITIDTDLLGQLLTGPVAEASSPERLVELAARPGPRGVEHAVRRKLVENPVVLYADLPPEQAEWLRRNQRKETALLETCFGLHTECRVEGVLAADPEDYLTDLYFPGTSTVARIALLALPELLESDPLAGGRHAVDRARLSEVCSRLVEDYPTAWSKQFTEDLDRLVDEVLELLRRMGLAVVSEDGWLLNAAAHRWLPSPDGDPEREVEPVVVPDVPSWSLFDEETA

SEQ ID NO: 40083 - protein, 678 aa, Saccharothrix sp. NRRL B-16348
MHRGGIVNIWQYTEQTFDFSGGRAIFQGTNGSGKSRTLELLLPLCLDGDLRQVGSKGFDTVSLRRLMLDDYDGGPNRIGYAWVELTRSSDSGSDSGSGSGSDEYMTCGLGVKASKTSQAITDSWRFITSARVGHGLTLVGADRTPLGPVQLRELIGADCVLEEAAFRARVAETVYGVPAPRYGDLLHLQRTLRNPDVGLKVLEGQLEQILSDALPPLDQAMVEQLATSFDDLESIRENITRLSSADAALGTFLKTYSDYAFGGLRAAAERLGGAEDGVRKLERAAARLSASLEETLAARAAAEHSLASLEAGEQQAEDTIGALKELPAFRDLQDLQTREKLVAEKRSSAVAALDMANKQRLQEDGAVDGVLRLLRRLAEDLGSAQELVEPLRHHLRMTGLSPAAVPEVPTVSTSDAVVRTESVRAKPDPEAEPLPIERRVPPAVEVEVGTLEAVAARTSEIASAARQRGALALALAARAAELDSAQRKVEALRQTARDAQHAATEAAALRNQEAQELAEVAQGWLADVESWQNSGPLATAHPDAPLPLPTTVDPATARTLTTTAREWVSPLVTAARADAHAAAQRRADLITSINGRDAELSGLRSGTAQTPDRGRFTAPTRDTTTGAPFYRLVDFHPTVDDRSRAGLEAALEASGLLDAWVTQSGEPAPNMYGNTVTA

SEQ ID NO: 40084 - protein, 507 aa, Saccharothrix sp. NRRL B-16348
MRVDGGDSGEPAGRGKLFVYLTTSSAFEYRSIMNIFAGPLLADLSAAEVAQQLAERGVVLSVDEVTDRCEKLEGWGNLVRGVRDARVPTVRDFLRSRSRFQASKLGGRVHRDAEAVLAAGDGAQEVARELLGATVLVLDRIIKRIGEPDPDAEALAGDVTTVFNNQRLFNESVRDFYAYLNAVLSRYDLAGEEYRHFKELLLDYVDLITADVSRHAPVIATRCDRLRPLFDRVVEVLDSLPTLIMPDGTPADRLPGRHREDWERLHAWYHETDGHSGPDTLRAAADQALRQLLTNARRMLAAAGTGVSRRADLLTLASWFAKVDDDTAHRLYAATFGSYPARHLFFGPEEQGVRDGVNTSWWDATPIDVPVSLRDRGDRAARGRTSSVPDPRLDQERLLHDAEVEARARRVAADELVAAGALDGVKVSPAARELLLALLGGLLAKNQDHTGVAFEADTDLDLEVIAEPATGARTLVHSEDGDLVVHELRLVARRYTTYLTDRTGRTA

SEQ ID NO: 40085 - protein, 411 aa, Saccharothrix sp. NRRL B-16348
MSPESAGTEEHKAHERRLAARALLMQPVLTAARHPEQLALVRKHSPQLKRMFTTVLGYQLVVESTFARLLKAPLSADTVPRPAFTRNDRRFTARTYSYLALVCASLLAPHISDQVLMSVLVEQVRADAVTAEITLGDDLGASRDLVRAVDVLVDWGVLTETDGSVAGWETRQEEALLDIHRPLLPHLLSRALSGFDSPVALLDGAQADPLEPEQPRRSLRRKLVENPLVRREDLTEAERDVLSRERREVARVLDESFGLVLEARSEGVLAYDPEEAVSDVAFPGSGTVAHAALLFVNALNDESRPAAGDTATVAGRTVPGVRVPWSAVEANIDLIIEQYGSAFAKSYVEKPSSLMQEAVLLLESVSIVVADEDGLVLHPASARYRPEPHRAPARTRAMRRIGDQPPPTLFG

SEQ ID NO: 40086 - protein, 1076 aa, Saccharothrix sp. NRRL B-16348
MRGELATASEREGTLRSVIEGIKELPAYRAGLDIRTLGKSVEALAGTASATPAMAHGRREDEAAAVRSADTAAEGVRAEVERADAELSRVREALATSRLQATALPAAIHASVESPPGGSETVRVSLDGAVDEVERPSPQRLVVTPDELDEVVRVVRDTGRSADRRAGEAARRERDAAALDARTREVTQAVEHAEDLGSRAIGDAERAQDAADERDGTARTLAAEWRTWTSGEQSRKLFGDVSWRETAVGPLLVDADAMVGERTDDDLAPLGHVATDAAVRARAAVADQLAELKQEQRADDEAARKLRLEQSELRAQRDPEPPVAPWVRGTPVGAVPLWRLVEFSAELADHERAGVEAALMSAGMLSASVSGDSSVRADNGEILLTAEAAVAPRSLRDVLLPDPAGLLPEQAVTSVLSRIGFGPGHHVWVDVDGSWAAGPLRGKHRVDHPRFIGAVARARARAERLEAIAAELDELTRRTGERDDERKRLSQVTQDLDRHVRTAPRTNDLLRTRSVARSAAAEAGRSQAAAAAAHQAARLKQEQLAADRRGHEESCARLGLPAGRAQLDEVKAGANQAKHTCDRLADRLDSVRRRCHEHQGALKAVGNATALRRDAESAAHKSWSEWHGEHGKFTTLRDSLGAEADEVTERLEAAEVEYRRVRASVATLSEKERRLDKEADKAEESVTSTKARADNAVVHTREALARLTAQVALPGIADAAAGTAAADLLTLCTSSGAPTGPGVERLVTTVQQVLDRKGQAIDENGLMRSLRAVGGNLANTFDLTQTIDEGMWLVDLTDAMGRQHVAVAAARLREQAAGAAAALTDREHRVFTDFVIGGVGEELRRRLIQAEDLVRAMNTSLTNIRTSHGIGVRPRWELVEPKDSPIARIRELVAASAAVRPAEHTDELIRLLKDRVDERFEKDADAGYGEHLRTALDYRQWHSVEVSITGPEPGQVRKISRRAKLSQGETRFVSYVALFAAADAYLSGLPDTGSALRLILLDDAFAKVDDRTIAELMGLLVRMDVDFCMTGHALWGAYPQVPSVDVYEIRRAEGTAAAATHVHWDGRNRHYLRSTG

SEQ ID NO: 40087 - protein, 496 aa, Lysinibacillus macroides
MSRMMKRVVEASYLTAQSAAHYRTILRYFYDQHERMRDFITPEEILQHLRTIPQFEQYDEEQLHQQLAQLVEWNNLTARQDMTNARTIEEYKKKRFRYQPTPYTIEIERMLIELEKMVDDTFKGSLERSQFERLLETLQKLEAKPMTPDACMALWEDILQYFKTIRTSTADYIAYINSEKTDQRMQTEAFLIYKAQFTSYLRDFIVSLQKTSFQIVELLQKLSLEVMQPFFRELVNKERLIPRLEEIQLTDEELCQQYEQYWQSIQRWFLEVGGEKSELEILQWQTNEMIRRITRYVQRLGERQHHFKSRRNDYIHLAKWFGDCENVADAHKLSSVVFGMMQVQHIQLKTYTTDDLHSDTWDEKPELVSMKPRTNRYREKTKATGTMLQTAQKQKQREQYLQERQQQEMVLSSYFNEGYVQLSQLHEVESFVRKLLLSWMAKARTNQQGLVKTENGMLLRVHVLQENIVLHAEDGQLSMPDVRFELVKEGEHGGAI

SEQ ID NO: 40088 - protein, 382 aa, Lysinibacillus macroides
MEGLFDEKAVQGLDYLLHHFWVLRKENPAMYQLIRERQKVLKRYANDKLGLHLHIRQHFIKLEKIPIVPERWMGIQTFQTPMDYMIFCYALAFIEGKSIEEQFLLSELCENIRAIGYEQIELDWTVYQHRKALIRVMKILVDLHLIATIDGDVQGFDHHENQEVLYEVTIYSRYFMRAFPEEFTQYEHVQQLIEGDRNMLGEDERRKRVYRQLFTSPAIYRQDGQDQDFLYIRNFRNRINDDIERHSDFKLHVFKNVAFLSVTEPKKYYDLFPNTRAITDILLQLSHYLHTHLASYPPRENGDIVLTEGQLQAVLEEIREQLGEGWAKLYRDKTTAAVREEVVEELMNWRMATLDDGFVHIHALLGVLAGTYPPDYQKEAEK

SEQ ID NO: 40089 - protein, 1346 aa, Lysinibacillus macroides
MTKWQMNRAGLLNFWYYDDEIFSFEQGKLLLRGTNGSGKSVTMQSFIPVLLDGRKTADRLDPFGSKARKMSDYLLGEEEISKREERTGYLFIEYKMADSEQYITTGIGMQARRHKDLKSWYFVLTDNRRIGIDFELAHRSKAEIIPFSQKELQNRVGVGGVVVDSQKDYAELVNKYIFGFETMEAYEDLVKLLIQLRAPKLSKDFKPTVIYEILESALPPLTDDELRHLSDTIESMDQTQQQLEQLTIEYEANTKILKKYHAYNEYILAERAFKVVAVEGRLKKAEEARMTKQQQLDEVRETAKQLKEEERHVQRDLTVAMDEEERLRSHKVWDLQNSLTNKKQEHHETMATIKKLSNRKSDEETKRIKLLHRLRDQQDELSSTEKEQRETLQEMHDLAQDAAFQAHALNVDSLARGTMEFAYWGQEVEQHKEQLRQMKKLVSEQLCLAEEDRKLERASSEKTRQIDMLQKELEQAGHWYDEELHQLKTALFVWMQKHDKLAFTAEEQQKISHILNKMYNEAPYHEVTNILMAALNNYRAELTVERTANEVAQRQNELALQDKQQQLEKLRNEELAEPQRVVGTVLFREQLVQQQIPFVPLYAAVEFQPHITDEQKSRLEAALATTGVLDSLISPQTFEVTEDALILPNAQLFGHTLADFLQPDVDVDGISVTLVDEVLRSIPVEQNSEGFSVDERGFYRIGCVSGHAPQQGPSKYIGRASRKRYQQEQIELVLAEITDLQNRQAQLVKMQEEIMQTFDDVMRWQQAIPSDRTVYDIYEEMVQTKNKQKGLKEQLQLIDQEWQTVRQSLRDIRQQLLEVKDTLNIAQTKDAINEALQVMDTYLKELNNLRFAILNQQNLHDRIRDGQFQLEEVQAKIDEYHDEFVDAENRLDKIIAEISSIETQLKLEGADAITARIAELQATLQQLKTRDDEIRKALPTCEAQQTLLSTQLENADKEVTFAKYMYAQWQKALQDELDLAFIALEDKTPQAIDKQLKAALQHDRVKLQEQLSKIINEEMNALAEYHVSSYLKETEMLAAFAMLEDDRVEGFTQLRGRRIIELEYRGQRVSPYTIDRALTAELEERRHYLDAQDRELYEDIIVNSVGRILRQRVARAQQWVKEMDQIMAQRDNSSGLIFSISWKPRTAEGENELDTKDLVQLLQRKSSFLSEEDLQKITKHFRSRIESAKEIIGLRNEGNTLHQVLKEVLDYRKWFSFVLSYTRQNETKKELTNNAFYKFSGGEKAMAMYIPLFTAAYSRYKEADAMAPYIISLDEAFAGVDEQNIRDMFEVVEQLGFNYIMNSQVIWGDYDTVSSLAISELVRPKNADFVTVLNYVWNGKERVLNG

SEQ ID NO: 40090 - protein, 413 aa, Lysinibacillus macroides
MANLSAFHHAAFHKLFVLFKKKYYSLGRMRGTVSLRTFNAEEIEEIAGFLAVSPAFLQRKGSIVLAQFEEKLATSAFHDLSLVQLVEAILNEPLTTKEQEQTTKLQSEEQFVCQLRLVLASLPQWLARILEKLPDSRFIWQQQASILPAIQCVAQAIKNRLPAGQFERLPIFAQRTTGNPHAFDAQTLYGRLLLHAAFSLNEGEFPKTSEERSELLATLGIVQDDLWNFVTCQGLRAFEKGQENAVWKAAIQENSVLNMPMRELMKIDFVQPVTGEAVWVVENSGVASTLMDAHPTAPILCTHGQLRMASWRLLDLLAENVEIYYAGDLDPEGLLIAQKISRRYGERVVLWRMDEACYEQGLAEPLADVQLLKLKNIKIAPSLVARMQQEKRAAYQEAWLAWLVDDIRLLMKN

SEQ ID NO: 40091 - protein, 529 aa, Streptomyces chattanoogensis
MADARQVVGYLVRPEAGDYIAIMDVLDGSVTDRTVAEIAAALSDTGHRMELRLVETRLDALKSMGAVSVRSDTSHARRYSEILARNWRYTASPAGRHVQRFYRQVLAGTATVREIPIVSLGRIVSHLEQLATSLGAGELAAHRVDATTLDSANAVFTSHDDLDAALVGAEDALMNLADRFDLDEDRTNDLKGLLVDYATRVATELDSGSARAAAALAVLRPWFATLAQAAIDASQARDLIAAGALSASRGGRTEDWDGLCAWFDARTGRAARFSLRLVRALPSMHANLRRLHSSSGTASTRTRALALARAVLTPKIGVQIFQAALGDHPWRKLYGQAEVDDTGRNPSWRGGPQVPVPTLLRTAGRSGPRGRGTAPRDDSAAKTQVARDRAHRQAEHKRAVAAVLSSIPGQCLDEADARVALSALMAAARATASGPRRTGTSEGLACTLVHTGTGTGTLNAPTWRVLLPNRIPLFHLPGSRPSAAALSALAGTHTKDDISARTTLRIAPQLGHETGDDETPTATLEEGAA

SEQ ID NO: 40092 - protein, 416 aa, Streptomyces chattanoogensis
MATHPWLVGGRDDELIAAVRRNEHALRSAVARLGWVLVIERDLVRLRKSPPPRPQAWATQGPSPAACSWFFLLLAAAESMPPRTAIGHLVTQARAAAAEAGLPTHHDIAERRAILAALHMLDERGIVERLDGDLEGYLHDEQAPVLLAIHHTRLAYVVANPGTLDPATDPHAWLQQAQREPDAARRMRRALVDDTCVHTALLDETEAQWLSQRVRGDDGGPLADAFGLVLERRAEGAAFIVPDEAYRHMNELGPMPFPAPGTIAHAALLLLDHAALNGTTGNGPGPGWRGMSEDQVVAALTACADNSASGKGGWGAEYAKDPLLLARKVRDLLTGTNLARLTPTDSPTGGEETTTMWWFAPTAGRWAQAGIAVPKAVRPRPRSSRVTPAHQCPPTPLQQGLFSDIEAKEAMEEPTP

SEQ ID NO: 40093 - protein, 1412 aa, Streptomyces chattanoogensis
MNDILDLDFSLPQSPPPSGDPRRFGARWRLVGAGLSNVWRYGDLDLPAASGRLLLRGPNGTGKTTALEALWPYLLDLNAAKLAAGKARPTTLKLLMSQGAPAKGRRYGYLWLTFAAPTGEPAAGTEQETATDEDRVSFGVRLQYSPSSIPAVRVIPFTVPGRPLKELALRAPNGGALEHEEFSDRVEAVGGQVFTEPDDYIEHLAHRIWSTTPGELRLLASRLREVRNPTLLGDVSPAAAADALRQSLPGVAGDVLTATAEALAESDTTREAFERDEHAATLLAEFARVWTGHVIDVTRTAHTAARKANDEAATRSRHVQQTTGRLNTAKSAAEQARTNLQRLSDAHHAAQAAARAIETSEAYRSHDRVMDLHKRLRAEQKAAASSYDRLQAAAEQAHLQTTVGQEALNEVIADLTDLTTEAESAGAQPATLQTLLAHHPRARITRPVADHVIDPGPGLTLTHDRAGLDQLATTWAGTAQEHSAAADRAALILRDHEPVAAADTATKTAHHAAATAESAYDEASQTNDRATAAARSAAQQVLTDIARWAQENPHLRGLHDNPELAWDEQPVWDTEDIDALTAAEPAAVRDQLNAWGDQAMRISETLAAVHENAAKQHLATAADLENTAAQHRSEARHLRAGQLLPLPRPHWAGPGADDTALGAMLEWHPTPDATDKHKALLELALANSGILSAHLHPGGATTHAWHISPTGTVREQNLTTVLDIAPGHPHAALARAVLERIALADTATGHHDPAALVIGRDGTFTAGPLTADPVTALNAADSKLPDASHIGARTRLAQARAKADELDAAAQELETSAAAERRTAAERRKQRNTTRNQAQAFPPRHELTAAEAERARTAQETHQRQNTARTMRQHADDAAAEHTRLRTDWAARARSLGMPAEPAALTSLIADGRKHAGTLTRCTTQLSARLLPRLQRILQTLPDETALTECLADLHHVAQSTHTTALETQAELTEAQSHGDAEDAARRFEEATDRAKDLYRHLESARTQLVAVEKQLSTCESNLEAAQQRFNEARPLQTETRSHLTALLTWPPLAQALGASPDLFPGGADGPELLDTVEDLLGRRPTASKKTLGERYDTVRAELAQTWTIARDDSPAGLEQLETFILTHAETHHDPLSAATRAQTLADRAKAALDAAEAAALRDFVIGRLPAAIGTAWTALTDWKKTVNRKMRAAQASSGVGVQVHIGLRDDLDAATRTVYELSCKVGDAVRTETQKEQVGQALQSLLAAADGSTMTERLTAAVDIRNWVDVHYLVERPGPDGKPVTGQWGPRTGLSGGERRLVVLAPMLAAIAANYDRFPAAGLRLVPLDEVPAEVDERGREGLARYLAELDLDVLCTSYLWDGAPGAWDGIDAHDLEAGADGTVVAFPMLIRSGQDLPERTDPELHTGRQA

SEQ ID NO: 40094 - protein, 307 aa, Geobacillus sp. BCO2
MTSESFLVYKEQFTAYLRDFIVALQKTSMQIEQLLEDLPEEGVRQFIEHVVDYERSIPRFADALPPRPMQIEEKWETWRSLCEWFLGRDGRESELLFLQYQTNEAIRRLTRVVQRLGERHHHFRSRKGDYLHLARWFSRLESIEEAHCLSAVVFGCFHTKHLVADAEATDNIYRDVWDEPPAEWVTKPRVRHYGEKKKPQAIEDKEREKEEARLRYLEEKEREEAALRQLVTDGKIVLADLPEVTPYVRKTLLGWIAKAMGREGKAMKTENGWVVNVAAKEGTICLRAEDGELVMPNYEIHVLSGGE

SEQ ID NO: 40095 - protein, 359 aa, Geobacillus sp. BCO2
MEAAFDDKAKEALAALFEQFWIIRDQEPDLYQLIREREHVLKRYVEEKFGYRLIVHRYFAKLEKIPADPEPWMGIESFQEPLDYALFCCLMAYLEGKAVEDKFLLSDVCEEIRAMYPGDLPVDWTNYAHRRALIRVLKTAEQIGLVRRMDGEIEAFAQHVEEEALYEVPVLARYFMRTYPKDLLQYESIDELLAEEWKASPQDYRRHRLYRKLFLSPVVHRTEGDEQDFYYLRNFRHRLRDDIEAHTPFRYELYKNAAMLTLPERQAPYTTFPDQKGTSEIILHFAALVRERLRDYPPDEYGRIHLTPEQFSAWLADCRRRYGAGWGKHTAICRPPSLSERCLRRFANGAWPIQSATPA

SEQ ID NO: 40096 - protein, 350 aa, Geobacillus sp. BCO2
MANPWVLHRAGLINFWYYDEQYFHFADGKLLLRGSNGAGKSVTMQSLIPVLLDGKKTPDRLDPFGSRARRMEDYLLGEKDVVNRDERTGYLFLEYKRKASNQYVTTGIGLRAKRQKASTFGGLVMFDNRRIGHDLQLYKQEKTGEKIPLTKRELAAALGAGGTVVETQKEYMELVNKHVFRFESLESFQELIELLIQLRSPKLSKDFKPTVIYEILESSLPPLTDDELRHLSDTIENMDQAKQQLEQLERDERALKRLCDQYRLYNEYMIAEKAAEYVKAVKQAEQLAAEQQRLHDEEEQARTTLDELEESITRLNREEDVLRAREIDLAGHEVFQQAEKYEQLKAERQR

SEQ ID NO: 40097 - protein, 501 aa, Rhodococcus sp. ADH; identical to SEQ ID NO: 38558

SEQ ID NO: 40098 - protein, 480 aa, Rhodococcus sp. ADH
MRAREITPLALDSYQRAARVILSNHLITSTYPDRIALPLLRRWATELRDDLLELFGYRLEVTETTARLFTVSDRLNPSAPARTASERTFDRTRYAYLALCLAALGRAGNQITLSELADHVAADAAQVDGVELSTDRASDRDAFVDAVGWLGVRGAIALADGDANGWASNPEAGEALYDIDRSVVVALFRPPRALQHLHSIRGLLAVETSSASEDDGIPVDAKEIGRRVRRALVERPVVLAGELDQHELIALAQPKTASEVELLTGLVAERRAEGIAMIDPTGRLSDVRFPSTGTIAQVALLLAGEIADRVLDVDAPELPKLPIPHVSDDHLIEQLDAAIPEAGIFEDLADEDDDFVLPAGEPAEPPPPVTYPKIDDDWLADKVTELVDQFGRTFAAQWQADHNGLRKQALGLLQRLRLTHAVDGGVLVLPVLARYRDVVVSVRERDPQIDFAVDNSAPDPVDEFGPEPSPNGELSEVENV

SEQ ID NO: 40099 - protein, 1391 aa, Rhodococcus sp. ADH
MSNARFRPTRAGIINLWDYRDQEFSFADGRLVLRGPNGSGKTKALEVLFPFVFDGRIEPRRLNPFAGEERTMKSNLLYRGQDSAHSYVWMEFCRGSLEDPESVTVGIGMRATRTNDKVTRWYFVADGRVGVDFSLIGNDDRPLTKKQLAEQLGSDSITDRPLDYRTAIDARMFGLGVQRYDQLINLILTLRRPQLAKNLDPKGLSQALTDGLRPLDDQLVLEAARSFSDMEEVGRALEGLAAADQAAQSFIGVYTKYLRQQSRGEIEQVSTRLAAVTRGVAAMDESSLAQTRSREARAAAEERFNQAEQALENARANVEALQRSSAYEGKQQLDDLAQAVATLKLSTEQQADKSRKAQAALAQRGDEADKAASSVKRAAEALSRAEDELQAAAEDAGIVWTPLPDGSRSDQITAAVRGHAEERDGDVRVVRTALATVEKAATERTRAENSSRRGQELLEASKAAVLEGEAAVELARSQCASGLRAWWTDHSSLFSAVGADTSLFEALDAALAEVGDEDAPALSAVLAEHTEAGTETLRERRREAEAEISASHASIAALKSERKAVSAEHDDAPPAFHARTDNRSELGGAPLWQLVRFADSVEPDVATGIESALQAANLLDGWVCPDEKIPEHVSEQFLTALPVKQRPKGRTLGDVLEVEGNADVPDARVQDILASISLVEAPGDSDASVAIGVDGRFWQGVARGRHVKADAEYIGTTARARRREARITEIDAALEELAAAVDTAKALVAQTNEQLSRINSAAKELPKTGSILRALKTVTESAGALRTRSEATETAQRELDAAIADLAAKEKQLRATASQHRTPHIGRELDSLAAAIRHFEKQGELALRCRREHAKEVELERESRDRLDESRANAEEFAEEAAIAEESLLQQVQRLETLRDTLGASAEQIDLDLAKARAKIEECKVEQRAARKAYDAAVLQIGTAEGAYNTAVETLRHTLTETRSDAERLAPYARPDLLELLGVKEHLSWPASSAAWMSPDQLVYRIQNEDRSEDAAHPPVLPEDVDRLYRALEAATSAVRVTDGARKATRTALTSALQDFDAQLAAAGQDYRLQWDAPDGLTVVRVQDDQGYSSIGEFATRIHDARGDQEQLLTESERRILEDALLTGLAQQIHERTVDARELIAQMGTEMRERRMSSGNTIGVHWVLADNLDDSSRAISKLLDRDASALGVDELATLRAHFATQIRTARAAHPERSYPEILSSALDYRQWRVFSFTLISGEGKEDRLTVARHSALSGGEQSVSLHLPLFAAAHVMLDSADPHAPRLLALDEAFAGVDDNGRSELLGLSVQFDLDLFMTGYDLWITYADVPGCAHYDLAHSTAEQAVSAALLVWSNGELLAEHDGTDLARALGSPLRRRVPTPAEGALDYA

SEQ ID NO: 40100 - protein, 484 aa, Actinobacteria bacterium OK006
MSRVSEGVSPLELADYQKAVRLVLRHPLVTPGYPDRTALATVRRWAGQLRTDLMEVLGYRLVTTADTARLQRAQDGLDATRPALTRAGRPFDRRRYAYLVLTLAALGRHGAQVALGELADAVAADAVRIDGLGLDTARKPDRDAFVDAVTWLTERGALTLADGSATAWAGDPERAEALYDIDREILLAVHHPTRVLQHLTSVTALLDSADALGMSAGRAAQRRDQARRARRLVLENPVAYYADADTELLGQLRAPALTEDLERLTGLTVERRAEGVALIDTSGRLSDIRFPGGGTVAQAALLLAGRISAAVQRTGGHALDLLPAPTAAERLAARARRIDGALPTRSLIAEFAATDEVGEFQTYQTHVTYETHDEAGQEREETRYPFVTDSWLRGRLKEITGEYGAGFAADLRGDPDRLLDQALDLLAAMSLIARVDGGALAFPLLARYRGVTARVKTRTPARLLAQPPAQTSLFADDTAKDPTP

SEQ ID NO: 40101 - protein, 1390 aa, Actinobacteria bacterium OK006
MRTPASIPAARYVPTRAGIINLWDYRDEEFSFAGGWLVLRGPNGSGKTKALEVLFPFVLDGRIDPKRLNPFAAEDRTMKSNLLFRGQDSALGYVWIEFTHRETGEAVTCGIGLHAQRHRDTPARWHFVAEGRVGEDFSLLTADDRPMTRKQLAAELGRELIASTADYRAAVDQRLFGLGRERYEQLLTLILTLRRPQLAKNLDPAKLSDTLTAGLRPLDDDLIAEAARSFDDMESVQLTLEGLAAADDATRAFLASYSTYLRVHARTAADRLTARRAETAERAAAVRTAAADLAAAREQQAAAETRAESADASLAAQRARLDQLRSSAAYQAIEQLADLERLVRACEQTARQASAECERRTAATGRARAEAERAARLAAELDAAVSRDAATVADHAHGAGIPWTPADAEPARLADRSAALAAARHEGVRAVRGAHQAARGAEQTRDLARVSLDRAQEAVAAAETAEAAAEAALRSAREQARAALGQWTGEHGALLAEAGAARLAEALALIGETEAVALADVFTEATTPAVQELRDTLASLRIQRADVERRHAETKAERDRIGAEQDDAPPPARGRTAERSEMGVPPAEGWGRAPSDGVPLWRLVDFDDELTDHQCACLEAALEASGLLDALVAAEDLPVAAGHSEGYLRAGAPVSGPSLADLLRPENPDNLGDPENPGAPEREAAISAARITAVLRAVAVTGDLDTGTPQISPDGRYAAGVLVGAHTKEHAEYVGATARARRRAARIAACETLLAELAAQLDELARAQARTDAALEAYAAARAALPRTTGITQALRELDKAAARLRATRDAADASQASYDESVAACSVAERALRRTAAEHAIEIERVDAVETATRSFETAVRELAARRREHARQTEAAQAGADRLTAAAEDEEAALDTERAARRRHTEEAAGLQALQEAVGAEAQEVMRQAREAEDGIDALVREAEAARMAQHTAIAGTAAAEARRTAAAEAGSVAAAEEKDTARGLRPYAVRELLDILRCPPGLAWPAQEADWAGEALPPAVIAVHEAILSATRDLTPTETSLKQSVTRLTKALDDLQAQLAAAGQDYRPEWDGSDGIIVVRVADEEGPLPVATFAQKISSHRRDQAELLSESEQRILEDALLTRLAQQIHDRTVDARDLIRRMNTDMRKRKMSSGTTVGVSWLLADHLDDEQRAVCALLDADAARLGPDGLARVRTHFAAQIKTARARHRDQPYRELLAEVLDYRHWRQFAFQLVRPGESGKTEERLTRARHSRLSGGEQSVSLHLPLFAAAHAMLNSADPHAPRLLALDEAFAGVDDTGRGELMSLAAQFDLDLFMTGYDLWAAHASVPAAAHYDLAHTAVDHTVSALLLVWDGDRLLADDTGDLTAALGSPGTRRVPTPEEAAVVD

SEQ ID NO: 40102 - protein, 430 aa, Actinobacteria bacterium OK006
MSTEGREHHEYDELRGAGWTRLLAAARRRLERTGGVLDGDIGLARPSEAERRTVIGITGRYRAENAQRLAISLRELDGYLHDRYGTGLLTTLGRLHGPLRDRPAERSDEEARREQALESAHSSRLAAQGWFAAWLERIAADGTLTRLVRRGDAPLLDAAVRVLERLPGDRDRFPGDQDRPPAHPAGALPLPVLAEWATGDTKALVPGSPLEQLVLRALAQRTGGDVPRVRAGRRALWESAGAIADDLASQVLVLNIGAKGDTVVCDWLRDAADFGIPFRLTLHQLATAPVVPAARSIFVCENPAVLRAASGELQDTSAALVCTEGVASAACHKLLGDAVRAGARLHWRADFDWAGLRITAGAVVRHGARPWRMTAADYTAALSKGESTPLAGPPAASPWDPELARAMAESGSTVMEERLLPALLSDLTRT

SEQ ID NO: 40103 - protein, 504 aa, Actinobacteria bacterium OK006
MAEDWWRRLDPDLWEPLAEKAPAVRELRAAVLGALLLASTRTPMSTLADVRSLLAEVGYHDPVSNEDLDDALKALIDTGHVEPFEDYTAVVSSYTDAKRRREAWALTKRARIMVAAVRDVIDSLDRSLQLPPRLLDAVEATVRRILDHFHQDADLLATDLAQVKAHLEQLQEASGDFYGAVASLVQHDVTDDAVFTSSRERILLALRHFAYQTQRALDRVRAALADLKDAGTSSIVERALPGAGILDARAQHSWLSEKRQQLDGLDAWFAPRGSIERLIDASAGAIHTLLGAIERRFYANARGSDLGADFRQLARMIHAQPAEDEAYQVFAAGFGIWTARHPRRPEYEDIAPGFSAAEGALHPAEAVLRTTERGARSAGRPQKIPDLAEKRAQAELVSKVELERRSALAQDLITPGRVPLTHFAGLDADHTALFVTLLEEALDAFDHTAGRGTADTVGARMHVWVGEFGRMVTIELEEGHLTSPDLRVEVISLAAATAGSTEVA

SEQ ID NO: 40104 - protein, 446 aa, Actinobacteria bacterium OK006
MSDADTPADGYTDDEVAESSNPEVRSVIASFLRSQFLTIESDPDLFRLAVHHKDEVRAWFASSVGWPFAAYPSDGMCRLYKRRWDPPSDRPPRIKLQGASKDRTASPFVITLMCLVCEQLWRHPETSFNDLQRALVQTCATESESGRLPRFQPVAQAGEGRARANAHRLGLVDALRLLEDWHVIDVDQSLDIAEQDHRADLVIVARRDRLAALPASLSPSLLDIDLDRPETHVPALCGDQAELPEHASARQHDRRRRHTALRIVVDDPGVTPHADSDAGRYLSSPSGQRQAIDAAAAAGLVCNVRRDWWIVSDPDGATTDVTFPLARNIEEQAALVLLQTLSRPGSEESSPELSLEEAIARIQEHLEEHPHWAASHRSRGAQRMAKNAVTRLVEAGILMNAGQADGRWVITPAAHMWQVRVSDLTEPSSTAASGSASDVAEGLSDE

SEQ ID NO: 40105 - protein, 1796 aa, Actinobacteria bacterium OK006
MNSPSRTNRDLTAFASRLSQPGTTTPIDPHPGVRGRWQPTRCGVVNSWKWANEQFFYGGGWLAMVGSNGSGKSLTGATFCPTLIDGDVSQRSLSASGLSAGTLHSTHTLGHSGPPKVGVWWQEYGFTPDDGEDGQETRWLTVGMWLRSRGGTNNTVDRAWFIAPARVGIGLILERDRSPVNIEDLAQQLAQHDGQMFASEQMAKSARKHLTVVADENSFAEAVRATMYEPLDADQVDALTTVLRALRSVQANDKVSPTYMQSTLTSALPALDGIKVKRLAEALAKTEQLQTRLESAKSEHAVLSKIASSYRRYARAVAVRASAYLLERESAVQQLARTEASLKRQLRQQEETHRSASSTAEELQEEIDRLAATVGMLQLKVDGHPGASLDRLGDEAERREQDAERYKADATEAETRAGESRQFSKEASEKAEEASRHLKALLEELRIQAEEANAEAFHDRLKSVVASLISRPSAEPPAGTEVDARAAKEVFQTWLDQRTATIEKINKALATFLAACTVRDDASDDYVALKQQAEIKEQQWDDLGEKAEVVEDEVRAEITQLISTFRYFSALPEELLSSAPLHVDALERWADQSLRQALRTIDVEGHKAEVVGLEKLLAEALHRRHGAQTAAAESARRCTDTLSDLTSRLLELVETPQSFIELSDSVGQAARLCSPERDLAGFDVVGSLERVTALAQAAEQEIRERRTRLQEAERLIREQSVARTKAQDSDDRAKAAESEARQAVQTVAAAERAAEEAAGAWVTGVRQWAEELQELDRTRLRLPAQGPVGDAAIEYLASDVSEARDAALTRLTATQTKAQDDATRLSGLLDDFDGRIIEAEQEMTGPDEPSWRPDRTGRSGAPLWALVEFAPGLDDELADRLEGGLLAAGLLDAWVSSDGTWAGGDVHLVEGAAVDGPTLADLLVPDSASSIPSDRVHALLASIPLTAAGDVPNGDVHTVVGVEGIVRSGVLSASSPTGWESRFIGAAARERARQLLLAGLRIQREDTAAQLLETEEKVQRAQASILRVKEESRYPDPAPLIEERRVAEQRSIEARQLREKATTAREVAREQTELAVQAEVAAAEACGVARVLTDPDDIRGALNVCIDVPSLIERVLGAGRSAVNTAATVHAVVLQVREYEEQQAVAAVALAEAREAAQAAAAEHTALPPLDVVRQAQADASTAEREARSATSAAERAKTTLEERERGVAEARSQLSEVGRTTDGRVLPTEPDVVDAYNTTITELRSRVSDWAEATARTLLLASDAAKQHTTARDAEKRARELDSRAQRERAEATKARHMYGEELRQHGLPYQQLVADLSTKRTDLVRAKTREGEELRRANEADKEIVRVTERLNAQAEKVAASQAARDRSVAEVQSLFDRDLISELVSTTPLNRPDTSEEASDVARQVILQRGLAASITPESAEREESSAFKEVGTRVQKIRLDLSRLSRDISIEDVPDTNWRRVVVTERTQAVGGLSSEVASTKPLRSALDDLGRSIDTLESDFDEQVRTEVKGAILTDLRKHIQVRIQLAKEIVSGITSTLATVRTGVARVGVKLSWEPSESDPVAREALALIQDLDTEGEFDRMYNFFVQQLLHEERTEASWPERVQNVFDYRSWFKWDISLTHTDFSEPGSPAEVFRTVSPRRNPLDKLSAGEKRLATMLPLLAAARAFYEADGYVGPRMIFIDELNSALDEQNLRKLLALLRSWDFDVLVTLPSMQPLLVKETGSIGIHKIFHEGSSLRYAIPSIWSGHGAPVTARIAVGVQHLPRQRSHHTAAPGDGQDSLFGTGTEGIG

SEQ ID NO: 40106 - protein, 453 aa, Actinobacteria bacterium OK006
MRNRGDLADPDLRPLWQAISVRLAQGGDAGSIQTVRVELSRAGRAMLTGWLSRAPQVSRRTVALRIEGGFTVVPVQRVLRALTMTADELRDVVEQNVGKIPPLAEDRRRAARLREDIWAYAATVLPDTPRLTARLQARGVVDDRAGDLRHLIDALARVRAKLPLSRPATLARLSLNCAGDPHYFDLNDAGQGARLVLLSADMLGADIPDTPAAERALLARIGIVADSLSQTVLVLNVNATGNGPTDRALRLAHEDQRPTHLTLHDLTLYPPILDRAEPWLVVENPSVIHEALMRRVRSPVVCTSGTLTAVDHVLLGLARTRGIPMEYSGDIDTGGRNIASAAHRRYDVPSREMDSDTRRAVLAAGALSEGPYPVPTLAGPSYTPSADDRDRGTGRGGDSEPVIFQEHPTVLDRLLGSDPEDPLPLPGSQPHNRDSSEPPHIPVQGGALADPLP

SEQ ID NO: 40107 - protein, 495 aa, Kibdelosporangium phytohabitans
MYAYLQAREHKATYLAIMRLFTATLLADLSAGDVAAALAPAERDGTVERGESRIENVITRLKQLVEWGNLVQGRREVVAASIAEFQHGSVRYQVSKLAVRVQRDVDELLRVPEGAREVSRELLPAIERGLNQLGKTLSNAVGQEQRDAGSGAAQRSRELLSEQVTTLFLQHAELAATVRDFYAYLGQVVTRHHLAADEISGFRNLLVEYIQKVVEDVLRQTPAIAEHLTGRFANARPELLRLLGTSEGLGPEVERARGRSTADWQELTDWFVDRPGRPSQVTVLREATARAIGSLLASVKRATAGGGLLPGRRAELLKLAKWFDDSTAAESAQMYAAAFGMYSSRHVLPAPEHDSDDERTPWSEGPVCDVTVSVRSRSDRGARGRTSRIMDDPITEQSLLADARRADEVRAADVAELVAAAPKLDQVTLSQGALGVLCELLTMAMAQRDSAQDSGSAEDQVRGLTVRIEYAEGETATVRTAGGTLTLRDSRLVVG

SEQ ID NO: 40108 - protein, 409 aa, Kibdelosporangium phytohabitans
MSAADPLDGLADIDAANVVRCARTLLRRPLLRLGGPDGELLPLVYRHRVVLGEMFTALLGYRLVVERKFARLYKAGPGEDSTRGVQELAPRGYAYVALTMAALTGTGRQVLLSRLVSDVRAAAVEAGMQVVDTIADRRALTAALRHLVSLGVLTETEGTVGSASQDAPAEALITIETDLLGQLLAGPVADAQDAGHLVALAARTAPRRVDFQVRRRLVETPVVLYADLAEDEREWLLRNQRRESYLLERCFGLYTETRLEGILAADPEEYLSDVMFPGTSTVARIGLLALPDLLGANPGEEPEESEVDSAGRRPVTAEKVREVCERLVADYPAAWSRQAAEDLDGIVTEVLALLVHMGLAVAGGERWWLSPAAARWWPEPDGDPEREIAEPQPEPEVPGWSLFDEEGGA

SEQ ID NO: 40109 - protein, 1350 aa, Kibdelosporangium phytohabitans
MTDRWRLHRGGIVNVWQYAEQTFDFSGGRAIFQGTNGSGKSRTLELLLPLCLDGDLRQLGSKGFDTVSIRRLMLDDYDGGPNRIGYAWVELRREGHTLTCGLGVKASKTSQQISDSWRFITPQRVGIDFQLAGPDRVPLGSAQLREVLGADCVLEEAAFRAKIAETVYGVPAVRYGDLLHLQRTLRNPDVGLKVLEGQLEQILSDALPPLDAAMIEQLATSFDDLESIRENITRLGTADKALRTFLRTYSDYALAGLRTAADKLKSSEDNVRKLGSQTKKLTAELEKARGERAEAERAEQDLEGGEQQAEETVDALKELPAFRDLQDLQSREKLVAASRSAASAALDVAGKQRLAEDSAVDGVVRLLRRLAQDLDSAGEFGESLRTALQSAGLDTTLAPSMPRMTDGESVTITERVRAKPDPEAEPLPIERKVPPPVTADELLTALTEAAERAGRAAKEARQRSALTLALHQQAVEQEKQEQRVETLRSSARAAQLEATEAAGRRNQANQELVTESDVWLEQVRSWCAAGPLTSATPERPLQLPSVEELSANPAQARELGTAARQWTAPLVQTARDVAHTASQRRTETRDAIGERDAELAALRAGKERSPSSPVSRESSGAAFYRLVDFRADVSDADRAGLEAAMEASRLLNAWVTPSGSVPDLDDVLASPGTAVDGPSLADVLVAVEVPDSPVPADRVESLLRGVGMGESAASMTLSADGSWRAGTLHGRGSKPAAEFVGAGARAAGRQRRISELEEELAELRTELAVAEEQQRSANDVVAEWERHLEKFPGDEELIAKHTRMRTEQEATERANKHAQQLREEHDQMQNRWQATTADLLRQAGDAGLSPRSEDLRQAQQAAAEALGAAERLAEALRQRCRGTVEDLVDATHRYHTAVADRTTAESEADQRCAEYAAQAGTLSELTGSIGGEAKEIAARIAELEKSRKQMRGQLKDIREWITALREQAAKLDAQLESATEQLATSEEVQAGAYRQFASIAEAPGVLPAALPELAETDLAAVRAAVVAASDRKSAGETAVITKLQDLQTALAGGYDIAAEEHAGLLTVSVAGEEGGRPVAQAARQVSSKLAEQRGFLDEQYQRIFADYLIRDLAEWLRGQITVAEDLARRMNDVLGQAKSSQGVHVQLEWKPSAALDDETRQALSLVRMPYGERTSAQDATLRRVFTERIEAERDTHSSGYAEILSRALDYRSWHAFTVRVADTGPDGGQRVRRLRQLSSGETRLVSYVTLFAAAAAFYDAVSSTSEDFSPLRLVLLDEAFERLDDPTIARMLGLLVDLDMDWVITWPSGWGVSDKIPRMHIYDVLRPRNGRGVACTQTTWDGTGMDRVDP

SEQ ID NO: 40110 - protein, 539 aa, Gordonia sp. QH-11
MTHGVGDATEGTDLPLDGYGPFAYLSAPNAPLYRRVMRALMSEKERFTVHVRPDQVAAAVSADGGELVYEDTIGDALERLARPEWGNVLAFADSSRVTALADFYRRRMLYQLSREGEAAERALAQYDAALGSRGALQSVALEDIVVLLTSLRETVADTASRADADPALLHQTLRGLRDRFSELAENAVAFMGSIQRTIDLHDADVEAFLAYKEQLIEYLERFIGDLLTKGAAISELLAAIPPDAVDFLADTAAARETIDAAPGDADAAYEAARSVWLRQWSGLTDWFVSTRERESESRLLRSRARAAIPALLSVVRALHEKAGGRTDRTHDFLTLATWFATLPADGDRHRLWRSAFGLTPVRHLSVTTATEDAWADAELPTNVPWAEAPPVEISPQLRRTGSYERRGKASRVADRTAAKAMLAAQSRAESEQTAQARRRILTDGPRLMSEFGTLDPQAFRLFLGLLGDALSAIGPTGTHAQVNTSDGELVITLTRIEGAGQMTISTPDGDLVGTDHLVDIAPAVGSLLGRQAAEPAAAR

SEQ ID NO: 40111 - protein, 420 aa, Gordonia sp. QH-11
MTQRGTGVADVLEARDAEARIRVVRALLARPVLSAQRDGELFRLARRHADAVRAWFAAETGWRLVVDGETIRLLTSYAPVGPTAAAIAERHPARAKKGDPPFTRRRYVLLCLSLAVLERSDLQTSLGKLAGDLVLAARQPGLESIEFTLGTRAERSDLVAAIRVLLEYGVLVRVAGDEESYVSADGDALYDVDRRMLSTMLSSRHSPGLIASSLGDSPNIDRIEEALHEPPPAYTDEESNRLLRQAVSRRLLCDPVVYYDELPDAERAYLTGQRVPLTNRLVAATGLVAELRAEGVALVDPDDQLTDLRMPEQGTDGHATLLLAEHLASAGSSTVGALHRVMRGFATDHSSYWRKSTREPGAEVILTDEALDRLVGLGLVSVTGVGAGAVVQSLPALRRFAVSAPTIRDSSKPTRDRKSR

SEQ ID NO: 40112 - protein, 1366 aa, Gordonia sp. QH-11
MTESVRSTPVPDSLPSPTLSRWQPLRLGLVDLFYYDDEQFWFHDGRLLLRGNNGTGKSKVLALTLPFLLDGSIVSRRVEPDADPKKKMDWNLLLGGAHPQSERTGYTWAEFGRIDDDGVEHFTTIGIGLKAASGRGIVKQWFFVTSQRIGEQLLLVDEHRTVLTPDRLRDALEPGSGGQVYTTQEQYRRAVDEAMFGLGADRYSALIDLLIQLRQPQLSKRPDEKALSSALTEALAPPSQALIADVAESFRSLDEERVGIAAARQTLTAAEGFLRHYRGYSAVASKRATTDVRLAHSAYEGVGRELHEAQEQRAAALASEARLDAEKVQTQERLGALRGQEQALRASPEMKDADSLDRAARSADEAKGRAEAAATQAAQSRERAERDQAAAQETAERHAHTAEAHQRNAAAALTAAAAAGMATEHPSVVDDEQAARRALDRRREQIRHVRGLIRDADRATAAAAQQRSRLDSAESDLARRAEALHSEVAGVETAVEAYRDAVREMATGLSLISLDAEPDELVGHAQVWAESLDGESPVRAELDRSAARATERIHRDLADAESAERELTGQRDDTVAEIARLEAGDDLTPSAAPGRADDRGERPGAPLWRVADFAADLGDDARAGVEAALTSAGLLDAWIHPDGSVEADGDVVLGSVGTVVVPSAGSALVAAVGPDSEVSAATVDGVLDRIGWGADSGAALWIDGTGRWGAGPARGQWRKPRAEFVGAGAREAYRREQLAELRRRLDRISDGLAAATERVAAAERAGEQILVERGRYPSAAEHDVRSAHGRVAAAQREADAAQLRLAEISVEWEAAVERAESAAQVLHEQAAELSVPAVDSDVDVLDVAIADYDVRLVTLRSSATMLALAEAELAQAGRRAAETADLSARHTREQQEIGGQAIALRATYDELFATVGATVAELQERLATLATEMDAATSELDRLGVAQLAAAAESGTLAQRVVDLTARREESAATREGAIERLRLFIETGLLRVALPDFDYSDDVDDPSVRAAVLLSRAVDQRLDSVAAEDDQWARVQQRVSSAWTELTSQMAVHGHVTSMEQRGEILVARVRHNHEDVDVDVLAQRLSLDIDARERLLSAREREILENSLVNEAAAHLHELISTAEEQIDRMNDELAMRKTSTGMQLRVRWRERADGPAGLAAARAILNRSDATWTLDDRSAVGDFLQAQIAEVRDADPAGGWQEHLAQALDYRQWHRFAIDRRQNGEWRSASGPASGGERALVVSIPLFAAASAHYNSAGGLAPRLILLDEAFAGVDDDSRAKSLGLLATFDLDVVMTSEREWGCYPQVPGLSIAQLSRVEGVDAVGVTRWRWDGISREPMPEVDAAARAGHPVAVDADDATLFG

SEQ ID NO: 40113 - protein, 453 aa, Gordonia sp. QH-11
MVREDRGSVERLLRAPELAWFVDRIRNRLPGAVAGEPLSGTVRLPHPTPQQRTAMADLIGRPRRSGVTLSVKLDDVETMLRRGPWPAGLADLVVSVSGPVVDRSAQRRADDARWAAVAQRIAPVVERFPAVGPWWESWCAAGKLKRVAQSEARRMGRDADAAVGAGLVEAVVAVFDDLPADGVLLAMLARRVLGDAHALDQARPLGRLTSAVVAAAFESAADASTREVWGDAGVVMSGLSSTALCLGVRGRAGVADHAAATSAALEAMRAARSPLVLTLDQVRSGGVDPLGAHESVHVCENPSVVDLVSEGWRRGGGVARAGDGQAGAGPADDEEAWAGSPVLVCTEGQPSSAVMEVLAILTSRGARCRYHGDFDWAGLRIAQFVASKVPWSPWRYGVQDYLEAIGPDAPSIGLSDDRAESAWDPALSVAMAEHGLAVEEEAVAALLAEDLVR

SEQ ID NO: 40114 - protein, 517 aa, Frankia sp. R43
MEEHGGSGAEDETAVQDAAARRALFSYLTAEAADDYMAVMRLFSETLLADLSAAEVATQLVERGHELDADAVETRCRQLVIWGNLVPSVRETRVRTVAAYHRSRSRYQVSKLGGRLHREAEEIMRATEGAREVARELLARVSETLRLILLQLSYRERPIDSELLAGQVTGVFNDHRLFHESVTDFYAYLSGVLTRYDLAGEEYAQFKNLLLDYVDLIGADVSRNAPEILGRLKTLLSPSLIDTLLENLPEPPATGDALIVVERLPGRTRAEWEQLAAWYGASSVRSGPEQLRVAARQALGQLIANAKRMLAASGTGVSRRADLLKLAGWFHGADSETAHLLFDAAFGAYPARHLLLGPEEQDLRAGPSTSWWVAAPVDVPVSLRERGDRTVRGRASRVPDTKEQTDLLMNAARERAQAREAAAAELLAAGSLHRSRLSRAARDLLLELLPPVLSATAGGETEADHHASDLGLALRGVPAPGQLTVINGDDGTLTVDGLLLSVVPLAGTGRARTAASA

SEQ ID NO: 40115 - protein, 413 aa, Frankia sp. R43
MRPTPETGTAASSARERVEAARALLAHPVLTAASHPDELSFVRLHAPALRGMFKAQLGYVLVVEASFARLFKGPLAPGAPSRPARRRDNSPFAPVTYTHLALLCAALLAPGTGEMILISALIEQVRADAATIGVPIGDTLPERRALVTAVELLVRWGVLIEADGTAMAWGERQIEEALLHVARNQLPHLLARSLTGVVTPDELLAPDPPAAEQPRRSLRRRLVESPLVRREDLTDAERDVLSRERSELTRALAENFGLTLEVRAEGALAYDATGSLTDEPFPGTGTIRQAALLLVGALLAEREPRPGDTAVLRDGRAVAGLAIGWPDVEATLARLSSQYGKAWSSAMLDDPRNLREKIAATLAEVGLASILPGGLVIHPAAARYRPQPNTARPTRAARRLGDGQAAYHPELEL

SEQ ID NO: 40116 - protein, 1397 aa, Frankia sp. R43
MQQTLALTEGTEDRFGPTPIRRHPYRWRLSRAGFVNVWHYYDNTFDLSGGRLILRGTNGSGKSRALEMLLPFLLDADRRNMGTGTAVRMEDLMTAGAGEQTNRLGYMWLELRRDVEADEDPASGYLTLGALVRFSASTKEAKVWYFTTALRVGHELSLLTADRKPRGRKELGQAVGEDRISDGPEPHRERVRAEVFGLAGGDAGKERFNGLMKLLHTLRSPDVGNRIEEGRLPQIVSDALPPLSEEALTDAGQQLDGLTSTRDEQKRLEAAHGQVVGFLDSYRRYLAGVLTRSLTGTRQRAANCLETEAEAVRKREIATGLDSELLETLERRQLLADQVSELAAALDALKESDRYRGAKELTELSATVSSLAETARAKLELAQLRREGEVELAGAANALLTDMSSAVDELSERIDQARDQLTRVRLTAHELPASIGLVRTPPERRSDLVRVRRDAPPVPTLRPAADVPRLVPPDLIGLRAAAGSLREAADLRAARATSRAADARRLSDDRAGVQRAVETADDAAVEAETAASRAEQEADERDREAVGLVERWRAWLGDPGTGDLLGDVDWSAQPTLGPLLLDRLVLCGTEADGPVDLSELDRAADDAAAGARDRLAGELHRLDADDTADRRAVELLVTERRQLEASRDDPPLEPFWVTAPRGAALWQCVDFAPGQSADEQAGIEAAMLASGLLTATIDARGQLTATSGQLLVSPIGPRAAVSVAAKLVPDPAGPIDPGVISALLGRIGLADPSAAMWVAPDGSWANGPLRGRHAVPAARHIGAAAREAHRVQRLREIGTELEELAAAAQARAEQRARVEERKKAIRGHLRSAPRSKPLSDARVRAASEERQATQAATKAARLRAEADRRAIALAESEKAHRAACAEFGLPVDADSLADLARAATVAAGTCVAVIGQVDVLTGLAERHQRAVGALAAAAEPRGWAEGDAELAWNEWHAGDTRIEALRRALGADPARVLEELKAIEAGQVAAKRELGAAEAAVGELRSTAATAAAQADNADQKVRDEQAALAEQVDAVRAQLGQPGVVASAFTAKPAEPFTDHTAGAVAADAAALLAGLRRSRIEENALIRAQQVFDREIAASYEVIVTRHSEVLLYELADADGRRPLVEAAADLARKCDQGREALTEREQRVFTEFILGEVGEELRGRLYQAEDLITAMNRSLRSIQTSHGIGVRLTWKLAADNDAAVSRIRQLVMTAASIRSQAQDAELLELLRERVAAEALAEPNAGYALFLRKALDYRTWHTVEVIITGPEPGQERRISRRAKLSQGETRFVSYVTLFAAVDAYLSGLDDTATALRLILLDDAFAKVDDPTIAELLGLLVRLDVDFAMTGHALWGCVPQVPALDIYEICRQDGGGPAATVHVRWDGRNRHFLHSA

SEQ ID NO: 40117 - protein, 462 aa, Frankia sp. R43
MTSPPSAALPAQVQSYLEAPVLRPLWVAARSRLERNGLQATGTLKVDLDETAAAQLSGLLGVRVTAGPKRPVGLAELDAALRRSKAGRGLVSVLEHLDGRPLHDRTAARRATDEQWAQAWRGLDEALATAGLAGAPWVSGWIADLRRTGILTRAGADTAGRALACAASALGLLARTSATGLRTGFRTGLETGPETMSAGPFGGDDPVGWQIASLATATTGDAHGLDDSRLTAAAVLRAAAIASGRPAPLTSAQRRELWHALGVATDGVSGTVLVWSLRPPGDDAWSAMMRQRRDLGLVTHLTLHELGRAGEAALGSPEQTVSICENPQVLQAAARAGAPAPLICLSGSPAEVGTRLVQALVLGGVPVRYHGDFDWPGIAIAGRVLALGAVPWRLSASDYLGAAGGVEASGGVPLAGSPAATPWDPDLATAMGRTGVAVHEEYLLDILIADLMHDTERRSGGV

SEQ ID NO: 40118 - protein, 514 aa, Xanthomonas arboricola pv. pruni; identical to SEQ ID NO: 39482

SEQ ID NO: 40119 - protein, 1375 aa, Xanthomonas arboricola pv. pruni; identical to SEQ ID NO: 39553

SEQ ID NO: 40120 - protein, 432 aa, Xanthomonas arboricola pv. pruni; identical to SEQ ID NO: 39554

SEQ ID NO: 40121 - protein, 491 aa, Caloranaerobacter sp. TR13
MEINEKLLKQVTETKYLTVENAWRYRAIIRYFYLQAQKMKYWIYKEEVFEELKKHVVFKDYTIEQCRQDLDVLVEWKNLNAVQDTSKASTIEEFKNKQFRYQITDYTVEIERMILKLENLKVEGASLEPSLLERFKKELEKFKDMKDKGIKEVGSWWMSLNEDFKRLNQNYQDYIRHLNSVKAEEMMKTQQFLVFKDKFIEYLRDFVKGLQQNSYAIESIIKDIDEITEKIVLDKIIEYSKSIPRLDTEVAEKDIKENVLGRWTSITEWFLGNNFQESEASKLFDITNQIIRKITRYAFQIVENRNTAANRKEEYKKLCNIFLQAKDIDTAHMISAYAFGIPYTKHIRIDMHRETESINSGVYDEKPYEVIIKPRVRTYREKRDRTPIKDNTDKKKKILKEAIEKRNQERKIMEGYIINDQIDISKLPKIEPYVRTTILKWISRANSSPNGKAKTEDGRIFKIIKPKSNERCILNCEDGQLEMPSYILKFE

SEQ ID NO: 40122 - protein, 385 aa, Caloranaerobacter sp. TR13
MDELRELLDEYWILKDKDKDKYYRIRDSIPKFRNFISEKLGYQIIMTSDLIKLEKLPGKAEPWMGISTFDNSLEYTFLCLLLMFLEDKEKEEQFLLSQLTEFIQGAFPGDEKIEWTLYSHRRHLIKVLKFAIDIGIIKVNDGNEERFYNDELAEVLYENTGNSKYFMRNFSGNILKYSTLEDLEKDEWLDMDTDRGRIRRNRVYRRIIMSPAVYRDGEDDQDYLYIKNYRNMIQFDLEKYLKMDLHVHKNGTFLVLDEEKRYKNSFPESKAISDIVLQVNKIIVAKVKKGELSKNTEDIIIILKTTFDDLIKEAKQRYSMGWSKEYREMKLEKLSKEVISYMKDFSMLMEDNDSNEIIILPLVGKIVGDYPKDFNNKEKGNDLVG

SEQ ID NO: 40123 - protein, 1363 aa, Caloranaerobacter sp. TR13
MDNNRWIISRAGLINFWYYDDEKFDFSDGKLLLRGANGSGKSVTMQSFIPLLLDGNKSPDRLDPFGSRARKLENYVLGDEDLGKDENISYIYMEFKKEKTENYLTIGMGLKAKKGKSLDFWGFVITDGRRIGKDFFLYKKIDQKVPLSKKELENRIGDGGEVKTRQKDYMAMVNKYLFGFDELEDYDELIKLLIQLRTPKLSKEFKPTVIYEILNNSLQPLSEDDLRPMSEAIENMDNIKNKLEQLELSSREAKKLKKVYEIYNSFVLFEKARDYVNSYDELKGLIKEKSKLEEKKNHYEEEILNATENIKELEIQQNNLKLKEEELRKHDSFGLKEKIVFLERELIDLKKERDKKADELERKKDRERELYVKIKKLEEDEAYSINKIREDIEELDSLADEMKFDEQYYMKQELLKDIRCEYKFNYVKDQVKAYRDKVIKIKRELEKEKVKREAYEKAFEDFEKTKGNKKEVEKRLESANLLFSETKEEFIEHIYNWEKNNSIFKIDNNALSNISQAVNTYGDKTSFDDILALVRKEYNTVEDLLKEEKQDLSLIKNKYIKEYEEKSKEIKEWEEKRDPEPIREEKVLLNRERLRKNKIPFIPFYMAVDFREELTEEERGRLEETLLEMGILDALIIPSRYRDKVLEMDEDMADKYIFPSPKYLTYELSSKLHIEKIDIDGITIEDVDNAVKSILMDYTDEGTYIRDNGEYGIGIIRGKVTNKYRAKYIGSTARKRFRKETLERLTIEKQEIECKIKEIDKKIEIINHKLKNLEDEFNNFPNKKDLETALQTVREETLNFENISKELDKKQEILDNTYQELNIIKQNIHKLTLNINLLVNLEAYENAEECIREYIDLLNELERKHLKLLQTLITRSNIIESKEEIDIDIDNLRYDLNNIDRKIKESEDRLKNYKEQLELTNYKEIEREINECIELLRKIPNRIKELTGIRARAETKLEQTIQKLDEINKDIELQKKINNIFETGFREEYLLGLVFTDDIGDIYKLAKSVYNELKYFEDKNKNREDYLNNLHNKFYEIRQYLTEYSPKIEIIFNKEIDDPDVSEIVLRQKRYVVKAKIRGKYIGFYQLLDYIQEGIDENKSLLRESDRKIFEDILTKSISKKIRAKIYHSKSWVEKMNRLMEGMNTSSGLSFNLKWKSKAKETEDQLDTSRLVELLMKDGNLLTEGEINELSAHFRSKIEEARRTAFETGTRQTFHQIMKEVLDYRKWFEFRLYFKRTNEKSRELTNNAFYKFSGGEKAMAMYVPLFSAVYAKYEGARKDCPRIISLDEAFAGVDENNIRDMFKLLSELELNFIINSQILWGDYDTVKSLSICELLRPNNAKEVAVLRYKWNGKVRTLIENVGV

SEQ ID NO: 40124 - protein, 436 aa, Caloranaerobacter sp. TR13
MSKLAIQAAKYFKENKGFERVFLKIKDKYRSLGKIGGTIILNNLTKEEKDALSGFLGIGFYDKTDARIKIEKFQTALDNSRFKGVKLEDVLAEYFGSAIISKKDEKEKYKLERERYFEEIVKEFIDTKSYTWLKYVFESKGNAYRVITKRYDEDKQSLKEDLIITMRGLNSLPFLKSKIKERLAIFASRVTKNPHAFDEKTEAGKLLMYGISYLLCRDYPKSAEERTEYYYEVGLIKDEISNFTVCSGLLAYRDDMISAGWKDFYETSEPMHVSLWNLSKLERIISPTGRIFIFENPTVFSEVLYRTLEIKPPLMCTYGQVKLASLILLDMLVKEGVKIYYSGDFDPEGIVIADKLKKRYGDNLILWRYDKKDYFKSISREIIDDTRLKKLGNIKNEDLIRLSEVVKENRYAGYQELIVEDLIRDIEITISVNVTE

SEQ ID NO: 40125 - protein, 511 aa, Blastochloris viridis
MPAVSDSAELFRHVSAEKSAFYRCIMDVFAAAKRQYRLQLRPDEVLAEARWPDGQTPRIEDVNAALSQLSAWGNLESHHDTARVSSLNDFYRARLLYRLSQGGEAVESALALFVQTLQRRAELQTVALEDIASRLQAMKALADETEPDAAKIHATLRDLVRVFESLADNAQAFMAGVARSIELQQAEENAVANYKRRLIDYLERFIGDLVRRSDMIAGLILALEPSIDAMLQQVAAREARDAAPGDAQERIDSQTRSWNAWRERWKGLRGWFFRTGHEPSQAELLRARARSAIPQLLGAIAALNERRSGRSDRSADFRMLSLWFAGCADDGETHRLARAAFALNPARHFSLNPDADAELPASTRWADAPALRIHPRLREYGEAAPRGPLARVRDRADARAQLARELAEESQQVEAARRRLATGHPTRLSDLGELDRHAFGLFLGLLGEALTEQAGPDATAERQTGDGLLHISLTPLAPDSRARIDTPLGVFSGRDHLITITPTRDADEAQL

SEQ ID NO: 40126 - protein, 435 aa, Blastochloris viridis
MKPSSERSRDSRSIGQQQQRFQREEFRSAVRALLMTPLMSPEHEDFPAIRRQADALRDWFARETGWPLQIEHEGARLSKRPADLGSTMRGLPGYDRRRYVLLCLACAVLERADPQITLRLLGERLLQLAADPALAASDFRFTLGAPHERRELVAVCRTLLELGVLARVAGDEEAFVQAGGDQADALYDVQRRALAGMLAAVRGPSTFRPEDAPVTLDQRLHALVDEHVADSDEGRRTALRHHLARRLLDDPVVYLDTLDPDARGYFVNQRGTMAARLCDAAGLVAEQRAEGLALVDETGVLTDVAMPAEGTDAHATLLVAEYLARSYRSRLADATTAAPAAAAFTPAHDIIAFLRDAKTKFGRYWRKSAREPGAERELAAIAIERLEKLHLIVRDADTVQPLPALARFALGDAEIRDAREPRDGAVAAKHRFGSP

SEQ ID NO: 40127 - protein, 1392 aa, Blastochloris viridis
MNDRPTSFLAETARPALPIPTRPRWQPLRLGLVELFHYDSEEFWFRDGHLLLRGNNGTGKSKVLSLTLPFLLDAQLKSSRVEPDGDSSKKMAWNLLMSSYDRRTGYAWIEFGRLADDGTPHYLTLGAGLSAVAARPQVDSWYFVLDDSDGAPRLNQDLWLISEQRNVLTKERLRDALQGRGQLFDTASSYRRAVDERLFRLGVRRYDALMDTLIQLRQPQLSKKPDETALSNALTEALPPLPTELLGDVAEALGQLEEDRRQLEEYQTLAKAIDRFEQRYRIYAGTQTRRQARALRQAQTEFDNASRARGEAQERLAQALATEALAQNAHDEADLALKRDQARLETLRSGPGMEDANRLETAARDAAARQRAAQAGATAADEATRRLTRSVGETEQAAQRMTRAERQVAELRRDGAAHAATAGIAAAHGGNPLASCEAAALAELTPYAFEAARSELGALVAERRDQIAVLRQRQAEVAAAETLYTQQQAARDERQDAAEAAANRREQADAAVERQGQNLVQDWERHFAGLTQLRIDPDDGLAALTALADWVVALQGDNPARQELQAAQQQASVNFAQRRVTLDAQRDSLETERSTLDDEHRRLQAGIDTAPQQPATRDANTRIARAGAPLWHLVDFRDTVTAPQCAGLEAALEAAGLLDAWISPDGELQTGDGGMPLHDTQILPRSPYSQSLGDWLQADVPADGTVPAAIVDGILSGIACADTDPIDSEAWIAPDGRFRLGALAGAWDKPAAVYIGYAARAAARIRRLTKIAERLTLIAEELAALQAMAAQLTRDQDRAAEEWRLAPTDEALRHAHLAAAACAREAQDALRRLGEANARCREAEQALQTVRQRLAADAADLRLPVLPADLPAIEAALNHYHDAQLRLGQAAHELRLALPDLQRQRDRENEARKDLATKQEQLATARIEAEEAATRLDVLRDTVGAMVEELQRQLAEAVAAVEAGDDALKLAREALINCGKASAVAGEKSATAETAFAERSDARAEAIARFQHFAATGLLSAALPQAELPDMASAWTIDPALTLARRAEQALSERKDDEESWARVQREMATDLTELQRALSALGHQAQAETTDWGLTVHIVYQNRPEPPARLAVRLAEEIAQRSELLTANERAVLENHLQAEIASEVQRLLQAAEAQRDAINKELHSRPTSTGVRYRLLWQPLPEEEGAPVGLDAARKRLLNTSADLWSAEDRRVVGAMLQQRIAAERERTDLGFGRDGSGSLIEQLARALDYRRWHRFRVERWQDGHWRKLSGPASSGERALGLTVPLFAAVASFYGQGSSALAPRLMLLDEAFAGIDDSARAHCMGLIREFDLDFVITSEREWGCYAELPGVAICQLQRREGIEAVFVSRWNWDGRAKLRDDDPDRRFAPT

SEQ ID NO: 40128 - protein, 427 aa, Blastochloris viridis
MRSAADARLQRLLGGEHLAALRKRLRRRFERHAFDAAVESFRVDRLTAQEHAALAALLGRPQRYSGSLQIDLRVLDAAFQNAGIAASLRDALEQLDGPITHLANARLARQTLWSDVVAGCDHPGLVELLQTPAGIGLIKRLARQNAATAVELCRRAEAVLQRLPAQGLTRSQLAADVLGDAHALDSGQATAALVLAVLRRLAPQSRDGDDDAQIDAAANGSFERNASVERAREIWARAGILVNELARPVLFLNLPTRGPQNDHRPTGEPSYASLRSLLRARPAWDVANRTVYVCENPNLVAIAADHWGSDCAPLVCTEGMPAAAQRCLLLQLSEAGARLRYHGDFDWPGLHIGNQLMREHRAEPWRFSAADYAAAAAKISRFGQPLQGKPVTAHWDGALTTAMQQYRVAIPEEFLADSLLQDLICKS

SEQ ID NO: 40129 - protein, 469 aa, Streptomyces venezuelae
MTSSASRSRGWAGCGLVAVWGRCQWRHLPSFPHESRIRQERVNMPHLATFGDPGADDWIVDEWARTGPEAQDPTRALGYTVSRVRQEHAAIMSVLDQAVDHLTPAEITMELAARGVTLHPGVVAQRLKALQETFLAVSGQPDNEIERWQELNGARWRYTATACGRQVQRLWTVLSAEGMVQREVALDGLARIREALTALQGEDVAPQEVAKWAGQVFVEHDQLDASLVGQTDMLARLADRFDLGAEGTGELKQLIVEYATHVVVHLDREVAAVHGLLMRLRPRFTLLAAGCGAQSRAGALVARGVLAPSRGTQSGDWEQLLSWFAPASGRAWRFGQQLVRAIPMMHANLQRQQSVVGPGTLRAKALSLAAACRDGERGRRCSGRRWRTGRGRSCIPARRARAARSSPGMRGRGCPLWRCCAPVVRAVRGGRSRRGVNVGRRPGRWRASGSGSKRRGGRRRPRSWPGCFR

SEQ ID NO: 40130 - protein, 1394 aa, Streptomyces venezuelae
MAEIERWWRRWHLIGAGVDNVWYYTREWLPCPSGRWLARGPNGTGKTTLLEGLCPFLLNPVHMHLSSASGRATSLVSLMKGGSSGKRRFGCMWLSFGPPGDPASGDADAGEQHYGLRLEYAASSNSVETVPFRLPVVPGHDGQDLSIMKQDDFCAWVAAQGGEVFASTDAYVADLAQRIFGCGPGTLKRIARRIKKVRNPGLLAGLSPADAAAELRMALPTVSADTVRLTQEALAAAEATRRRYERDAKTAQVLEDLSAAWSYAAARTGTQAVDAALACAGVLARNRAEALQAHTDAEARGLELDDLRVLIRERAAAELRAGQHAGALARDAASSDVAHAHTKVGQARKGHEKDCELLTAHTRAASRCAGDVQDAADAVTGLMEKVALSCRTAQVPVPVAVTAAVSVRRSEPSPLRIGERDFDQAPGVDAVVDEEAVGQAAEQLEQARARLERRGEAAGMTVVAYQRVATAQEESVQARSLADAAAETAREAVARHQQTLEHAQACVADLAGGVQAWTQTVREQFRTPLMDLGGVAAQTREWCEGQECSQVIHDAGKLARKVTRSAARSGERARSRADHHTGRAEQARQWAAEAAQRARRLESGELLPLPGPAWHREVDEKRAFACAVEWALPQTGASAVGDVAEAVMAAAGLLSAEVTEHGANGHGRWLVHPHGPALPEGQSLAAVLRAMPGHPLQEVTTRILQRIAYLPSAVGPEADHVGAGLVVGADGTFRTGVTTGRLPASAGQVPRASHIGTAVRRAAALRAAAAAQADCDRWQQTALGHAQTAHRLHRFTDTLQELAALFPHDKVAAADRAETTRAEASRAAHTAAVHASEQDRAAQHKESSHRAALGQWRASAVALGLPDTIAAVKQEAEDAGARAAAVSTAAGLVEDARDLLMKVTQAAGQAAESGAQAQQAAAAAQASHAALLAAHADLEACRQRSGMDEIALAQAAEDASAAHQTAQEQLEDARSRMEGVSGRAADAARAAQEADRSLEQAGPAARESLARVIGLLAFDALHELLGRPPQDPGDEDAGAWLADLNKRLAAVPAASVPLEECAMAVRLHLAGEDDDWQLTHGQAPGELPVHQLTLTGYKAMSPPTAAREATARLHAAQSAYNAAEDQALQTFVLGRIPTAISNAWVDLHDWVDDINGQMKLARASSGLLVQLRVRLAPDLTPARARIHHLTCEIGDANRTSEQQHSVGQELLAVMRHGEEGGSTDRATRLAEAIDIRNWVTVEYVVVRGDGGAEEVWGRQKTTVSGGESRLVVLAPMLAALAAEYRDLPAHALRLCALDEVPGEIDQEGRDGIAAYTASLDLDLMCTSHHWDGSPGAWDGIDIHDLAKSSTGIIIAEPMHLYTHQMLAATSRLPAQNAGPEPESAGPEAAHEATQ

SEQ ID NO: 40131 - protein, 434 aa, Streptomyces venezuelae
MSTAGPDCPQKWCTGGACDGARLDSLLTEEARWLWEQLAARADRSGEPSMTGGTAVITAPAASTQRAAVLGLLGSRPLAPGERRRIRLEELTLRLRQHGERLTPGAVAAHAAGRALGSTAAERARQIARTTGLRKLRARLAGALPKNARLRPSEEAWQELHRTGRVARVLQHPQPEQLLKTAAEVLRLLPPQGRVDRRLLAFKAAGDPHGLDAGTDLAGLVLAEAAAAGLTTSGMPPRTAWGALGVDLDRLGGGLLSLGVHPDGWLVPARFPLPLPPATLADVSWPAPPHEGSWVFVTENPSVTTAALELDPAVPVRLLCTVGTPSAMELDTVARLADSGWNIAVRADFDASGIQHMRAALRAVPRARPWRMNANDYVRSLHPTPFQPTALDTERLPETGWDPALHTAMRAQGRPAYEEALLDDLLNDIRRGHP

SEQ ID NO: 40132 - protein, 513 aa, Frankia sp. ACN1ag; identical to SEQ ID NO: 39797

SEQ ID NO: 40133 - protein, 382 aa, Frankia sp. ACN1ag; identical to SEQ ID NO: 39798

SEQ ID NO: 40134 - protein, 1390 aa, Frankia sp. ACN1ag
MAPGPTQAPVAAARWRPSRAGILNVYQYGDETLHFAGGRLLLRGVNGSGKSTAMNMLLPFLLEADTRRIDAAGEQTGVLRSWMLADTEETQRTGYLWIEFARPDDEVPGGVRYHCFGCGIRANRSTDRVTSWWFSTPRRARIDFSLTADRTPLTIDALRAELGAEAVFARAADYQDEVSRRLFGGANPAGYLALLHQIRNPRVGDRIDADLPQRLREALPPVPQDAIADAAQPLEDLEDHRRNVTALEQTDRALGSLLDTYRHYGRRVLLAAATQAVTVVSAARSAAQQRGRLRTAAETAVETERRLGAQVDALVKEQSTTQARLTGLRNSAAYRDHQALLAREQHVADLRTQATRMAAQRTDAQRRVGVAATTVTARRARVDGDLDRIRLGLAEVARRALPAAVPLRLPDPPVLRVEPHAGGVEGPRSGVDPLAELSLRSAADALRRRRQDVREVSDLLRGAERADSAAATANGVAETAGVDADRAREHAAKARDEAATAGERHRAAVLDWAGRFAELLRAVPPAEPAGPAGWLPVPPAPDPGGDELRAVARARVDAAAALAADATEALAAAVAAAGVRVEAATFEATGLAAELAAVRAAAELPLPRGGWRAAEPADAALFASLVDFAPGLDGAARAGLEAACEAVGLLTARVLDDGSVLAATGELLVVPGPAVAPNLAAALVPALPVGAAVGADAVRRVLEHVGLGAAAGTALWVDVDGAFAAGPLRGRHAKTGAEHVGAGARAAARQRRIAELAAALDVAERRRDVQRETHGTLRRHAEALRTHARTVPSTAPVDDAAAAALGATGDARRAAGRAAEAREAAVSAERAAEQTWARAQTGAAAARLPLDDDALTSAAAAVTDAQAELDRMPGRVEAARRSLDDWAAAVAAFVAESDTLTRAAEEAAETGLAAETATEELAAARAALGEEPRRVAEQIIQLEARCGRIDGELAAARRAHTEAFGLSVSARERADSAADAADRAERACRDQRTELLAVATVDGLLAASARERPSGTENHSDAEDHSGPADQDEQAAQDGQVRPPSTPDTIEGTSRLVSWLRERVPEPERDVNEDALHRSLRAIRDGLGAGWDAESRRGADGAPLAVEVSGPYGRRVLPDATIQVAADLRRARGLLTAQQDQALRNLLHGRVAQEVARALFDARELIDRMNAVLTAVTTSQGIGVRLDWRTRGDLDPATATALRLLAKDPDARTAEEDAAVRAAVAGLVDEARAERPEASYRDVIGVVLDYRNWYELRIYLCRPGRADELLGRRTRLSEGEKKLVTYLPMAAAASASAAAHDPHGVGAPRLILLDDAFAKVSEDNHARLFGLLVSLDLDFVVTSERLFGTHADVPELSIIEVLRDPDLRTIALVHYHWDGRARTELAVASR

SEQ ID NO: 40135 - protein, 411 aa, Frankia sp. ACN1ag
MADPALRPLWQSVAAALDRNGLDWRGRLALPALPAEGRRRLGVMVERPVPAGRRALPLTDVAAAVERLTGTGLVEALTALGYAPRGRHEAALVRREESRRRRAALDMAVETHLAALPRPDRDTGSATGWATGWRDAAWSDGLFAGRAPDEVAALVRTVAAVLAHTGSGLSRGEIAARECGDAHALDSSTRLTALVTRALVARDGPAGERAAWERAGIPLDLVSAPVLTWALPLLGDSAAALAARAMTAAGLPVHLTVLALRAAPIAVVAGTPVLVVENPRLVEAAARRRLPAAVLCTGGNPATAPSEAIARLRASGAQLRYHGDFDAAGLAMTARARAAGCTPFHMSAADYTAALAAARAENVDLPRDSAPAPPTPWDPDLATAFDDTRAIVHEERVMDEVLTAHGGTFPR

SEQ ID NO: 40136 - protein, 496 aa, Geobacillus sp. Sah69; identical to SEQ ID NO: 39941

SEQ ID NO: 40137 - protein, 398 aa, Geobacillus sp. Sah69; identical to SEQ ID NO: 39942

SEQ ID NO: 40138 - protein, 1373 aa, Geobacillus sp. Sah69
MANPWVLHRAGLINFWYYDEQYFHFADGKLLLRGSNGAGKSVTMQSLIPVLLDGKKTPDRLDPFGSRARRMEDYLLGEKDVVNRDERTGYLFLEYKRKASDQYVTTGIGLRAKRQKSLDFWGFVMFDNRRIGYDLQLYKQEKTGEKIPLTKRELAALLGAGGTVVETQKEYMELVNKHVFRFESLEAFQELIELLIQLRSPKLSKDFKPTVIYEILESSLPPLTDDELRHLSETIENMDQAKQQLEQLERDERALKRLCDQYRLYNEYMIAEKAAEYVKAVKQAEQLAAEQQRLHDEEEKTRKALDELEESITRLGREEDVLRAREIDLAGHEVFQQAEKYEQLKAERQRLEERRERHEQTIAEKERQERQHRRRLDEAEARLDDLERKLEDELEQLRMDADEGSFSLHETNEDDFHRHRQKQQEFSFAAWKQEADRHIEQLEELARLWRRHDEVKRRYEEASSEAGERRREMDEWRHQQWKWEELFEEEKERFEQAVLAWVEQGGIDVSETDIQAFLQQMGALYEQYSLDDLKRPFVQAYYDAVGKKKDEKWRLEHDIRMLEEKRAEREAELRQWREQRDPEPERDEQTTAARLALEEKGIPFVPLYAAVEFVDDVPDDVRERIESALSHAGLLDALITAREIDVACDRVLIPKPVHMAHTLADYLRPDANAPVSMERIDEVLRSIVITDADQEGGMTIDETGRYSLGLVHGHAPRGSKAMFIGRAARERWRLENIAALEAEIAAVGQEIDRLRGAHQAVEAAIQALADWLASFPSDRDVRTAFDEAQEARRQAESKEREWKRQEEKAALLAREWKQIKQQLHDESAELDLAFTLDGCEQAQLAMKSYVRHVHELEVLYRETRHTEAMIAQQRERLAALETEIDEAKGERNRLRDETERLALRIAEMERTLAQMGADDIRAEIARIQERLAFLRQEIPRLVNERARTEQRLMRLVEEREKGAQREAFARELAAMWEKSFAREAALGLVDLDRSRSLLEQAKEAKQRYEAVLKETRSSLLARLNTVFFQESSNLTEYRASFEPLEEQTKPEWTAAAPDDEMAMKAADWREKQERHVIYLDYKGERATPFAVLAEVERDIVLQHEYMKEQDRELYEDVILKSVGRILRSRIQRAERWVNEMNKLMGGLDTSSGLVLSIQWKPKTAETEAELDTKELVRLLRLDPRLLREEDLQRVTNHFRSKIARARELLEERGQGSTLHQIIKEVLDYQKWFSFTLYYEKTNEPKRELTNHRFYQFSGGEKAMAMYIPLFAAAYSRYQEAGDDAPYIISLDEAFAGVDENNIRNLFGLVEQLGFNYIMNSQALWGDYDTVPALSICELVRPRNASFVTVIHYRWNGRVKQLMVDDKEWEMIET

SEQ ID NO: 40139 - protein, 406 aa, Geobacillus sp. Sah69
MSTAKEAAAFFRSEPGFRRLFIEMKHKYESLGRVGGAVSLEAFTDEEREAVAAFFGKDVSRVSLIAFEKQLGQTRFAGVGLVELLEQYFGAPLVSNKERRQAEEEERDRFFARLTEEHHWVESVRPQRFVQTAYETDRRSLEEAIRLVSAALGRLPLPSYMRLPLFAQQVAGDPHAFDLSTLPGRLLLSALQATVPGDWDMASVESVNELLQSVGLLREDILNFVTCANILAETKDGPHPVFSAAWEANTALNMPLRDVLSLVRARPAHGGTVYIVENAGVFSTLLDTRAPLVSTNGQMNVATMKLLDLLASSGAKLYYSGDFDPEGLAMAERLQERYGQAVTLWRFSVEDYRAANPVVDLTPERLAKLASVTSTPLQPLKEEMAETKKAGYQEAIIGRLTEDING

SEQ ID NO: 40140 - protein, 519 aa, Pseudonocardia sp. EC080610-09
MVRFPQVPRELFRFTQGDRAELYTAVLRVFGEANDRLETSLKPDQLRDRLRGVGWFDALEDIDLTAALGSLRGWELLDATQDHAGEYRTAEEYEQRNVSFSLTRRGEAALAGIDTVLAVLASAGALQTAVLDAIAARLAMLGELLADPTTSNRTVFVALTELENHLEALRGNTRQFNGELQRLVRGEAADVEVFREVKAATVGYLQEFLVNLDRRAVAVSDAARRVEALGVDELFTRALAGADLPPTPDEDRAGVWLDGRRTRWAGLRAWFLPERGTPARIEQLTTVARRAVIALLQALDRITESRKRVSSAGEDFRALARSFALAPTEDDCHRLWNVAFGLSSSRHAHLAHPDPELVGPSTPWTAAPPVHVSALLRSSGRTDRHSRPGRVRDVAAVRTARALQARRERAEAVRAWEELAGNGPGPVPLSGFAQLDHTVFLRLIDLLGRALCSQVGTDGLRRAATADGRMELVLRDPPPGRPPATISTPRGTFTGPDYLVDIRRAGERAPRATARKVAR

SEQ ID NO: 40141 - protein, 412 aa, Pseudonocardia sp. EC080610-09
MSRLPNQLVLAEKEDVARGIRLLLAEPLLTAHKDPAGFDVVRRRRDPLAAYFEFYCGWRLVVEARMGYARLTKVRVSADASRPARRRRAGAAPFDRRRYILLCVAAAELIGTPVTTIGLLAERIVLALAVDPDLPAFDTSNRAERMALVDAVRMLESYGTLTAVDGATDSFVETAAAKVLYRVDATLLMRLLAAPTGPSRLSAPPTDPAGQRAELLAEQRYGPAPDPAELAEGPITVQRNLALRHRVFRRLLDDPVVHRDDLTEAERSYLESLTGRRLVRDAAEQAGMVLEERAEGWMLVDVDAIATDVRFPDDGSHARIAALALLDRLTTSGPAVPEQLTVATRALLARFPAWAQAYQDTDGHQRLRDAALTVLAQFGLIRCDGVTVRATPSAARYAVIAMTEAPTHEETP

SEQ ID NO: 40142 - protein, 1365 aa, Pseudonocardia sp. EC080610-09
MSVTLLHPDHTAAPTRWVPHRAGIENVWRYYGEVFEFHNGRLLLRGANGSGKSKALELLLPFLFDASLRAQRLSTFGTSERTMHWNLMGEGTDNKTRVGYVWVEFAGSAGTGPNTPRRYFTCGARLQATVHRSSADADFFTLGRAVSPGEFTTTDGRPLTVAGLRERLGHDGTVHDSAGDYRAEIRSVLFGGITEQRYDSLVLALLQLRTPKLSQRLDPSLLSTLLSRALPPLGESELGELAEGFQRLDRQREEVERLDDEAATARSLATAQQTYARRVIRAAAAELITATSVMDGHTRTVRENEEELAAARLAHGRAHSDGAAARTQVERVAIEVEELQARSEYQEGAAALRRIADLQRQLRSAEKHRTEAAARAAAAESHAHDDDESARCAAEELGSVSARAAELDEAAADRAARAGMLSVHAEMLAPAGADRRRAEALLGAAVTGRLGQIDEVRTALREHERVIDRRGHVENLVEQSREILEHRSREQDESAANHEAARLERAGRLANWAQQCTELKVNPAAARAAADDEPELTRLVEVAAAGIVTELADTDADLRVRADAVARRLQELTEETERIRAARHVPPLVPATRTADRSRAVGAPLWELVDFAEHLPEDRRAGLEAALQASGMLDAWVGPDGAARIDGHDVLADPEALPPAPKRSLIDLLRPEPGGVVAADRVTALLSVVAAGDQLPASHPAAIGTDGTWRLGPTTGSWDKPEAQHIGATARSRSRKRRLAELATESRAAEAEREQVRADRAVVSDRRLTLDRDRAGLPARAELDRAHEQWQRAVAATELADAAVADHLALLTRVSTEAAARLRKLDDTAARTGLPTDIADLHQLTAAVEAFRGAATSWLSSVADLAAASRRAAETGAAAERSACTARDQRDAAAEAAERAEGLTHAVRTAEDAVDQSYREIVDRLADLRTAGDAAKKRLDATQKQEHAAELTTARLEAVSARAVAEQDAAILHRDDAGAWMRRVTAAPFGSDAGLDDDAEMTGDGVRATLETARGVATRWAATPHEPRLVVQALDRLRDELYRAREVLSARADLQLVPVEEHHHLLTASVDGVRTGAAGLAAALSDEAFRAHEDITESERALFETTLTGDTRRHLADRIRRAVALVDDMNARLDEVRTASDVAVRLDWQVDPELPASARAARELLLRNPAALGDDDRAALHRFFRDRVDAARARDDSISWEQQLAEVFDYTMWHRFVVRLDRGRGEGWQVLTKKLHGALSGGEKAIALHLPLFAAVAAHYESVPTAPRIILLDEVFVGVDETNRGQVFALLASLDLDLLLTSDHEWCAYRELDGIAVHQLVTGDGDDAVTTARFVWDGEDWRGEDDDEEQTGNDANDGDGDDRAG

SEQ ID NO: 40143 - protein, 413 aa, Pseudonocardia sp. EC080610-09
MPAESSVPAPLDRPELEPLWREIHHRLGTGRPIARIRVDQLDDGGRAALADLLGTVRYPSTPIAFDRLESAVVQIAFLDVRTVVEQLIGPVDDRADRRAKDSAARARLWTWLEGHPLVGQRPALAEWIAGLRRAGIGDVEHARALLTDAVTVLGRLPADGVPLPTFAQQALGRTHALDTGTALSSTVLRGVAALLGADPATDAEGRRELWERMGVDADELSSTVLVAGMRPAGSGLAAILLGASADAGEACVLTLAQVRRNQGIRLDGGAVVHVVENPSIVAMAVDRLGARCPPLVCTNGWPSGAAIRLLRALAARHEIRYHGDLDGDGVRIAAHVVTATGARLWRMGADDYSAHVPEVGAPVGRVGDAPWDSDLAPAMRASGVSLSEEHIAELLLDDLNSSGANNGNDAGIR

SEQ ID NO: 40144 - protein, 519 aa, Pseudonocardia sp. EC080619-01; identical to SEQ ID NO: 40140

SEQ ID NO: 40145 - protein, 412 aa, Pseudonocardia sp. EC080619-01; identical to SEQ ID NO: 40141

SEQ ID NO: 40146 - protein, 1365 aa, Pseudonocardia sp. EC080619-01; identical to SEQ ID NO: 40142

SEQ ID NO: 40147 - protein, 413 aa, Pseudonocardia sp. EC080619-01; identical to SEQ ID NO: 40143

SEQ ID NO: 40148 - protein, 513 aa, Frankia sp. CpI1-P
  MOD_RES (466)..(466): Any amino acid
MSDAGTAGSSSTTGASRGEVHASVFAYVTESPDYRVILGIFAGTFFAELTPDDITARLAEAGVILPIETVTGRLEKLREWGNLDVSASVGTVGTVADYYRRRNRYLITRIGQEVHELVEGVLAQVDDVRDVSLGRLDALAAALDALLRLDLERADPAVLADHVRAVFDPHRAFSAEITQFFAAINQWQSRFDLDETEFAFFSEVLVGYVGERLEALERRARPIAALLAVLAPDVGVLVARARDGLAARVAEAGLTGVRVRAEHGSSAADWENLTAWFLGRPGTPSRVATLGHDAVNAVRTLTQNLTRLSRSGVGGTSRRADYLRLAAWFEQAGRDSPQESHRLAAAAFGLFGARHLAAAAGDETDPVPSATSWWNAPVARVPVSLRQRGDTTNRGRSGQILDRSRERAHLLARRRAAQEREAAARQELLAAAGPDGALGDGTPLSEAALARLQRLLGPAVAAMGPXRSKGESEADGLRCVVERRPGQPTTLRTPVGTLTVHDLALTLLPLREA

SEQ ID NO: 40149 - protein, 382 aa, Frankia sp. CpI1-P
  MOD_RES (27)..(27): Any amino acid
  MOD_RES (381)..(381): Any amino acid
MTRDDPQRPGELTAAARALLARPWRPXEADRSLFVLIRRHADVLDRWFTQRLGYRLVVGADTARLVKSGYVPPDRPLRTHTDHPFTTRQYVVLALVLAATAAGPDRISLRDLVLQVRSAAADAEITLDGAAGERRALVTALRFLIEHGVVRELDRSVSGYETDEGADALLEIRNDRLAMLPAPALVGARSAADLLERAGGEGRGRAALRRRLVEDPVLYADDVAPEDWAELRRRFGEEARYCEEMFGLLVEARAEGVAAIDIDGGCSDVVFPAGGTTAHAALLLVEALVARHRGGATTDDVDDELDDLLERYGRYWRKDAVAEPARLRDEAVALLASMGLVRWEPDGRLCPRPAAARFAARVTVSEPRSEPPADEPEQAMXL

SEQ ID NO: 40150 - protein, 1390 aa, Frankia sp. CpI1-P
  MOD_RES (1351)..(1351): Any amino acid
MAPGPTQAPVAAARWRPSRAGILNVYQYGDETLHFAGGRLLLRGVNGSGKSTAMNMLLPFLLEADTRRIDAAGEQTGVLRSWMLADTEETQRTGYLWIEFARPDDEVPGGVRYHCFGCGIRANRSTDRVTSWWFSTPRRARIDFSLTADRTPLTIDALRAELGAEAVFARAADYQDEVSRRLFGGANPAGYLALLHQIRNPRVGDRIDADLPQRLREALPPVPQDAIADAAQPLEDLEDHRRNVTALEQTDRALGSLLDTYRHYGRRVLLAAATQAVTVVSAARSAAQQRGRLRTAAETAVETERRLGAQVDALVKEQSTTQARLTGLRNSAAYRDHQALLAREQHVADLRTQATRMAAQRTDAQRRVGVAATTVTARRARVDGDLDRIRLGLAEVARRALPAAVPLRLPDPPVLRVEPHAGGVEGPRSGVDPLAELSLRSAADALRRRRQDVREVSDLLRGAERADSAAATANGVAETAGVDADRAREHAAKARDEAATAGERHRAAVLDWAGRFAELLRAVPPAEPAGPAGWLPVPPAPDPGGDELRAVARARVDAAAALAADATEALAAAVAAAGVRVEAATFEATGLAAELAAVRAAAELPLPRGGWRAAEPADAALFASLVDFAPGLDDAARAGLEAACEAVGLLTARVLDDGSVLAATGELLVVPGPAVAPNLAAALVPALPVGAAVGADAVRRVLEHVGLGAAAGTALWVDVDGAFAAGPLRGRHAKTGAEHVGAGARAAARQRRIAELAAALDVAERRRDVQRETHGTLRRHAEALRTHARTVPSTAPVDDAAAAALGATGDARRAAGRAAEAREAAVSAERAAEQTWARAQTGAAAARLPLDDDALTSAAAAVTDAQAELDRMPGRVEAARRSLDDWAAAVAAFVAESDTLTRAAEEAAETGLAAETATEELAAARAALGEEPRRVAEQIIQLEARCGRIDGELAAARRAHTEAFGLSVSARERADSAADAADRAERACRDQRTELLAVATVDGLLAASARERPSGTENHSDAEDHSGPADQDEQAAQDGQVRPPSTPDTIEGTSRLVSWLRERVPEPERDVNEDALHRSLRAIRDGLGAGWDAESRRGADGAPLAVEVSGPYGRRVLPDATIQVAADLRRARGLLTAQQDQALRNLLHGRVAQEVARALFDARELIDRMNAVLTAVTTSQGIGVRLDWRTRGDLDPATATALRLLAKDPDARTAEEDAAVRAAVAGLVDEARAERPEASYRDVIGVVLDYRNWYELRIYLCRPGRADELLGRRTRLSEGEKKLVTYLPMAAAASASAAAHDPHGVGAPRLILLDDAFAKVSEDNHARLFGLLVSLDLDFVVTSERLFGTHXDVPELSIIEVLRDPDLRTIALVHYHWDGRARTELAVASR

SEQ ID NO: 40151 - protein, 433 aa, Frankia sp. CpI1-P; identical to SEQ ID NO: 39800

SEQ ID NO: 40152 - protein, 513 aa, Leifsonia sp. Leaf264
MARNDPADGPTAPPRAELSTDARQARRQLFAYLTAEHADVYGAIMRALGGDVLAREMSATEITDALRADYDVDEAFVDVRLVQLVEWGNVIPGVRNPRVSTISEILRSRGRYQVSKLGARVARDSDEILAAADGAREVARELLGVISDQLAALLESFRDGRDPDTGEIAAAVTSVFNNHRVFHSSLRDFYGYLNTVITRFDLVGDDYMDLKTILMGYVDLIGADVRRNWPAIHRTLAELEPHFDLIIDKLNAWQTLTDENIERAAGRSRVEWEELSRWYNGEEETSGPASLRNATDQALNQLIVNARRIISNAGSGVSRRGDLLRLAVQFDSAEPEDAHTLFADSFGLYSWRHLLYGETQTVQPIASTSWLNAPPVDIAVSLRERGDRSARGRTSPIPDTDMYDQLTMKEAEEKESRRRMAAAELIAAGTLDNVKLSAAAEAMFLHALTQMAIGTAGEETFDFLETGISVHRGAVDGVTTILLDGGSLTIEGFLFTVTAYRMGAALTEQAVNA

SEQ ID NO: 40153 - protein, 389 aa, Leifsonia sp. Leaf264
MIEEAIEPDLVAAARSLESTQFLDSATDKDMFALVRRHGVELKSRFSHNLGYRLIIEPGFARLLKAEQPDGTPARTPLRTGKGVPVTSARVYRDISLIAASLQAPGVGEQILISQLLTQIRADAAEAGIVLTETITDRRDFVTAITILISWGLITETDGSVADWSAAQHEVLLTVDRNRFPYLLANLSKDHGGRRVSALQSLTRKLTENPVVVRADLPEDEQVTLRQDRAKLEAALAMFGLNLELRREGALAWDDKGDITDDPFPGEGALRQAALLFINRATADRQASEDGWVTLTAGAATSVVQSLLDENKGLWRKEFEPDAPDAASRVLRDVLTYLTGFGLIKEGDGYITIHPATARYKPTIKREPTSTPPSPEPEQTALFDDLGEQ

SEQ ID NO: 40154 - protein, 1361 aa, Leifsonia sp. Leaf264
MSIATVTRIAPATTTEFDDRARWCRAGIVNVHRYANITFHFSNGRLCLLGTNGSGKSRGMDMLFPFVISGDRRRMGSGTSGLVSVESLMKKMIGSVTNRVGYVWAECMLPDGSYLTVGAYLKYSTATRTSKVEYFITDLRVGIDLILVDDEKMPLPKDQLTEQIGSHRVTSSASTHRERVARELYGITDDRGMERFRAYLDLMYKLRAPDIGVRINGGELTQLLSETLPPLSDEVLAQAGGHLDGLQDIRAEQSRLERQTEQVDAALKVYAGYAVGVLSNAAKDAEAAAVEDRGARIRQADAQASLDEARDELAKAQSEESTARQAAATAQSRLTAIVSSSAYKDHLALNEKSATVAAIAMTANTSLGSWATARAAADRYTGTVTEAAESVELRGRKASAAVSSLRAAAAGAGIATDVPDVQVVLTSSSGKVRTVRLTVTESEVDEAAPDMTVVTVDDVTAASTKATNLREAAATKRDAAAARHAAAELLHEDGRQIEALEAEASAAASRAEAARAQVEQMTAEAASARAELASRWVAWSADEWVRQAFTGYAWADSPIGGFLEDHLDPFPDPAQLDRLADTVAGGARDRLSERASALTTSAAQLRTQESELRAEMQALTDRTVDIAPTAPSWAGKTTGLQLWRSVDFRPDVDDAVRAAVESALEASGLLTAVITDSGAVIHDGELVVSADGPVATSSLSQVLASEPDTDVTAVLDRIGFNSLEHPTNISSDGSFRVGQLHGKQAVSSQARFIGATSRERTRKARLEELQEQVAGILGQLTLHDEMQAQVKQEREQISKLVSEAPTADDVRNADARVGASNTEERRRRKELDDAEEAALKARSGWDTRMQAHRNLCSVAGLPWSRTELATVQSAAEATRAAAENLVQVLAELTIDVRRFEETMARRTRSEEEAADAGATALQAWREWSAANTELVQLRRSVGAESAAVLADQESATADLNAATKLMNQWGSAVPRLSKVEGTCESNLATASSEATTAAARAAEALGGLRYICQRPGILAAATGQDLIAQANVATSQWVRSAIGNRSRARIDSVFVALDALITDLSSDFEVVRHTDDLAGVLIVELADAEGQHSLADAAATLRDRTVTGKVTLAREENERFQRYIMDSVGEELRQSMLLAEETIAATSKRVSQYRTSNNIGVRLRMTANDTLGTELVRIRELVRIAGPVRTEQQTAELSTLLRGVVDQEHSANPGAGYEAALAKGFDYRNWFTVEAVILGPEIGQERGIRGAQLSSGELRYISYLTLTCAIDAQMSALPSAAPRLLLMDDAFAMVDVTGRRNLVQVIVERDIDFVMTGHDLWLTYPEVPGIDLYEIHTHGEDAPATAIHYHWDGSNRKIQFS

SEQ ID NO: 40155 - protein, 422 aa, Leifsonia sp. Leaf264
MPVSEGTLEYLRDPALAALWDSVSARLERNDLEATGAVRVPFSPVGAAQLSGLLGRTVVSGTVTVKLAELDERLRGLEGSGGLLAVTEQVRGVKLTDKRKVRADRSQAAFELYRQWDDAIAEAGLTPAAAQSLGASVRSSGILTRAGGTASSGIARFASGWAELVKVGAFDAIGEPRLLLGELASKTTGTAHGFDEGTVASKLMMRALAARFDEPVPETGEDRRRLWMIAGVSTDSVSGTALMWGFRPPGDDPWSAMMRSRADLEVVTHLTLQELRVAAGVLLAPPGSTVFACENPQVLQAAAKAGASSAVLCLSGQGSAAAWLVLRRLIADGVTVAYHGDFDWPGVAIAGRAYLAGATPWRMSAADYVAAVVESAEQEPLEGRQTATPWETGLAGAMRTHNTAIHEEAVIDSLLRDVGVPV

SEQ ID NO: 40156 - protein, 512 aa, Pseudorhodoferax sp. Leaf274
MTVRAGVQAELFRHVSAEKTALYRAVMQTFAAAKRQFRLHLRPDEVLIEGHWQGMPAAPRLEELQAALAQLTEWGNLESQPDTTRVASIADFYRAKFLYRLSQGGEAVESALETFARALSRRAELQTVALEDIAHRLEALQALAEEEAPDAAKVHATLRDLVRVFEGLADNAQAFMAGIARSIELQQADAQAVVAYKRRLIDYLERFIGDLVSRSGGIAQRILAVAPRIEMLLWLAVERESRDAAPGNEEEQREAQVRSLRAWRERWRGLRRWFIAERHDPPQAELLRAKARAAIPLLLAAVAALNERRSGRSDRSADFRVLAGWFASCEDDPQTHRLARAAFALQPARHFALNPALQPGAAELPASTPWAEAPPLRIHPRLREYGEAAPRGPMPRVQARDDARRLLAAQLHEEHAQIEAARQRLATDRPVKLSELGALDPHAFGLFLALLGEALAAQPDPEASVEQASGDGLLRIRLQPLAPGSRAEIHTPAGVFSGRDHLLTISEVDTRA

SEQ ID NO: 40157 - protein, 416 aa, Pseudorhodoferax sp. Leaf274
MTDTRQIARQQQSHRDDERVHALRALLMTPLMTPAHEDFAAVRRHADDLRAWFAREAGWPLHIERDCARLYKRPADLSDASRGLPGYERRRYVLLCLACAVLERAEAQITLRLLGDRLLTLAADPMLDSRGFTFNLTAPHERRELVAVCRTLLALGVLQRVAGDEEGFVRDATAGGEGADALYDVQRRVLAGMLTAVRGPSTWPDTQAPVTLDERLASLVDEHVPDSEDSQRTALRHHLARRLLDDPVVYFDTLEEAPRAYFANQRGAMATRLCEATGLVPEQRAEGLALVDEDGALTDVAMPAEGTEAHATLLVAEFLAGRQRAGAAEGCGLDEIAAFITEARKRYGNYWRKSAREPGAEHELARTAVQRLAQLRLISTQGEQVRPLPALARFALGETELRAATAPSQNSLFDAA

SEQ ID NO: 40158 - protein, 1381 aa, Pseudorhodoferax sp. Leaf274
MTDNARPALPQPDLPRWQPLRLGLVELFHYDSEEFWFRDGHLLLRGNNGTGKSKVLSLTLPFLFDAQLKSSRIEPDGDPGKKMAWNLLLGRHERRMGYAWIEFGRVDADGTPHFLTLGCGLAATAARAQVDSWFFLLEGGRVGQDLWLIGPTRVVLTRERLRDALEPLGGQLFPTAAEYRRAVDERLFHLGPVRYAALMDTLIQLRQPQLSKKPDEVNLSQALTEALPPLPTDLLADVADALSRLEEDRRELAEYEALERAVDQFNQRYRRYAATQARRKARNLRGAQTGFDNASRALNDSRSALTQAEAAETEAIAQLAADDAALATARLRHEALQNDPAMAGARQLDNAEREARRRQDEAGKAAVDRREAEARLAREQQASRQRGERSEQAARVLATRRRDAAQDAANAGLTRALDANPLAVAELATLEPSAVLAAQDELRRALTLRREQAALLLQRCDAVERKAEMHRREQEHRDLCRDEAEDAAARRAEADAAVNEQAQVLQDAWQNHFDSLRELHLLDAPQVLDRLTTWALDPQGQNPASAALLSAQQAGADRLARRQAELEAQRRTLAEEQQTLQAERTRLEQGEDALPPAPHWRSESARAGRAGAPLWQLVDFASGLADGQRAGLEAALQAADLLDAWVTPDGGLLGADGSPLLHDTQWLARPTQAASLADWLQPADNSTVAPVVLRRLLEGVACGTEDAPAAEAWLSPDGRFRLGALAGAWSKPRAEFIGYAARAAARARRLQEIVERLSELATDAVALARSFDQLVAARQQATQEWERAPGDDALRGAHAQAAASAREYEAARLRLDQAERRWREAAQAWELAQHALARDAEDLALPANREALAAIALALQTFGEAIHALATAARELRDASVELAQQRAREHEAITAAESAAEQAAERAALAEEAQIHWQTLVESIGAAVEDVRRRLSEARSAVSTGQQRLNQQHEARRQAGEGRAKAEQKALAATAMLDERTAARQHAVAQLQGFAATGLLATALPDAEQPPQTTPWTIESALTLARRAEQALSDVKDDDEAWSRVQTQVSQDFTELGRALSALSHQAQAETSDHGFVVRIVYRNRPERPDQLSLQLAAEIAQRRELLTAGEREVLENHLQAEIAAAVQKLLREAEHQVEAINTELHKRPTSTGVRFRLQWQTLPEGAEGAPVGLEAARRRLLNTSSDLWTAEDRRVVGEMLQQRIAAERSRADAEQGGSLQEQLARALDYRRWHRFRVQRWQDGQWRALSGPASSGERALGLTVPLFAAVSSFYSQAGSAQAPRLVLLDEAFAGIDDAARAHCWALVREFDLDFVITSEREWACSAELPGVAIAQLQRREGVDAVHVSRWVWDGRMRRREDDPDRRFPPAPPPPPADGNT

SEQ ID NO: 40159 - protein, 427 aa, Pseudorhodoferax sp. Leaf274
MATPDPRLQRLLGGPELAALRQRLRRHFERGGAAEGMLQLSQLQPVEREALALLSGRPAKVTSSLRLDLAELQARLQSAGIAGSLREALERLDGPITDFLAERAVTQAAWLVILSRPDRHPFLHAWLQSATAAGLLKRLSRQDANAADILLMQAGRVLGRLPATGLPRSQLAAQILGDAHALDPGRPVAALVLAAWRHAEAARGVPAAEIGDEALDDSREEPPGPAVDERARDIWARAGVLVNELARPVLVLNLPLPLGLDTAPWLPGEPAYLSLRWLLRAAPQWAMAGRTVFVCENPNLLAIAADQLHTRCAPLVCTDGMPAAAQRTLLQQLARSGALLRYHGDFDWAGLRIANHLLRYAGAAPWRMEMADYETAARAATSARHALTGSETEALWDAHLAPTMRRYGLAIAEEALAESLLDDLCLT

SEQ ID NO: 40160 - protein, 496 aa, Modestobacter sp. Leaf380
MNDPAAATDRLRLFRYVSDTEHTADYLAVMRLFSSGLLIDLSASEIAERLREQSGIHLDVDTVEDRCDSLVGWGNLIRSVRDARVRTIADWQRARTRYQISKLGGRVHRQVEELLATSEGAREVARELLAGTADRLLLIRELAVADPTDPERLAAEVTTLFSNQRVFLDSLADFYAYLATVLSRYDLAGDEYATFKGVLLDYVGLLGSDVGRHAPLVGERLTGLAPHLPAVLGQLAALPGLSGGAAAVERLPGRTERDWTEFAEWFTGARSGPERLRAAAEQALGQLLTNAKRMVSSAGTGLSRRDDLLRLAAVFATDGVDDDTAHRLWAATFGAAPARHLALGLEDDDGRTPPSTSWWDAPPVDVPVSVREQGDRTARGRSARVPDPGLDRVRLLAEAAAEAAALRAAATELAAAGRLHGARLSPAARDLVLDQLAAVIAVDQLLVGPATRTDSDLGLVLLVEPGGETVVESTDGRTTVHGLTLSARPLVGEATP

SEQ ID NO: 40161 - protein, 407 aa, Modestobacter sp. Leaf380
MSAVTTSAHDAAERRTAARALLLTPVLTTAQQPEVMRLVRRHAPALRTLFGSQLGYTLVVESTFARLLKTPPEAGMPVRPARRADGAPFAARTYVHLCLVTAALLAPSAGEQVLVSTLIEQVRADAAGLGLELPDSLTERRSLVAALDLLVRWGVLSETDGSTAGWAEHREEALLTVHRPLLPYLLNRPLPAGADVDALLAPAEDHQPRRRLRRLLSENPVVLRSDLDAETADVLSRERPVLARQLDEAFGLVLETRAEGVLAHDPDASLSDVTFPGTGTVRQAALLLVEHLAIDHLPDPDARDATGAHPSSVLVSWSAVDDCLGVLLTRYGRGWQQRLREDPLRLRGEVLDLLTSLSLTTPSADGVLVHAVAARYRTEVTHHRATRRAPDPEPEPDAGLFDLEDPQ

SEQ ID NO: 40162 - protein, 1366 aa, Modestobacter sp. Leaf380
MSDSNRWRLHRAGIQNVWHYWDAEFVLSGGRMVLRGTNGSGKSRALELLLPFLLDADRRRMDSSGSGSVSLDRLMRVGGREVGNRVGYLWVELAHGDGTGVPVRFLTLGAHLKWSAATGTVKVHWFTTDHRVGHDLHLLDGQRQALRREDLTRQLGPEQVTDSADTHREKVRSLVFGLVDARAEERFEGLTQLLHTLRSPDVGNRIDEGRLPALLSDALPPLSQATLDAAGAKLDEISETRALQERLERSVADLETFLASYRRYAQGELGAATAQARSAVRDRGRADRAEATARVALTTAEEAAAQGAARYAQCTEQLAEVQATLAGLRQSAERQDLLERARTVTALRTSADGAADRAWDARAGEEQAATRVAGAVDDAEAAGARASGQLTALAEKAGVAGVPDPLPSEVPLRRVELAGAVDAVRLRPDRDAEPLARPAMVDLDLGDADLEAWRTTAGAVRQAARDRRHQLEGRLVEHRRLRDAERAVLTAENRRDQAAEREQAARVRREAAVGTESAAGGDLRGQWLRWARSPDTTEHLGDVEWSGTVGGWLGAAAPDDVDTVVPDTAALGATVLDELDGAAQDAAADAAERLSTQRADLRRRKTILLDRAADLGSRRDRLVAEQDPDPTALGWVTAAAGTPLWRAVDFAPDVDPEQHAGIEAALIGAGLLTAAVGAAGATGPSVGELLVDASSPRAQHPLSTVLVPDPDGGLPAGQVTDVLDRIGWADRSGSCWVDVDGSFRLGSLTGRHDVPHARHIGTTARARHRAEQLALLETELREVAAETATVAAGLSEAADRTEALRRYVRTAPRTTALREAGTRRRSADADLAREAAETVRLSQVATGSRSAWDVDHLRHTEACGRLGLPADDDRLAAARDRAGDTVTAAENVSAALGDLARAVRRVRADQSVVQTARAHRVAAETGAEQDRSRWHEAATELAAAELVAGLDADAARAELAAAEREVGRARAAHTAADAERLDTAQAASSARRDAENAAVSATATRTAAATAEDRLRHRAELPGLAEAAGLSELPTAGPLVDVLTAGLPDPVPDRDPDGYQKALLELNRRRDPGDYDLLPSVADGVNLVEIGEAAGRRSLPGAVAELVRRRDLGRAALTEKEQRVFTTFVLGTVADELRQQLLWSLEQVDRMNDRLAGIRTSHGIGVEIRWPLAEDAAGSAARIEELVLTRASARSVDANAELTTLLRGRVEEELRGDPAQGYATALRAALDHRSWHTVEVYILGPGKDERRKISRRARLSQGETRVVSYLALFAAADAFFTGLPDPEALRLILLDDAFAKVDEPTIGELMAQLVRLDLDFVMTGHALWGFGPGVPALDVYEVRRAEGTSAITTRVHWDGTSRHVFG

SEQ ID NO: 40163 - protein, 402 aa, Modestobacter sp. Leaf380
MSLLDELGDAALAGVWRAVRRQLETTGLQPSGAVTVQVDGVAADLLGGLLGRRPQVGRWRIGLADLDAALRASPAAVSLVEATVVLHGPLRDRPAERRAAETARIAAGGVWAESLVAAGLPAEPWVVDWTAGLRTTGLLGSSPASLQAAVSAVATVLADPRPRTLGELAAAVTGDAHGLDPGRRAGAVALRGLAARSGQPPPGQADARSRLWASVGVAVDDVSGTVLVLNWRPPSKDRWAVTMRERADLGLPTHVTVRELRTAPGPWALPGHVVHACENPQVLQAAADRRLPGALVCLQGNPSAAAALLVQGLASAGAVVRYHGDFDWPGVAIAGRVFALGAAPWRFGAADYLDVAPALGVPLTGRRTPTPWDPGLAEAMQSQGSAVHEEAVLEELLSDLVL

SEQ ID NO: 40164 - protein, 538 aa, Kitasatospora sp. Root107
MVQETGRPAGAEAAGPGPEEQLWQRLTAYTYLSAPERLEYVALMRVFCATLLADLAVPDILVKLAESGGWSRQPDAETVTARLEQLVKWGNLLRSTHTVKAASIAEYQRSRARYQLSKLGERVQRDADEVLAGADAAREVSSELLALVDRGLRELLVAVARPGGADAQEALEKISTLFVQFAEFADSVRDFYAYLGQVLSRYDLDGGEYQGFKELLLDYVEAITEDVSFRSPRIAASLAALWPDLPGLLKRIDEHAVGLGTMATAVETRVQRSRGRELSDWEGLRGWFVDTDGQGSQVDQLRGATLRALQSLLANAKRMLRSATGEMSRRRDLLRLAAWFDAADPETAHDLAVAAYGLYGARHLGVAPDPNGTVPAYVSWWSGPVVEVPVALRERGDRAQRGRNAAVEDHSTQKLRLLDEARAQAAARQAAADELRSASGRFGQVRLTSAAMALLLELLASALGNAQLRRSARGSDFALDDISAGDAELDIRLTARRAVGSGSVLHSVDGDLLVDDLGLTLSRYAGPGHSDGSAAERA

SEQ ID NO: 40165 - protein, 442 aa, Kitasatospora sp. Root107
MALPSTHDVALAAERRAAARLLLARPLVHADGPDGETFLLIRRHADWLGPRFQQVLGYRLLVESTFARLFKAGLGPAAGHRLVRATGTPFTPRTYACLALALSALVTAPEQILLSQLVADVRAAAVDAGLELADTGRQAEKRTLAAVFRQLVEWRVLTEVEGSVGSVTEEAGGEALLTVDREIARSITAGPLAQSRDGAELISRAADPGFGGIRTYVRRRLAETPVVHLDDLTAGEREWLRTRQRREALAFAELLGLEAEIRAEGIALVDPEDELTDLHFPGTGTVAQAALLLVERLVRQLRPDDAGHPATGGRLVIGVPIPPGLVDEILADLVEEYGRRGNWQRGYVEDPAALRTDVLDLLARMRLAAPAGPVRADGRGVPEGYEADAPDGRPVTEVRAARGHPGGGWVLLAAAARYATTVTVRKAARPSSDTSPQGEPTP

SEQ ID NO: 40166 - protein, 421 aa, Kitasatospora sp. Root107
MNPVPSAALDWLGQPELAKLWGAVRARLERNGLQVGGSVRLTGLDAPEREALSLLLGRRIGRPDTAVPLAELDTRLRTGAAACGLTDTVRLLGGPLTDRPAARSAAQARRTDLWTSAAAALAASPLAEADWADQWLTEVRRTGTPGRLQPEAAKNLLQQAIQLLALLRPTEQQAVPRGRGELATLVTGTAHGLDDDTLLSRLVLRGIALAHGEPPPSDAAGRRALWRLAAVAPDEVSSTVLTYGLRPVGEGWRERALRERADQHAETHLTLRDLRSLDLAGQTRTRVHICENPHVVEAAAASGCRAALVCTSGSAATVVLLLLDELAAAGCEFAYHGDFDWPGIALANRLVRRYRARAWRMAAEDYEQLATHTRAQGSPPLPLSGTPVEAAWDAALRPAMTALGTALHEESALHLLLADLV

SEQ ID NO: 40167 - protein, 503 aa, Rhodococcus sp. Leaf7
MTAYPVAVTESADSYVVDDRLRLFSFATAEKRADYLRVLRAFDHARAGYVVLLHAGEVSDILARTEGADVLTGVEISPLLEQLHTWGVLERSYDGTRAATLAEYRNRHYVYQFGQVGYQAYRAVEDVLAARPEDASLSRLVLPELLGDLAELAAANSAGDADLVYRKLNRLDTALGDMATRAAHFYLSLGDLVRTTDVTPESFLAHKDALLSHMREFSLDLARFGPKLTAAIEKVDATGLEALLDRAAASDERVFLTPDERRADWAGRWTGLVHWFSSTDGDPTESDRLREGTMSAIAAVLSLLRRVTETRKGGVSRESQLRHLAGWFASAPTEDAAHALFGAVFGLGRPRHLSMVHPDDDIVPVSRSWWDAPPVEISRTLAETGRPPAAGAPARVQRNDSGVRRLREQQLSVQRQRADAARSLADHGVYDRDLTGEETDVLLGLLNAALTARVPVSGRVGSSTGSEGGVTLTLAPHERSTVVRTERGLLHLDRLSLTIGTRR

SEQ ID NO: 40168 - protein, 443 aa, Rhodococcus sp. Leaf7
MRARTIPSLALDSYQRAARTVLSHHLITRTYPDRIALPLVRRWATELREDMLEMFGYRLEVTETTARLYPVLDRLDPTQPARTASDRVFDRRRYSFLALSLAALGRAGDQITLSELADHVAAEAGRVVGVDLDTERAADRDAFVDAVGWLSARGAITLADGDAGGWASNPDAGEALYDIDRSVVVALFRPPRAVQHLRSAAGLLADPTDDSRRARRALVERPVVYLTDAVLDPTSIDDVRLLTGLAAERRAEGVALIDTSGRLSDTRFPSTGTVAQVALLLAGEIADRVLDPDVEDGRTVEAPADRTAELIDALDSAIPDGSVFDSLADDLADDESEHDADDIEPGRHSFLADEWIDDTVGALVDAYGRTFAAQWQSDRLGVRRAAVRLLTDLSLVAPVRGGIVALPALARYRGVVVTVREHATIQLFPPSGIGQSEFQEFTP

SEQ ID NO: 40169 - protein, 1380 aa, Rhodococcus sp. Leaf7
MTSSTRFKPTRAGIVNLWDYRDQEFSFADGRLVLRGPNGSGKTKALEVLFPFVLDGRIEPRRLNPFAGEERTMKSNLLYRGQDSAHSYVWMEFARGDRDDPEAVTVGIGMRATKSADKVTRWYFVAEGRVGVDFSLFGADDRPLTKKQLAELIGTDAIVDRPVDYRAAIDARMFGLGAERYDQLITLILTLRRPQLAKNLDPKGLSRALSDGLRPLDEHLVLEAARSFSDMEEVGRALEGLVQADLASKRFVGVYSTYLGVQAKTDVDQVTRRLEAVDHATVALFAAKELRERRRIERVEAETRFEAAERALDLAVADQQTLQRSTAYEGKQQLDDLADAVRKLEVSTGQQRDKASKALESVDVRRRESEAAAASLREATAAISRAEDELLAAAEDAGIAWTPLPRDARTDQITAAVRGHAEERDGDVRAVRAALAVVDRATTERTRTERAASRAHESHDASSAAVHEAEAAVEIARSTYAESLRAWWSQHSARLGVPGLIESVTDAVATVGQDDAPSPAEVLSDGVRDLLDTVRDRRSAALQTRDDAASTIADLTAERASIAAEHDDAPAPPATRTGDRSGLSGAPFWTLVRFADSVPADEAAGVEAALEASGMLDAWVAETVPAGSESEQFLVPADAVDGPSLADVLLVETDISVPHDLVQRILTSVSLSADGDRVRVGRDGTFRHGVVLGRHHKPTAEYIGATARAARRAARIAEIDAALEAAESRRDDAERIAEDARAHLDGIRAAVGAVPRASTVTSALRTVASAAGALRSTADAATAADRELDRAVADLTAAERRLRSDAVARRAPYTPRDLDALAAAIRHFENTGSSILRYRGDSDRSAERDREASGRLDEAQILAEEYAEEAAIAETEYEQQFTKLETLRDALGAGAEKIDAELDAVRRRIEACKAEQRAATKADRESGEAIGKAEGAHETAVAGLTTALTEALTDAGRLAPYAHRDLLTVLGAARDCTWPASDAAWSTVEQLLYRIDSAAGPDDAPDVLPVEVRRLHLELSTATERVKAGDASRRSTRSALTAALQEFDAQLAASGQDFRLSWDAADGVTVVRVQDEQGHATIADFADRIDAARRDQETLLTDAERRILEDALLTGLAQQIHERTVDARELIARMGSEMKQRRMSSGNTIGVHWVLADTLDDSTRAVSKLLERDASALGPDELAEMRMHFAAQIRTARAQHSERSYPEILSTALDYRQWRVFAFTLIGSDGAEDRLTVARHSALSGGEQSVSLHLPLFAAAHVMLSSADPHSPRLLALDEAFAGVDDNGRSELLGLSVQFDLDLFMTGYDLWITYGDVPGCAHYDLAHSTAENTVSAALLVWENGELLAEHDGSDLAAALGSPLTRRVTAPAVGGLDFAEV

SEQ ID NO: 40170 - protein, 503 aa, Rhodococcus sp. Leaf258
MTAYPVAVTESADSFVVDDRLRLFSFATAEKRADYLRVLRAFEHARTGYVVLLHAGEVAEILARTDGGDTLTGVEIGPLLEQLHTWGVLERSYDGTRAATLAEYRNRHYVYQFGQVGYQAYRAVEDVLAARPEDASLSRLVLPELLADLEDLAAANLAGDADLVYRKLDRLDTALNDMATRAAHFYLSLGDLVRTTDVTPESFLAHKDALLSHMREFSLDLARFGPKLTAAIERVDATGLDSLLDRVAASDERVFLSREERRADWAGRWTGLVHWFTSTDGELTESDRLREGTMSAIAAVLSLLRRVTETRRGGVSRESQLRHLAGWFASAPSEESAHALFGAVFGLGRPRHLSMVHPDDDIIPTTRSWWDAPPVEISRTLAETGRPPAAGAPARVHRNDAGVRRLREEQLSVQRRRAQAARSLAEHGVYERDLTNEETDVLLGLLNAALTARVPVSGRVGSSTGSEGGVTLTLAPHEQSTVVRTERGLLHLERLSLTIGARR

SEQ ID NO: 40171 - protein, 445 aa, Rhodococcus sp. Leaf258
MRARTIPSLALDSYQRAARVVLSHHLITRTYPDRIALPLVRRWATELREDMLDLFGYRLEVTETTARLYPVLDRLDASRPARTTSDRVFDRRRYAFLALTLAALGRAGDQITLSELAVQVASDAGRVVGVDLDTERATDRDAFVDAVGWLSVRGAITLADGDAGGWAHNPDAGEALYDIDRSVVVALFRPPRALQHLRSTAHLLHSTTDDPADRARRARRALVEQPVVHGPDSVPDDRSVEDVRLLTGLSVERRAEGIALIDTSGRLSDIRFPSTGTVAQVALLLAGEIAERVLDPDADADDRTTLEADIDPTDTLLAALDSAIPDGGVVDDLVDDSVAPDTVEASDETIRHPFVADSWLDETVGALVDAYGRTFAAQWQADRAGVRAAAVALLTNLTLVAPVRGGIVALPALARYRGVVVTVREQASAGLFPTDHTSTLEEHTP

SEQ ID NO: 40172 - protein, 1380 aa, Rhodococcus sp. Leaf258
MTRSTRFRPTRAGIINLWDYRDQEFSFADGRLVLRGPNGSGKTKALEVLFPFVFDGRIEPRRLNPFAGEERTMKSNLLYRGQDSAHSYVWMEFARGDRDEPEAVTVGIGMRATRSADKVTRWYFVADGRVGVDFSLLGTDDRPLTKKQLAEQIGTDAIVDRPVDYRAAIDARLFGLGAERYDQLITLILTLRRPQLAKNLDPKGLSRALSDGLRPLDEHLVLEAARSFSDMEEVGRALEGLVQADHASKKFVEVYSKYLAVQARTDVDQVGRRLEAVDHATVALFAAKGLRERRRVERVEAEKRYEAAERALDLAVADQQTLQRSTAYEGKQQLDDLADAVRKLEVSTAQQRDKARKATEAVDVRRREADEAAVALRESTASIVRAEDELLAAAEDAGIAWTPLPRDARTDQITAAVRGHAEERDGDVRAVRAALSVVDRATTERARTERAADRAHTLHDAAVASVREAEAAVESSRAATAESLRAWWATHASVLDDGEILESLHTALARIGEDDAPTLGEVLGDGVRELLDTVRDRRSAALQDRDDAARTIAESTAERASVAAEHDDAPPALRTRTGDRAGLDGAPFWTLVRFADDVSADDAAALEAALDAATLLDAWVADTAPTGLVSDQYLTATTPVTGRSLADVLVVEDDIPVQHSTVRAILDSIALDDVGSSAGVGRDGSFAHGLVRGAHHKDAAEYIGATARAARRTSRIAEIDEALEVATARRDEADRVAERCRERLDSIRAAVSTVPRTSEVTAALRAVTSAAGALRSTTESVASADRELDHAIAELSAAERRLRTDAVARRAPFTPRDLDALAAAIRHFENTGSAILRHRGDADRSAERDREAAGRLDEAMILAEEYAEEAAIAESDYEQQHAKLEMLRDSLGASAEKIDAELDAIRMRIEACKTEQRAATKADRESGEAIGKAEGAHETAVAGLTTALTEALSDAARLAPYAHRDLLAVLGAARDCSWPASDAAWSTVEQLLYRTDTAAGPDEAPDVLPPEVHRLHTELTEATAQVKVSDASRRSTRSALTAALQEFDAQLAASGQDFRLSWDAADGVTVVRVQDEQGHSTIADFADRIDAARRDQETLLTDAERRILEDALLTGLAQQIHERTVDARELIARMGSEMKQRRMSSGNTIGVHWVLADNLDDSTRAVSKLLERDASALGPEELAEMRVHFAAQIRTARAQHPERSYPEILSAALDYRQWRVFAFTLISGDGSEDRLTVARHSALSGGEQSVSLHLPLFAAAHVMLSSADPHSPRLLALDEAFAGVDDNGRSELLGLSVQFDLDLFMTGYDLWITYRDVPGCAHYDLAHSTVENTVSAALLVWENGELLAEHDGSDLAAALGSPLSRRVDLPAEGGLDFAEV

SEQ ID NO: 40173 - protein, 498 aa, Rhodococcus sp. Leaf278
MGAVNAFVEEDRLGLFSFAVAEKRSEYLAVLRAFDTARANYVVLLHSGDVADLIARSPGRHAALTTLDIAPLLDQLHAWGLLERSYDGTRAATLAEYRNRHFVYQFGQAGYKAYRAVEDVLGARLDDASLSRLVLPELLADMHELAEANRQADGDRIYRKLSRLDSTLSEMATRAAHFYLVLGDLVRTTEITPESFLVHKDALLTHMREFSSDLTRYAPKLAEAIALVENTGIEELVERAAISDERVFLTVDERRADWTDRWAGLSHWFVAAESELSESERLREGTMSAIAAVLSLLRRVTETRRGGVSRESQLRHLAGWFAATPTEDSAHALFHAVFGLGRPRHLSMVHPDADIISTSRSWWEAPPVEISRTLAETGRTPTPGVPGRVQRNDGGIRRLREQQLESQRSRSAAAQSLASAGIHDRVLNEQETEVLLSLLNAALTARVRVSGRTSDSSGSDSGVRLTLSDSDRSTIVRTSRGRLHLDRLSLDVSEVARR

SEQ ID NO: 40174 - protein, 472 aa, Rhodococcus sp. Leaf278
MRAREISTLALDSYQRAARVALSNHLVTSTYPDRIALPLLRRWATELREDLLELFGYRLEVTESTARLYPVIDRLDDSQPARTATDRIFDRRRYAYLALALAALGRAGNQITLSELADHVAAEASQVDGVELTTDRASDRDAFVDAIGWLATRGAIALADGDATGWANNPSAGEALYDIDRPVVVALFRPPRAVQHLRSIRGLLAGADAPSDPEDSELGIHTESGREADPKETVRAVRRALVEQPVVYLDDLDRDGRAALATSRTVADVELLTGLIAERRSEGVALIDTSGRLSDYRFPSTGTIAQVALLIAGEISDRVIDPDAPALATYPLPDADALIEQLDSAIPDGGIFGDLAEFGFGSDATTFVEAEKKKLYPLIEDSWLTTVVDDLVERFGRTFAAQWQSDRDGLRLRALALLHRLRLVHCVSGGVLVLPVIARYRDVMVSVRDRTPQDSLFGNEQAPSTDPSEVEA

SEQ ID NO: 40175 - protein, 1394 aa, Rhodococcus sp. Leaf278
MTAHSTRFRPTRAGIVNLWDYRDQEFSFADGRLVLRGPNGSGKTKALEVLFPFVLDGRIEPRRLNPFAGEERTMKSNLLYRGQESAHSYVWMEFGRGSREDPESVTVGIGMRASRHNDKVTRWYFVADGRVGVDFSLLGSDDRPLTKKQLAEQLGSDALTDRPVDYRAAIDARMFGLGAQRYDQLINLILTLRRPQLAKNLDPKGLSQALTDGLRPLDEQLVLEAARSFSDMEEVGRALEGLAQADHAAKNFVSVYSKYLRVQTRSDVEQVSRRLEAVTHATTAHFAAAALKDRRLLERAAAETRFDEAERALDQAVADRETLQRSSAYEGKQQLDDLAESAAKLEVSTAQQADRARKAQAELEQRTVEAARADSALRDSVAGVTRAEEELQTAAEDAGIVWTPLPGTARSDQISTALRGHAEERDGDVRAVREALATVEKASTERARAEKAATKARDQLEAAAAAVTEAEATVDLEKAQFASGMRTWWSNTSSVYASAGITSAAFDALDAALAGIGDDDAPSLESVLAEQTADGIDAIRARQAQARVDVATRSAELNALRDELSLVRAEHDDAPPPFAARTDSRADLSGAPLWQLVRFADVVSPADAAGIESALQAANLLDGWIHPTADFPVDADSEQFLSALPAAARPSGATLASVLEPEPGTAVLESRILDVLNSIALQQNRSDHSGSSISIGVDGRYWQGVQQGRHTKPDAEYIGATARARRREQRITELGGAIDTATAALETATADELAARELVQALGAAAKQLPRVSSIVKAQRAVTAAAGALRTSKDGSVAADREFDQAIADLSAKEKQLRTVAVAHRTPHIGRDVDALAAAIRHFEHQGAAVIRKRSDHTRESERAREATNRLEEATGLAEELAEEAAIADENYRQQLQRLELLSEKLGATAEQIDIDLENARDRIEKCRAEQRAARKADKEAGEAIGKAEGACNTALESLRAAVTETLSDAVRLAPYARKDLLAILGVHQTHAWPASDSAWLTVEQILYRVQQADGPDDEVPVLPPVVHALHSALDEATASVKVSDSSRKSTRTALTSALQEFDSQLAASGQDYRLQWDAPDGLTVVRVQDEQGYSSVGDFADRIGAARADQELLLTEQERRILEDALLTGLAQQIHERTVDARELIAQMSAEMKQRRMSSGNTIGVHWVLADNFDDGARAVSKLLDRDASALNQDDLAAMRAHFASEIRIARAAHPERSYPEILSATLDYRRWRVFAFTLISGDGSEDRLTVARHSALSGGEQSVSLHLPLFAAAHVMLSSADPHSPRLLALDEAFAGVDDNGRSELLGLSVQFDLDLFMTGYDLWITYADVPGCAHYDLAHSTAENTVSAALLVWENGELFAEHDGTDLAAALGSPLTRRVPTRTEGGLEFDR

SEQ ID NO: 40176 - protein, 416 aa, Rhodococcus sp. Leaf278
MGWSLTGSGEWRGSAELSALLDAARKKLESNWLRVGGNITVDLSDAPELWRLCSAISRSNSSLHSRARSTKLDLERFDVWLSHPLNGGAGLIETLTEQAQLQDKKRIAADKAQVRSDALDRAREVLGGGTDREWIEYWIASLLNQDGTLGGRVSVDALAVATQVLALLPVDGMSLTELAELATGDTKALAGGGAAKLVLDALSLRENVPRPVDPVGIRALWETAGVSVDALSSRVLVLGYRVVENHTVARWLNDAADEGVPFPVTVDMLARGPLTNTSSTVFVCENIAVLAAAARTLGSGSGSVICTDGQPSAAVHRLLASRAPGTTIEWRADFDWAGLHMVKRAMDRYDASPWRMDVDSYRRALDARNSEPLKGHPTDSPWDPELSAALRDSGRAVMEERLIPDLLADLRVGLDD

SEQ ID NO: 40177 - protein, 503 aa, Rhodococcus sp. Leaf225; identical to SEQ ID NO: 40170

SEQ ID NO: 40178 - protein, 445 aa, Rhodococcus sp. Leaf225; identical to SEQ ID NO: 40171

SEQ ID NO: 40179 - protein, 1380 aa, Rhodococcus sp. Leaf225; identical to SEQ ID NO: 40172

SEQ ID NO: 40180 - protein, 498 aa, Rhodococcus sp. Leaf233; identical to SEQ ID NO: 39892

SEQ ID NO: 40181 - protein, 471 aa, Rhodococcus sp. Leaf233
MRAREISSLALDSYQRAARVALSNHLVTATYPDRIALPLLRRWATELREDLLELFGYRFEVTETTARLFPVIDRLDDSQPARTPSERVFDRRRYAYLALALAALGRAGNQITLSELADHVATESSQVDGVELTTDRASDRDAFVDAIGWLATRGAISLADGDATGWANNPTAGEALYDIDRSVVVAMFRPPRAVQHLRSIRGLLAGSDAPIDPEDSDLGHIESGREADPKETLRAVRRALVEHPVVYLDDLDGDARTALTASRTVADVELLTGLVAERRAEGVALIDTSGRLSDHRFPSTGTIAQVALLIAGEISDRVVDPDAPALSTYPLPASDLLVEQLDDAIPGGGIFGDLAEFGFPADPTTVENSAERTQYPLIEDSWLVSVVDDLVDRFGRTFAAQWQTDRDGLRIRAIALLHRLRLIHSVSGGVLVLPVIARYRDVMVSVRDRAPQDSLFGTEQAPSTDPSEVEA

SEQ ID NO: 40182 - protein, 1394 aa, Rhodococcus sp. Leaf233
MTAHSNRFRPTRAGIVNLWDYRDQEFSFADGRLVLRGPNGSGKTKALEVLFPFVLDGRIEPRRLNPFAGEERTMKSNLLYRGQESAHSYVWMEFGRGSREDPESVTVGIGMRASRHNDKVTRWYFVADGRVGVDFSLLGSDDRPLTKKQLAEQLGSDALTDRPVDYRAAIDARMFGLGAQRYDQLINLILTLRRPQLAKNLDPKGLSQALTDGLRPLDEQLVLEAARSFSDMEEVGRALEGLAQADQAARNFVSVYSKYLRVQTRSDVEQVSRRLEAVTHATTAHFAAAALKDRRLLERAAAETRFDEAERALDQAVADRETLQRSSAYEGKQQLDDLAESAAKLEVSTAQQADRARKAQAELEQRTAEAARADSALRDSVAGVTRAEDELQTAAEDAGIVWTPLPGTARSDQISTALRGHAEERDGDVRAVREALATVEKASTERARAEKAATKARELLEAAAAAVTEAEATVDLEKAQFASGLRAWWSSNSSLYSSAGITSAVFEALDAALAGIGDDDAPSLESVLAEQTSDGIDAIRARQAQARVDVAAREAEVKALRGELSVVRAEHDDAPPPFAARTDSRADLSGAPLWQLVRFADAVSPTDAAGIESALQAANLLDGWIHPTADSPVDATSEQYLSPLPVAARPTGSTLASVLEPEPGTAVQESRILDVLNSIALQQDRNDPSDSSVSIGVDGRYWQGVQQGRHAKPDAEYIGATARARRREQRIAELGAAIDSATAELATATAAELAARELVQALNAAARQLPRVSAIVKAQRAVTAAAGALRTSKDASAAADREFDQAIADLSAKEKQLRSVAVAHRTPHLGRDVDALAAAIRHFEHQGAAVIRKRNDHARETERAREATNRLEEATGLAEELAEEAAIADESYRQQLQRLELLSEKLGATAEQINTDLDNARDRIEKCRAEQRAARKADKEAGEATGKAEGACNTALESLRAAVTETLGDAVRLAPYARKDLLHILGVHETYTWPASDSAWLTVEQILYRVQQAAGPDDDVPVLPPVVLALHSALDTATASVKVTDSSRKSTRTALTSALQEFDSQLAASGQDYRLQWDAPDGLTVVRVQDEQGYSSVGDFADRIGAARADQELLLTEQERRILEDALLTGLAQQIHERTVDARELIAQMSAEMKQRRMSSGNTIGVHWVLADNLDDGARAVSKLLDRDASALSQDDLAAMRAHFASEIRIARAAHPERSYPEILSATLDYRRWRVFAFTLISGDGNEDRLTVARHSALSGGEQSVSLHLPLFAAAHVMLSSADPHSPRLLALDEAFAGVDDNGRSELLGLSVQFDLDLFMTGYDLWITYADVPGCAHYDLAHSTAENTVSAALLVWENGELFAEHDGTDLAAALGSPLTRRVPTRTEGGLEFGR

SEQ ID NO: 40183 - protein, 416 aa, Rhodococcus sp. Leaf233
MGWSLAGNSEWRGSVELAALLDAARKKLESNWLRVGGNITVDLSDAPELWRLCSAISKSNSSLHSRARSTRLDLERFDAWLSHPLNGGIGLIDTLAGQAPLQDKKRIAADKAQVRADALDRARAALGGGTDREWIEHWIASLLNQDGTLGGRVAVDALGVATQVLALLPVDGMSLTELAELATGDTKALTGGGAAKLVLDALSLRENVPRPVDPVGIRALWETAGVSVDAVSSRVLVLGYRVAETHTVARWLNEAADEGMPFPVTVDMLARGPLTNSSSTVFVCENVAVLAAAARSLGSNCASLICTDGQPSAAVHRLLAARAPGTTIEWRADFDWAGMHMVTRALARYDAVPWRMDVDSYRRALDARNSEPLKGHPTDTPWDPDLAAALRDTGRAVMEERLIPDLLTDLRLGPAD

SEQ ID NO: 40184 - protein, 503 aa, Rhodococcus sp. Leaf247; identical to SEQ ID NO: 40167

SEQ ID NO: 40185 - protein, 443 aa, Rhodococcus sp. Leaf247; identical to SEQ ID NO: 40168

SEQ ID NO: 40186 - protein, 1380 aa, Rhodococcus sp. Leaf247; identical to SEQ ID NO: 40169

SEQ ID NO: 40187 - protein, 501 aa, Nocardia sp. Root136
MRLFSFATAEKRADYLRVLRAFDSARAAYVVLLHADDVAEWISRVEAGGRVEAAAGVPLPAVEIGPLLEQLHRWGVLERSYDGTRAATLAEYRNRHYVYQFAQAGFQAYRAVAGVLAARMEDASLSRLVLPELLADLRTLAAANRDGDAERVYTTLRRLDAALTDMAARAAHFYLSLGDLVRTTEITPESFLAHKDALLAHMREFSMDLARFAPRLAAAIGEVEETGVEQLIGRAAGCDERVLLSLAEREADWRSRWDGLRTWFVAAGTESSETCEADRLREATMSAIAAVLSLLRRVTETRRGGISRESALRHLAEWFVATPTAGGAHALYDAVFGLGKPRHLSLEHPDAELIPTSRSWWEAPPLEISRTLAETGRAPTAGAPARIARNDAGVRRLREAQLAAQRDRAAAAASLSKGNVHERVLDQRETEVLLRLLDAASTAWVPVSGNVDGTTGSDNGVTLTVRPCDGSTVIRTAVGLLHLNNRRLEVRSGSARRGVAR

SEQ ID NO: 40188 - protein, 459 aa, Nocardia sp. Root136
MKRQRIDALALDSYQRAARVMLANHLVTRVYPDRIALPLIRRWATELREDLAELFGYRLEVTETTARLYPVHDRLDDARPARSVNDRVFDRRRYAYLSLALAALGRAGDQITLSELAEHVADYASRIEGLDLSTERAADRDAFVDAVGWLGARGALTLADGDAGGWASDPEAGEALYDIDRPVVFALFRPPRALQHLHSVRGLLADDADQASPDQARRVRRALVERPIVYLDELSDAERALLGQDRLIGEVEYCTGLRAERRAEGVALIDTSGRLSDTRFPGTGTLAQVALLLIGEIADAVLDIDNPVARRPGALTPDNTLLEQLDASIPTAGVFAPLADDIEINTAATDFDDDETDSPEPVTYPFLDDAWVRATVIALTDRYGATFAAQWQADVGGLTTEVLALLAKLRLIRPVDDGLLVLPALARYRGAVVTVRVRKAEELFVTAADTDGSTGEAGV

SEQ ID NO: 40189 - protein, 1450 aa, Nocardia sp. Root136
MSLIHGGVRFVPTRAGIVNLWDYRDQEFSFADGRLVLRGPNGSGKTKALEVLFPFVLDGRIEPRRLNPFAGEERTMKSNLLYRKQESAYSYVWMEFARGSWDDPETVTVGIGMRATRSSDKVTRWYFVADGRAGVDFSLIGPDDRPLTRKQLAEQIGSDAIVDRPVEYRAAIDARMFGLGVQRYDQLINLILTLRRPQLAKNLDPRGLSQALTDGLRPLDEQLILDAARSFSDMEEVGRTLDGLVQADTATRRFVDVYRKYLAVQAKTDVDQLRTRLDAVTNASTALFAATALRTRRDTDRTEAETRAENADHAYEQAIADRENLQRSSAYEGKQQLDDLADAVRRLETSAAAHRDKSAEAAHTLQRRAEEASRATEAVRTAAAALVRGEDAVRAAAEEAGIEWTPPSAEGRGDQFTVVVRGHAEERDADVRAVRKALGKWETAAADRTRSERLAERAIELRDSAAAEVAHAEAAVALARSESAAALRTWWHTNTEVFAPVTELEGVPEEDARSGSADATADRGAAGLFEALDTALAGAGVADIPSASEVLAERCEPLQEQIRTRRQEARSRTSAAAARLDALAAERTQIAAQRDDAPPPHPTRTVVREGLPGAPLWQLVRFADSVSPQDAAGIEAALQSGGLLDSWICGPTLPVDIDSDHFLLPLPVDQRPLGRTLADVLVVEEDSAALTVPTETVAAVLASIAVHDADPDPTTRATATPGAACTGATLTALTTADTPQVVVGLAGSFRQGVLVGHHHKPEAEFIGTTARARRRESRLAEIEAAIEAAAAEHDAARAEDASATAQLAALSAAAKALPRPSAVTSALRAVAETAGLMRSRVEAATQAERELDQAVAEVAALDKKVRAAAAAHRTPREARELDALAAAIRHFENTGTGLLRLRAEHEREREREREGADRHDEARALAEAFAEEAEAARLGYTEQQRKLETLREALGAGAADIDRDLELARGAIEAAKAEQRAARKAANAAIEAVGDAEAAYRTANEALATALTEVLGEVRSLAPYARPDLLSLLGASVEHRWPSSDAAWSTPEQLQYRIVAAGPETDPMVLPDEVAALFADLDTATSQVRATEAGRKSTRSAVTSALQEFDAALTASGRDYRLNWDAADGLTVVAVHDENGQAALADFAARIDAARRDQELLLTDAERRILEDALLTGLAQQIHERTTDARELISRMGAEMKQRRMSSGNTIGVHWILADGLSESARSMCKLLDRDTTALSSEDLGSVRAHFAAEIRAARTAHPERSYPEILAATLDYRTWRVFSFTLISGDGTEDKLTVARHSALSGGEQSVSLHLPLFAAAHVMLDSADPQAPRLLALDEAFAGVDDNGRSELLSLSVQFDLDLFMTGYDLWITYAHVPGCAHYDLAHSTAENTVSATLLVWDSGELLAEHDGGDLTTALGSPNRRRVPNTIEGGLTLEGMPGEPASVG

SEQ ID NO: 40190 - protein, 519 aa, Terrabacter sp. Root85
MTSGALDPRERQTLGALRYAVNEEAASYLAIMRLFTSGMSGFLSDQSAADIAERLAADGIELDQDTVEQRLSYLVEHGNLARSPRETEARSIREYLTNRARYQLTQRGELVHRQVEELLQHSESAREVSSEVLPVILTGIEDFVNNARRGFDDTDPRELAGRITTLFAQFEVLVNSTRQFYSYLTQVLTRFDLGRDEFELFKTALLDYLSRFIDEISRHMPQVGDRLQELRPNLAELCERANTGERLVGIDGTAARRATGLEPGDWESLHAWFVGSPGRRSDADNVRALATDAMRSLLVNLRRIAAGADRQQSRYGDLTRLAAWFDTSSDEDAHALWAAVFGLYPTRHLAFKAESDDEPIPATQSWWTAPAAEVPVGLRIHGDRTARGRAGARVDFTAAKNARLAERARQQRRREAALRELATHAGTLREARVSDDAREVFLDLYSTALTGYGRPLAAGATAETTTPIGPHRLTLAVERAPGSTVAIASPAGKLVLRDIEIRVSIAAESDGQRQMGSGA

SEQ ID NO: 40191 - protein, 287 aa, Terrabacter sp. Root85
MIDELVAGVRSAAVDAGVDVDLDALSERRVLHAALIALIHIGVVSERDGDLEHWAERRTDSLLDVHRDRLAVLVAAPLSRCATPEEVFEDASLPSSAGGSRVPIRRRLVEHPILSVDGLTDEQRGWWRRNRHREVEWFSSTLGLDLELRAEGAIAIDPSGELTDRAFPGTGSAAHFALLLLAELVEEVRSDNQTDPTSGPWARLATSTARTAGDKVFQAWKRGLRKEHRENPDAVFDEAIEILADVGLVQRDADGLRVHAAAARYAPKAQLIEAQQAAPTLFDEDHS

SEQ ID NO: 40192 - protein, 1354 aa, Terrabacter sp. Root85
MTTTFVRSAVRETADTDRRFRLSRAGILNVWQYDDQVFDFADGRLLLRGANGAGKSKTLEMLLPFALDGDKARITASAKHHTSLLWLMTDGFEGNARVGYIWVEFLRTDDAGQPEAFTCGIGIRASESQRTATAWHFATHRRVGHDLALEDAGGPLSRGRLEDAIGADGQVFEKAAAFKEHVGRTLFGLDPSQYDEVLRLLYWLRQPQVGEDIDPGKLAQYLSQALPQIDELAIRKAGDTFDELVAFGEQIERRASAAEALSVLADAYADYARAAVAQRAAKLAEILTTERNLRRQLSKAEATLQRVTTERKEAEDSLKQSTADAEAAGTRLRALQESPEARDQRRLSDLAERAEREAAESKRAGERVQRRREEHGRKAEALAIAAQQLREMTRAFTDELADTVRRHQESVPDSVMVSPVSLVAIDLTNHADVAALGSGLDDARLTITKADGSVGVRAAAVTAVVEATARYKDARRIEEEAQRRADEAESRWEDARQRRSASEGAAIQSEIDFRASLTNWAGLPEAVHVDLPTEFDAETLDAFPELVRTAVSGPLATLRAELQSESTKRDNADVQVRALEQKRSEVEAERDPAPPQPSLRRTPRPDGHSLWQVIDFTTGLDEPVRAAIEAALQSAGLLDAWLRPGGRLLDPGLHDTLLVGHTPASGPTLSDVLHVDLPAGSDVSVEDVRAVLDAVHLGDDPDAEAAIGADGTWRLGPAHGRAAKEAPQYIGATARAHERARRLAEIDQELQRQRDTRDIAKESAERAGGTIAALDSWVLGRPTDSGLREAWTRLTEQIEAELREELANRDAQREAHGRRDETAQAHSSLTRLAQEHDLPVDSSSLAALKERLDHLRADLDALGKLIPHLRRNLDRWSSDAVSVDEALRELESEKEEHAAAVDRAGQTQAELDALREAVGASVQELERKIALARESKASHEAAKKTADTRVRELAEALGEARSGLTTAQERLASHAPARAEALAWFAQLAQAPGLLAAAEVASAEPFLQAENIVGDAPIPDSITQIVRELADPSTGDITRATDRVWAAHRDAESGPAADHQLAMARYGDLLAVTGRDDAGEAPVVVIAARVTAAVEHDRTLLTEREKKQFEQHILGELGDALRACRRDADELVTAMNDLLGEVRTSQGIRLRLKWDLRDDIPAEARAAVDLLAQPVGALVPEERASLRDALHGLIETSRTLNPELSYSEHLGSALDYRTWSEFSIRYTRPEKSGTWERLHRRSALSQGEQKVLCYLPLFAAAAAHFTSLAGAAPHAPRLVLLDDAFPKIDVRTHPLLFGLLVQLDLDFVITSERLWGCHDTVPSLAIYEALRNPTQRGIAQYESRWDGRTLHSIG

SEQ ID NO: 40193 - protein, 342 aa, Terrabacter sp. Root85
MDLADLDQRLRDRSGMGGLLEVLTAIHGEAPKDRPAARATRNAARQRPLDRAAELVDAPWADTWIEGLRRTGLLTAREDALRIVEDAAKVLNELVAPSVRPQSRVELAARLLGNAHALDADRVLHRVVIRGLAAAAGVGVPEATPGVVGLWSRFGIEPDLLSRTCLVLGLGAPGVAGERLGLAAESGDPVHITEWDLRRLGAFDVGDRYVLVCENPRVLEAIAETGDLGHVVVCTSGEPNLVVTEILGRLHEGGEHLRYHGDFDWPGIGIANRVRENFGAEPWLMAADDYVAAVRRENLPLGPHVIEPTWDAELGAAMRLHGRAVHEESMLAQILGHLATST

SEQ ID NO: 40194 - protein, 538 aa, Kitasatospora sp. Root187; identical to SEQ ID NO: 40164

SEQ ID NO: 40195 - protein, 442 aa, Kitasatospora sp. Root187; identical to SEQ ID NO: 40165

SEQ ID NO: 40196 - protein, 1404 aa, Kitasatospora sp. Root187
MSRELGTAGAPHGSGRYRLHRAGIRNVWQYDEQEFAFGDGRLLLRGKNGAGKSKALELLLPYLLDGDARALDATGTGRTTLTWLMLDGFEQNNRLGYLWVEFRRIDGEGERFLTLGAAIRASKSANTAKPYFFTTTLRIGHDLQLAEGGQPLPLDRLRAIVGADQVQDRAADHRVRVARELFGITDSSRYRNLTQLLHRLRRPTIGDRIESGGLVAVLGETLPGLDEEVVDKVARNLDDLDNVRDDLGRLEKTDAALGQFLGGYRGYLHGVLRRRTARVGDELGRLGERRKAAGDAAKLVGELTEGEAVAAEQCDRLHQEYEDAKAELEALRLSAGYRSLQELGERRSTVAALRTAAHSAFAAWQLAHDAAEAAGGTVSLGADRVGSALRRLGAQHKELGESADRAGIGRAHLGEAAAAPDTVLAGAAETEVTDPDGGGLLLRRERVRAFEPTAVVEALRSWGGQLAAAEPVVRTRRRAVGELGGLLVRSREAAEAAREADRERERLEGQAEDAAVETERQRRLVLTEGDLYVAEVSAWTDRLESLAGVALAAVRAVVARDGAAETVFAERALPAEIPEEVETAADQALTVAVEQLSEERDSARLQVHDLSAAIASLAREKGEWERRADPEPPRSRFRDAERTPATGAPLYRLVDFADGIPAADQAGLEAALEAAGLLDAWVTAEGSAVDPLTHDTVLAPGGAAVFGPTLATVLRPVTAPGGPVTDRQVAELLRSIALAPPGTPFDPAGSSAVSPDGRWRLGAAQGAYAKSQAEYVGTEVRAETRRRRIAELAEQVRAEQDRLSRAETRLRELTDRLGKLTAALRGRPRAQGLTNAWAHLTAAERAQSALGRATADAAGAANQARAVSSEARRQAEAVATAHALPADPEALDAVRDVLRDLATGLTRLREDVRSAEDTAVAHGEERRGYERAGARLLDAQGGYQRQRGELTSARRALRTLEEAVGTSEQQLLEQEERISRHLAAVSAELPESERELAQLHDRRVRAEQGAEVSRSALGTQEAEVIDSGRALRTALATPEVLRGAGLADRAAELAAADPAHEDVRARLRALQALTEVCRAALDAERRDVSGTTLLNRFNELRDQLAGGYDAALEELDGIMVCRLVDDTGQHDVALVGERIAGQAAEARSRLTERERDVFQRFLTGELGDNLSRQVLAAGALVAALNETLRSVRTSHGLGVELDWRLADTADADVRAAVELLRSPSGLRTREQSEQLREVLQRRIEDARRAEPGAGYTAHLRTALDYRTWFTFQPWVIDEAAAVRRRKFSGRTGLSQGEQRVLSYLVLFAAAAAHFTTLAESAPQVPRLILLDDAFAKVDEPTHARLGRILVDLDLDFVLTSERLMGNWPDVPSLHIYECLRDPNHRGVATLHYTWNGRNRRLVSG

SEQ ID NO: 40197 - protein, 421 aa, Kitasatospora sp. Root187; identical to SEQ ID NO: 40166

SEQ ID NO: 40198 - protein, 492 aa, Lactobacillus nantensis DSM 16982
MSDFEKVRQFTYLNADNVDRYRRIMRFFYLQNQRMNNLLYKEDILKGVHMSGLSEYTTNQLDNDLSGLVEWGNLQVQQEMSQPKTIEEYRNKHFRYQITTVGIEIEEFIQALPEEDDNTSDLDSHMFKRFLESLKIINSLSNQDLLDGWDDLQTRFDKIRKNATGYIAYLTSSRVEDLMQTTEFLVYKLKFVKYLREFIRSMQQTSIKISLALNSVSQDTITNIVKLQEIHESNKLSLGQQNIEGVEKRVRDTWKFMCYWFMDTDSRESEYTNLISQTNEAMSRVTNIIQAITESNLQYHSRSKDYLKIAEWFQVLVDSDESEEKSFFKANKLSATLFGASKTRHIQSCNMDVTSQLDDIWKMTVPTTSLTSKSRKNRPRVANKSFIINSERQEVVRKRKLEERNKNQQLWNSYLKNGELVLSDNNHLPKQIRRELIRYFSIAIMTTNHRVSTQLGWIFEIEINPEKKVTIEFDDGYLTLPDAKFKIVEGIA

SEQ ID NO: 40199 - protein, 366 aa, Lactobacillus nantensis DSM 16982
MKDDEDVKICLDRLLEFHVILEKDNQEIFRLIKKYSKDIQKICNNDLNMALVLNAHFAKIEKKPFHTEAFMGIEGFNETSDYVMFACAMAFVEESGPESPFILPDLTSYLKRTMPNDLDWTQYHIRKRLVRILQQMIALKIIIVLDGKFDDFDRNEEQVALFNSTNYSRYFLNMFSKNIQSLTDSSELVPISETKNISMQVIQRLFLSVGICRTNETESLFRYMRSEQERLTKFFEINSFYEFELSKNLGILVSENRRIGIKYIPDNGSSGDLLMLIGSKIRNRSFVPDEFGQLHLNLTQWQSIVSEVVQKNRELLSKAYREKSFESIAKELLMQTVNDGLILQSDGLLLVTPIFYRLNGEFTLSE

SEQ ID NO: 40200 - protein, 1361 aa, Lactobacillus nantensis DSM 16982
MENKFVLNRLGLINFWYYQNQVFELSDGHLLFRGRNGAGKSITMQSLMPILLDGNVEPSRLDSFGSRDKKMIDYFLGDEDVNGKDKEGVGYLWAEYKIGEQYITTGIGMRGGRKSTNLNRWYFVINDGRRIGSDFSLMINETTNSAITLSKKQLRNRLEGSGQVFNSQKEYANYISENIFGFKNIDDLENTIKLLIQLRNPKLNNDLKPAKLEGILSDSLPSLTEDNVQDSARTLDQIDQSNANIDHNEYQKKELQPLLKAYTNYRRHQLVALAHVTENHLQQAEKLTRKFSQLNSKRREIENKRNSINESNIELDRELDSNIQLKEKLAGNEGFNLVEEAKKLRQKLSQMNQNENNKNDRILIYEGDIKKLQDKISDLKKKETNYEENLTQISKTLEYLAVKSGFYKQHKQVFLVASDYPSVDIVQWKKESIENLDCLEKIVNKYQECEWIQKNVDQLDRQLEDENKKLNDYKMKQRNLESKYSEELFDLKQMFQKYSDSLKFEIDKDVVGIIQTNLDKIYTIDMPRLSKVIEPLIDVFNEKKGIIQNAIQEINYNIDNVNVEIEELQTEQDEIRAQKYPVPERLHYRKKIRQNQKLIPFYQLLKFKENVDTSTINQIEGALLESGILDGLVSQDGVITIGDTTLKANPKMFMPTLMDYLKPDIDVTTAIPESLIYDLLSSIAVNKDSTDVDVVITPDGEFQVGILVGKAKDNYEAQFIGATAQERFRKARIDNLQKRIDDKLIQLKKLENSLTEKGNQIDTLEKDIVRIPKDDNLSLLKFQLEDVNRNIESQTKTTIDFSERLEHKKEELQYYFLEIKQLSKNYQTISKSKSAFESAKNGMQQYVNSINDWNKELSHISNLIERIKDLEESLIRMNKELAVRQKELSQLISDIKDIQFEIKVNEDRQRIAGNLDTINRRLVEIGERIDQIKYVQKENSVKLQDLAGRSEKTKINIVNLQKKLDFECPFSKLLVETLNQELYLEVGSNQDLQKEFKDNLISDEAIDSETLNHDIEIMNSKFSAQSNSLLNFRPRQKARDTLDVPDWIKNFPKNRGDIDFWKLYLNHHQEVLVELSGIDELITKLDHQLKEQMQVNLEAMTEAEEKLFREIIFDSLGEVIRQNINKAQDWIVDMNQILSQQENNSNLKLSIKWEIKPSDELSNNENQEGVALLKKDPKVLNHQDLSKIKTFLNSKINEKRIAYEDHGQEIQMTKILRDALDYRNWFQFRIFYTQNGKNKRQLTKVVFNKLSGGEKAITMYTPLFVAMSARYNNARKNAPRIITLDEAFAGIDESNISQLFKTIDQLGFNYIMTSQQLQAEYDTVPSLNTYELLRDKGKDGDLVTAIQLHWDGKERVENNGQ

SEQ ID NO: 40201 - protein, 403 aa, Lactobacillus nantensis DSM 16982
MDNKIHEAIFYFESDPELLHVIKEIAKKYYYYGEFKGSINKSDLKNVEALLLFLGISQSKWRKTERFQVTEFISAYNDSKFGEINIKTVIEFIIGKKLLTKRDIDAGIEIRWQQYLSKVSEIAPTVYKLLAVSIIKRNFNKELSIDSFQKVELALKNLPTKLTRLPVFAYQLFENPHSLDKGRLLGNLFYDCIVSMGVKNRDNIDVYLAVNIVKDDILNFVTVKNLKGDSPIFKAAADNHLIWNVPLMQLMKMKIIEPIIGNKVFLIENSSVYAVIADKFKMVPLIMTSGQFKYATWKLLDLLPNNIEIYYSSDLDPAGLVMSQKILEKYPKRVHLFGMSDQLFVCEYTTSLKKLSIKTDVLNGIKNERLLSLKLLMKEKQCVVFQEAIISELIKSIEKHLKC

SEQ ID NO: 40202 - protein, 515 aa, Pseudomonas libanensis
MTHDTYWPEASADLFRHATAEKASIYRAIMEVFAAAKRQYRLQLRPDEVLSEANWGHRTPPSHEEVAAALSQLAMWGNLESQPDMTRVSTLNDYYRARFLYRLSHGGEAVETGLLAFAHSLRHRAELQTVALEDIDSRLRALQQLVAEAQSSGNLDTAKAHEILRDLVRVFEGLTENAQAFMAGVTRSLELQQADATTLVAYKRRLIDYLERFMGDLIRRSDAIARILHELSVSIDPILLQVAAREARDAAPNGTGEQVEETQRRREIWRERWKGLRGWFLPTGNEPPQAELLRARARSAIPQLLNAIATINERRSGRSDRSADFRVLAQWFAACDSDDDAHRLARAAFALQPARHFSLEVADAEDVPASTSWLDAPPLIINPRLREYGEAAPRGALAKVRDRSRDRALMAQQLAQESRQVEAARRRLATGRTTRLSELGELDAPAFSLFLGLLGEALAEQHDPSSSVERQTGDGLLHIRLEPLAEDSRARICTAAGVFSGRDHLLTIRLTEERS

SEQ ID NO: 40203 - protein, 422 aa, Pseudomonas libanensis
MTIASSRRDTRHVGETQKAQQQDEFRRALRSLLMCPLMPPGHADFPAVRRQADRLHEWFAREAGWPLHVDREGARLLKRPADLSDPTRGLPDHDRRCYVLLCLAAAVLERADPQITLRQIGGRIVQQAADPALEALGFTFTLNGANERRELVMVCRTLLGQGILERVAGEEESFVQDGSGPQSDALYDIHRRLLAGLLAAVRGPSTWNAEDTPGNTQARLNALVTGFTVDSEQGRRDAIRHYLARRLLDDPVLYTDTLDEEARSYFVNQRGVLASRLCEATGLVAEQRAEGLALIDESGQLTDVSMPAEGTEAHVTLLVAEHLARRLREERAPLRVAESDIALFLRQATERYGRYWRKSARAPGAEHELTQIAITRLCRLGLMLRDGHDVCPLPAIARFSLGQTEVRNARSTESLFLPEPNA

SEQ ID NO: 40204 - protein, 1381 aa, Pseudomonas libanensis
MSSDLFITSSRPRLPEPLRERWQPLRLGLVELFHYDSEEFWFHDGHLLLRGNNGTGKSKVLSLTLPLLLDAQLRSSRVEPDGDSGKKMAWNLLVGTYPRRIGYSWIEFGRREHDGRPRYLTLGVGMSAVDGRSQVDSWFFIIEGDGTTADPRIGEDLWLTTAERQVLTRERLRDALGGRGQLFENHQLYRRAVDERLFQLGTRRFDALMDTLIQLRQPQLSKKPDETGLSNALSESLPPLAPELLSDVAEALNQLEEDRIQLEDARRLEQTVTQFEQRYRVYAGMLARRQARELRQAQTAFDNASEARNRAQDELAGAEDEQDAAKAAYEAAKLAYSAAREQVETLQSDPANQDANRLVQEQNNAAERQRAALAAARQRNEARTRLISEIDLNQQRIVQATQARDELEKARTCTQDAAEAIAIAANVATNPLLSLEAEVLAELPLGHRAAEEALREQVRERRRDIAHLRRRHAEVNQHQTTRANAQENVRTVRTELDTALEQREQADQQAEQQAGALLDAWSELCKNLVQLRFEAEPTLQQLAEWVARPEGDNPVQAAMDTAWRQTLQRHADRQAALDSSLADLDKQRADIEDERTRLAAGEDALPPEPPTRARGVRLQRHGAPLWRLVDFHPSLDTTERAGLEAALQASGLLDAWLSPDGVLNDDNGKPLLDNSWRQRTSVNGTDLNSALIPAVLEACPIEQATLTGLLACVAYGTEEPGDVEAWLSPDGRYRLGPLTGSWQKTEADYIGRSARELARQRRLEALATLLAELDIAQAQLARRSETLAAERTQADLERQASPPERPLHDAIAATLQAARVVDQTRQRLAMATARCQEVEDAWQSAREQLEHDATDLRLPSEPERIAATEEALEYFDVVQALLVQAVREWQRALPDQRHQQQREDEARRILEQTDESLVIAEEQAEQARVRFETLQQSVGQQVEKLLTKLSAARAIQTQAEQDTEACREVLGKTDTRLAVAATLVGQSEQTLRERSDDRAAAVERLHHFCASGLLAAALRDLELPEHWSIDPALNLARRIEQALTRIADDDATWTRVQNQIAEDLSELQRGLSALNHQAISVPNDWGITVTIQYQNRAERPDTLALRLAEDIAQRNELLSAREREVLENHLQAEIAAELQRLMRSADDRVKAINHELHKRPTTTGVRYRLLWEPLSTEDGAPAGLEAARQSLLNTSADLWAVEDRRAVGVMLQQQIAAERALADADSAGRSLLDQLAHALDYRYWHRFRIQRQQDGQWRKLSGPASSGERALGLTVPLFAAIASFYGHGGSPLAPRLILLDEAFAGIDDTARAHCMGLVREFDLDFVMTSEREWACYAELPGVSICQLQRREGIDAVFVSRWTWDGRAKRLEEDPDRRFPSV

SEQ ID NO: 40205 - protein, 429 aa, Pseudomonas libanensis
MKTTVDPRLQRLLGEPALAALRQRLRRRFELADAEHSPSSIQLNNLDSAEYSALCQLTGRPSRIARSMTLDIADLDARLRAAGLADSLQNALEHLDGPIVAKASLRKELSAQWAALTRSASAASGPLLSSWLQDTATSLPLLKRLGRDPTHAGQLLTAADRVLCRLPAEGLPRSQLAAETLGDAHALDAGRPVASLVLSAWRLRERTKAALDDKATGQSNDGNEERLREVWSRAGVLINELARPALFLNLPVEPDAPRTWLPGEPGYLSLRQLVRQPYSWQVDGRNVYVCENPNIVAIAADRLGADSAPLVCTDGMPAAAQRILLDQLSSAGAQLYYHGDYDWPGIGIGNHVMRTWQAIPWRFGCNDYLEAMRVAPTRPRDLDTFGIEALWDKELRAAMDNQGIAIPEEAVAGKLLGDLSHGKKPFDHQ

SEQ ID NO: 40206 - protein, 502 aa, Bradyrhizobium valentinum
MRAVSDSAELFRHVSAEKSEFYRRIMDVFAAAKRQYRLQLRPDEVLSEARWLDAPPRIEDVNTALAQLAAWGNLESHPDTARVSSLSDFYRARFLYRLSQGGEAVEAALALFVQTLQRRAELQTVALEDIANRLQALQTLADEAEADVAKIHETLRDLVRVFEGLAENAQAFMAGVARSIELQQAEAIAVANYKRQLIDYLERFMGDLVRRSDTIARHILALEPSIDALLQQVATRDARDAAPGDAEDRADARTLHLNAWRERWRGLRGWFFRTGHEPSQAELLRARARSAIPQLLGAIAALNERRSGRSDRSADFRMLACWFSACSNDGEAHRLARAAFALNPARHFSLNPNADADLPASTRWADAPPLTIHPRLREYGEAAPRGVMPRVRDRGEARAHLARELAEESLQVEAARKHLATGQPTRLSDLAELDIHAFGLFLGLLGEVLTEQAGPNTSAERRTGDGLLHINLTPLAVDSRAVINTPRGVFAGRDHLITITPT

SEQ ID NO: 40207 - protein, 433 aa, Bradyrhizobium valentinum
MAASVGRDSRSIGQQQRRFQNEEFRSAVRALLMTPLMSPDHDDFPAIRRQADALRDWFGRETGWALRVEQEGARLYKRPADLASTMRGLPFYDRRRYVLLCLACAVLERADPQITLRLLGERLLQFAAEPTLVASGFIFTLGAPHERRELVAVCRTLLDLGVLQRVAGDEDAFVHTGDQADALYDVQRRALAGMLAAVRGPSTFRPEDAPVTLDQRLHALADEHVADSDEGRRTVLRRQLARRLLDDPVVYTDTLDAESRAYFVNQRGAMAARLSDATGLVAEQRAEGLALVDEAGSLTDVAMPAEGTDAHVTLLVAEFLATVYRQRQTDAAGATQPFSGMIREQDVVDYLRESKPRYGKYWRKSAREPGAERELAEIALDRLEKLQLIVRDAETVYPRPALARFALGEAEVRNFRETRGVQTAAADALVGPT

SEQ ID NO: 40208 - protein, 1392 aa, Bradyrhizobium valentinum
MNDRPASFAALSERPALPIPTRQRWQPLRLGLVELFHYDSEEFWFRDGHLLLRGNNGTGKSKVLSLTLPFLLDAQLKSSRIEPDGDSGKKMSWNLLMGSYDRRIGYAWIEFGRLADDGTPHYLTLGAGLAAVAARPQVDSWFFVLEDSIGAPRINQDIWLTSDQRVVLTRERLRDALHGRGQVFDTAVSYRRAVDERLFHLGTRRYDALMDTLIQLRQPQLSKKPDETALSDALTEALPPLAPELLGDVAEALGQLEEDRRQLEEYQALARAVERFDQRYRIYAGTQSRRQARALRQAQTEFDSASRARGDAQARLERAETAEALARIIHDDAELALKREQARLDILRADPTMQDANRLESAERDALARQRALQVATAAVDEVRRRLKRSTEETGHGVQRMTQAERVMTTLRQNNATHAEAAGIVGLHAGSPLATLAAADLVALTPQAFDNACADLRNLIVDRREQIALLRRRHTEVTEAEALHTQRQNTRDERQGTVEATAKRREQADREVDHEGHNLIQAWERYFASLKQLRVSSDDGRAALTALADWVVGLDGDNPARHYLQTEQQHASLRLAQRRVALDGQRQTLETELNTLEDERNRLEAGVDATPPNPHTRGADARDAREGAPLWQLVDFREEVTAAQRAGLEAALEAAGLLDAWVSPDGHLQAGDGVELLHDTQVLQRQPHALSLAGWLHADTPTDIAVPAALVERLLSGIACTDDDPADSEAWVAPDGRFRLAALVGAWAKPAAVYIGHAARAAARKQRLADVASRLTQIADELVAVQAMDAQLTRDQDQAADEWRLAPSEEELRNAHLAAAASAREAQTARQQLSEADLQYLEAAQALQTVRQRLAADATDLRLPALSAELPAVEMALNHYHDAQLRLAQAVHEVRLALPELQRQRNRENETRDDLKKQDEQFAAARIEAEEAAVRFEVLRGSVGARVEELQRRLADASTAVKASNSALTIARDVLSKSGEARAVAHEQAATASTLFGQRSNARAEAIAKFQHFAATGLLAAALPQANLPDLGGPWTIDPALTLARRAEQALFELKDDDDAWTRLQRQIGEDLTELQRALSALGHQAHAEQSDWGLIVRVVYQNRPEPPDRLAARLAEEIAQRSELLTANERAVLENHLQAEIASEVQRLLQAAETQRDAINKELHHRPTSTGVRYRLLWQPLAEEEGAPVGLEAARKRLLNTSADLWSSDDRRVVGAMLQQRIAAERERADSGAGKDVGSSLIEQLARALDYRRWHRFRVERWQDGHWRKLSGPASSGERALGLTVPLFAAVASFYSQGSYALAPRLMLLDEAFAGIDDTARAHCMGLIREFDLDFVITSEREWACYAELPGVAICQLQRREGIDAVFVSRWSWDGRAKTRQDDPDRRFAPT

SEQ ID NO: 40209 - protein, 426 aa, Bradyrhizobium valentinum
MISSTDPRLQRLLGGDRYALLRKRLRQRFERASLGSTVENFRIGKLTAEEHAALASLLGRPLRYTNSLQVDVRLVDTAFQNAGIAASLRDALEKLDGPISNLATTRLALQTMWSDVLGGCTHRELIGLLQAPAGIGLLKRLARQSPPAALQLCRRVEAVLQRLPASGITRSQLAADVLGDAHALDIGQPTATLALTVWRQVIARTDYNNDDVDSEPTGDGELEPGGGAERDRDVWAKAGVLVNELARPVLFLNLPMRDAGNYSQSQGEPVYASLRSLLRSPPSWDVADRKVYVCENPNLVAIAADHWGSDCAPLVCTDGMPAAAQRCLLSQLAKARAQLFYHGDFDWPGVRIGNHVMREHGAQPWRFGASDYESAVEQTSCLGQALTGKAAPALWDERLMTAMQQHRLSIAEEALAASLLEDLRAT

SEQ ID NO: 40210 - protein, 502 aa, Bradyrhizobium valentinum; identical to SEQ ID NO: 40206

SEQ ID NO: 40211 - protein, 434 aa, Bradyrhizobium valentinum
MAASVGRDSRSIGQQQRRFQNEEFRSAVRALLMTPLMSPDHDDFPAIRRQADALRDWFGRETGWALRVEQEGARLYKRPADLASTMRGLPFYDRRRYVLLCLACAVLERADPQITLRLLGERLLQFAAEPTLVASGFIFTLGAPHERRELVAVCRTLLDLGVLQRVAGDEDAFVHTGGDQADALYDVQRRALAGMLAAVRGPSTFRPEDAPVTLDQRLHALADEHVADSDEGRRTVLRRQLARRLLDDPVVYTDTLDAESRAYFVNQRGAMAARLSDATGLVAEQRAEGLALVDEAGSLTDVAMPAEGTDAHVTLLVAEFLATVYRQRQTDAAGATQPFSGMIREQDVVDYLRESKPRYGKYWRKSAREPGAERELAEIALDRLEKLQLIVRDAETVYPRPALARFALGEAEVRNVRETRGVQTAAADALVGPT

SEQ ID NO: 40212 - protein, 1392 aa, Bradyrhizobium valentinum
MNDRPASFAALSERPALPIPARQRWQPLRLGLVELFHYDSEEFWFRDGHLLLRGNNGTGKSKVLSLTLPFLLDAQLKSSRIEPDGDSGKKMSWNLLMGSYDRRIGYAWIEFGRLADDGTPHYLTLGAGLAAVAARPQVDSWFFVLEDSIGAPRINQDIWLTSDQRVVLTRERLRDALHGRGQVFDTAASYRRAVDERLFHLGTRRYDALMDTLIQLRQPQLSKKPDETALSDALTEALPPLAPELLGDVAEALGQLEEDRRQLEEYQALARAVERFDQRYRIYAGTQSRRQARALRQAQTEFDSASRARGDAQARLERAETAEALARIIHDDAELALKREQARLDILRADPTMQDANRLESAERDALARQRALQVATAAVDEVRRRLKRSTEETGHGVQRMTQAERVMTKLRQNSATHAEAAGIVGLHAGSPLATLAAADLVALTPQAFDNACADLRTLIVDRREQIALLRRRHTEVTEAEALHTQRQNTRDERQGTVEATAKRREQADTEVDHEGHNLIQAWERYFASLKQLRVSSDDGRAALTALADWVVGLDGDNPARHCLQTEQQHASLRLAQRRVALDGQRQTLETELNNLEDERNRLEAGVDATPPNPHTRGADARDAREGAPLWQLVDFREEVTAAQRAGLEAALEAAGLLDAWVSPDGHLQAGDGVELLHDTQVLQRQPHALSLAGWLHADTPTDIAVPAALVERLLSGIACTDDDPADIEAWVAPDGRFRLAALVGAWAKPAAVYIGHAARAAARKQRLADVVGRLTLIADELIAVQAMDAQLTRDQDRAADEWRLAPSEEELRNAHLAAAASAREAQTARQQLSEADLQYLEAAQALQTVRQRLAADATDLRLPALSAELPAVEMALNHYHDAQLRLAQAVHEVRLALPELQRQRNRENETRDDLKKQDEQFAAARIEAEEAAVRFEVLRGSVGARVEELQRRLADASTAVKASNSALTIARDVLSKSGEARAVAHEQAATASTLFGQRSNARAEAIAKFQHFAATGLLAAALPQANLPDLGGPWTIDPALTLARRAEQALFELKDDDDAWTRLQRQIGEDLTELQRALSALGHQAHAEQSDWGLIVRVVYQNRPEPPDRLAARLAEEIAQRSELLTANERAVLENHLQAEIASEVQRLLQAAETQRDAINKELHHRPTSTGVRYRLLWQPLAEEEGAPVGLEAARKRLLNTSADLWSSDDRRVVGAMLQQRIAAERERADSGAGKDVGSSLIEQLARALDYRRWHRFRVERWQDGHWRKLSGPASSGERALGLTVPLFAAVASFYSQGSYALAPRLMLLDEAFAGIDDTARAHCMGLIREFDLDFVITSEREWACYAELPGVAICQLQRREGIDAVFVSRWSWDGRAKTRRDDPDRRFAPT

SEQ ID NO: 40213 - protein, 426 aa, Bradyrhizobium valentinum
MISSTDPRLQRLLGGDRYALLRKRLRQRFERASLGSTVENFRIGKLTAEEHAALASLLGRPLRYTKSLQVDVRLVDTAFQNAGIAASLRDALEKLDGPISNLATTRLALQTMWSDVLGGCTHRELIGLLQAPAGIGLLKRLARQSPPAALQLCRRVEAVLQRLPASGITRSQLAADVLGDAHALDIGQPTATLALTVWRQVIARTDYNNDDVDSEPTGDGELEPGGGAERDRDVWAKAGVLVNELARPVLFLNLPMRDAGNYSQSQGEPVYASLRSLLRSPPSWDVADRKVYVCENPNLVAIAADHWGSDCAPLVCTDGMPAAAQRCLLSQLAKARAQLFYHGDFDWPGVRIGNHVMREHGAQPWRFGASDYESAVEQTSCLGQALTGKAAPALWDERLMTAMQQHRLSIAEEALAASLLEDLRAT

SEQ ID NO: 40214 - protein, 478 aa, Bradyrhizobium lablabi
MDVCAAAERQLLLYVRPSEILAQAKWLSEPPTASELDAILDKLTEWGNLDCQADNSRVTSLSGFYRRRMLYRLSKGGVSVEMALSAFAKEMQRRGELQTVALEDIGKGLLTLIHLGRSNDPDVAKIYETLNGLMTVFNNMAETARAFMAGVLRGVDLQDGDVDAVLNYKQRLIEYIRQFVGDLVSRSGAISEDINALQLRIDAMLQSVARRQARNAPPGEEQAAYEAELKMWDERWQGLRMWFVGGSNGERSQSEQLRSRARAAIPQLLAAIIAINERRSGRSDRSADFKSLAHWFLDCDGDEDAHRLARAAFALNPARHYAENTAAADVIGVIPWHKAPSIVVPLRLRETGYSMPRGRLPHVHDRSAGRKKLEAQVGEEHAQIEAARQKFATGCPLLLSELWRLNSHEFRFFLDLLGEAIATKAAGDDGVTEIQSNDGLYLIRLEPLDADTEAEIVTEDGLFCGRDHRITITPTDAA

SEQ ID NO: 40215 - protein, 413 aa, Bradyrhizobium lablabi
MLRQQETQEHAERREAVRALLMRPLLTPTTAEAREALRLVRRHSAYLREWFAREAGWPLRVERDYARLWKRPSDTSDPTRGWASFNRRRYAIFCLVCAVLARSDPQITLSALGDQILSLAKDTDLLSRGFILDMADIHDRRNLASACVALGELGVLNAIDGDAESFVKSGQSEDRSRDVLYDVNRGPLASILACVRGPSTWSENDAPKTIIDRISAITADIQPETDEGRRDVSRRRISRRLLDDPVVYDDTVDEADMQYFINQRGAMANRLALGTGLVVELRSEGLALCDPDGNCSDVAMPADGTDAHVTLLVADHLAHAESGVPDRLQIERFVAQSAKRYGRYWRRSAQGEAGARELTAIAIYRLSQLKLISIEGDSIEVLPALSRYKLGEPDIKHRDDDDRLPDVSEEADE

SEQ ID NO: 40216 - protein, 1373 aa, Bradyrhizobium lablabi
MNSVLPFNPQSAGPVLPLPGKKRWQPLRTGVVEIFFYDVEEFWFIDGHIVYRGNNGAGKSKLLALTLPFLFDANLSPFRVEPDGDRTKKMAWNLLMGRHKRRVGYVWVEFGRVDEEGNNQFSCGLEAVEDRANVESWFFIIDGSRVGQDCSFITPERAVLRRTQLKDELADKGGHFFDRADDYRRAVDQRLFQLGEERYRILVDTLIQLRHPQLTKTPDETRLSNALTAALPPVAAEMIDTIAEAMSRLEEDRSQLKSYELAHAAIGKFERTYRRYAGARIRTFAREVRAARTKFEEASAQVNKAAAQLASALHESTSAETANINAKREAEAADAAYKGILQHPDGLKAADLATKRILAEEAEGRLTVSEKRSATAASDLETESERQQAARADLDRAMETLAVNRRKALDLARSVGMVAQFEHAKSYSAWPSELVRDGQTTLQSERGSLLTAIRGRRSSIDAVIELLREVDNKISMLANAERDENAGRSLRDEAGKTLAAAENALNDEIEALSAAWRRHLGGCGHLMVIATEDVVGALVEWAHSLEGENPAARELIAKCRLAYKRLTEALAELKHQEAAVRAELDAVAKQIADLQTGSFERPAIPHTRKADRDGRPGQALWQAVDFVSEADDDVRAGLEAALEASGLLDAWILPDGRMFIGETEHDVSLVSRPLVTGRTLADWLVHCGESSVQDAVETFLCAVSCTDTDDGAEMWVSPAGQFRLGALSGTWEKSRATYVGHSARERARLKRIEELEATAAGLGEQLAGLETAITSNAATTEAIEQMERTCPPDTNLRKSHDTVRSATNDLHRATENVATRANDTAVARQALNACRKSAEQAALDTALPCDKRALEQARITCDILSEAHLVVVEHCSNSIRAEQSLQDTNERVETARSRHHAATEDVNVAAISATSARAIYDALKESVGATSEQWERRLIDGQKRLEDAKADVDSTDDRRLSAVAVHTQAVGAHETATQALAMRVEERQRAASNLQTLAATGLMAAGAPNVPFPDTSRTWTVDETRGLAADLNQALSDIRDNEWDGLQSKIYGEYVDLQNALAQLGYVPDSKNVDGFGLVVTIAVQNKSGLSPAEVLAQVDTEITQRRTLLTESETKILEDHLQSEMSVQIRNLIQDAEQYVERVNAEIEKRPTSTGTYFRLRWIPLTEAQGAPADLEDARKRLLKTNADLWTENDRQAIGAMLQRRIEEERLKAEESGGSSLREQLSAALDYRQWHRFVVERNAMGRWISISQPASGGERALGLTIPMFAAVASFYGDEHSTRPRLVLLDEAYAGIDDGVRAHCMGLIHEFDLDFVITSEREWACYKTLPGVAICQLQRHDKFDAIHVSRWRWNGKTRSRMEEPARLMLNRSA

SEQ ID NO: 40217 - protein, 410 aa, Bradyrhizobium lablabi
MTSAIDERLVRLLGGAELSDLRARLRRRYELGPADGKLPSIQVGKLNEAERAALASLVGRKGGVAASISIDVSAVDRALSDAGIAPSLRTALELLDGPIIHRETELNRIRDNWAAVLAGCSHVDLIAYLASPLNFGVLKRLSGNQPDSASLICRQTEDILRRLPAAGVPRAQIAAEHLGDAHGLDSARPVATLTLAVLRSRSSTDTGDDRDTWAAVGILVNELARPALFLNVPCSGLPVSPGEPQYASLRLLARRPPEWTVASKSILVCENPNLVGILADQLGTACPPVVCVDGHLGAAQRTILKQLKESGADLRYHGDYDWPGITIANYVIAKYGAVPWHFSAVDYVAAAKSAPQLRIPLSGRPAIASWDADLTAAMIKTGIKIEEEAIAERIIDLLGEEWLRWNKRAY

SEQ ID NO: 40218 - protein, 493 aa, Caloramator mitchellensis
MEITNKLLKQIDEVRYLTAENASRYRAIMRYFYLQYQKMKQWIYKEEIYEELTNHSEFSNYTMEQLKQDLDTLVQWKNLIPIQDTSKVSTLEEYKNKQFRYQISQYSVEIERLTITLENLHVETASLEPSLLEKIKIELQKFKTMINQDEKSADAWWQDLNNYFKRLTQNSTDYINTFNTLRAEEMMKTREFLIYKDKFIDYLRDFIKGLQQNAIAIESILQSIDSTTEKMVLDKIIQYESSIPRFEFDTSSEQIKDNVYGKWQNLKNWFLDYENHESEAAKLFDTTNDIIRKITRYASQISESRNSAANRKEEYKKLAKMFLECKDINEAHKLSSLCFGIFNTKHIKITTPRKTESINSSIYDEEPSIITLKPRIKNYKEKSLKSPIKNNSQRKIIMLEKIMKIREEEQKIINSYIADGKIEFANLPTISPHVRGILLRWLSKGINSNEKISKTETGRKYRILEPQNKNHLCTVNCEDGTFTMPPYVILFED

SEQ ID NO: 40219 - protein, 388 aa, Caloramator mitchellensis
MKELELLLENYWISKDEDKELYYKIKDHIHEFKSFITEKLGYQIIINPYLIKLEKLPGKAEEWMGISTFHSPIEYAFLCLLLMFLEDKGKDEQFVLSEITDFIQGNFEGDEKVDWTLYRHRRSLIKVMRFATDIGMIKVDDGDEQSFAQDATSEVLYESTGLSRYFVRNFTTNILNYKSYKDLENEEQLDLDRDRGIIRRHRVYRRLIMSPIVYNEGTDDPDYDYIKKQKSSLENDLEKYLGWELHVHRNGAMAVLSQNQNYKDVFPENKSISDIVLQLNKVIKSMISANQLKPDKNDTCQVSLPYFQSLIQKLKLQNSVGWSKEYREMQIDKLTDEIINYMSGFNMIEILPDKKEIKILPLCGKIVGVYPDDFYTDIQKEVAMDESE

SEQ ID NO: 40220 - protein, 1356 aa, Caloramator mitchellensis
MNQNRWIIERAGLANFWYYDEEEFTFSDGRLLLRGSNGSGKSVTMQSFIPLLLDGNKSPERLDPFGSKARRLENYLLGDDEDGDDERTGYLYMEFKKKDTGNYLTIGMGFKAQRGKPIQSWGFSITDGRRIGHNFYLYKNIGEKIPLTKKELENRISTGGKVVETQGDYMKMVNDLLFGFSDIDEYDELIKLLVQLRSPKLSKDFRPTVIYEIMENSLQPLSEDDLRPMSEAIENMDNIKSRLDELKESKKAADRIKDAYDKYNKFILIDKAKSFILSNNELEKLIKDKKELEQKRDYAKQEFQAAEKKIEEYSMLIKSAEDKKRQLEVHDSLKIKEKIHSIEDLISNYKKEKHLKQNQLDLKKSRERKLYSEIKELSDKHDILIKKLDAIVEEMDEYAVDFAFDEQEFLKDEIKANADKNYDFNFVNDKFKKHYENIENARELLKELDRINKEYDKILKELESKKQERITKEKRVEDSKLLLIETKEELNERIYAWKNSNKEFIPSQDVLISCTRTVNQFNQKSSFDDIIKIIREEYNHFEGELIKERANLQFEKQQEENKLNEIKSEIAEWRNKKDPEPERDERVIRNRQRLEKEGIPFIPLYKSVDFKDIPQEIMGRVEEALNDMGLLDALIVPSKFKDKIFQMDKDMADKYIFPTPQILMHDISEFLKPDKIDVNGITEKDITDVIQSILIDENNSTYINEKGEYQIGILKGKTSSSCSPKFIGSSARKRYREEKINELETIKRNIEEKIIEKEEQIQKINQRIATLKSELNKFPKGDDLLTAIKQLQEAEYELERIIKDVELKEKEERTIYEKLKHVQQSVYELTHKINLKADIEIYEEAIASAKKYRDLLHSLEKLHIDIMHNNEQANSKIYEREEIEQDVQNLIDDITSLDRKLRENEINLSNLFEQLKLSNIDEIEKEIDECLNILKTYPVEKEKEIDKRARNHDLYTRAIEELGSINKKINEKGKIVDIFKQSFIEEYKLGFIEEAKEDEPIKIAHRLVREIKIDEKQKDDYISNLYQKFQENNQHLREYIVKIDSLFDREIEADDEEIKAAFARAKRHYLTGKVRGKDVDFYALIDFIKEGIEENEKLLKESDRQLFEDILVNNISKKIRAKIYHSEQWVKKMNELMEKMDTSSGLSFSLRWTSKKAEGENQLDTKELVDLLKQEGSIMKESDLNKLSEHFRSKIADARRIQEDSGKSVTFHSIMKEILDYRKWFEFKLYFQRMGQNKKELTNNAFYQFSGGEKAMAMYVPLFSAVYARYLGARGDCPRIISLDEAFAGVDEKNIRDMFRLLRDLNLDFVINSQILWGDYDTVPSLAICELLRPENADFVTVIRYHWNGKTKELVS

SEQ ID NO: 40221 - protein, 435 aa, Caloramator mitchellensis
MDKTKECVNYFKSTKAYKRMFEAIREKYRSLGNLGGTIELKNLSPDEQEALSGLLKRDYYSKKSASVKIEKIINALENTKFAGIDFEKVLMGYFGEDLISKKEEKRISDEMREKFFGEILKKYEASKAYNWLESSLKNKDNSYKFIIQKYEKNKAELESMLQLTMNAINSLSFDVNNIERLAIFSSRISKNPHTFDTDSECGKLLLYAISFLLGIDFPKNAEERAEALYRAGIIDDEVSNFTMISGLLGYKNGQVHPGWEGFSKLKEPVQISLWNLSRVDSVSANNNIVYVFENPTVFSEVLYKTSEYNPSLICTYGQIRLASFVLLDKLCDSVEVIYYSGDFDPEGLLIADKLIERYGEKIKLWHFESSDYLKIISNKKIDDTRLKKLEKIKNPKLKQLGDLLKQNAFAAYQELLIDEYVADIIKYHGDSSFEI

SEQ ID NO: 40222 - protein, 511 aa, Lysobacter enzymogenes
MQEALIAGSADLFRHVTADKAEFYRAIMAVFAAAKRQYRLQLRPEEVLAEADWPGAPPAREEVAAALVRLSEWGNLESQPDMARKQTLADFYRAHSIYRLSRGGEAAEAGLETFASSLRHRAELQTVALEDINSRLQALRQLLDSAPSSEQIDVPKAHQILRDLVRVFEDMTSNAQAFMAKVARGLELRQADATDLVAYKRELIDYLERFMSDLIRRSDTIAALLHGLSARIDEVLHPVAQREARDAAPGDAEGRAGEAGRRLDAWRERWKGLCGWFLNSGNELPQAELLRARARAAIPQLLGAIAAVNERRSGRSDRSADFRVLAQWFAACGSDDDAHRLARVAFALHPARHFSLDLAEDDVPANTSWLDAPALTINPRLREYGEAAPRGPLARIRDRSRDRELMARQLAEESRQVEAARQRLATGRPTRLSELGELDPHAFGLFLALLGEALAAQDDPEQPVERQTGDGLLSVRMEPLAADSRARIRTRAGVFSGRDHLLTIRPTRGAA

SEQ ID NO: 40223 - protein, 422 aa, Lysobacter enzymogenes
MSPRPPHRRSRSVGEWQQTQQQDEFRRALRALLMWPLMASAHPEFSAVRRQAERLREWFAREAGWPLQVDREGARLYKRPANVSDPSRGLPGYDRRRYVLLCLACAVLERADPQITLRLIGERVVQQAGDHALAEQGFAFTLGTPGERRELVAVCRTLLDHGVLERVAGEEENFVREGVGQQADALYDVHRRLLAGLLAAVRGPSTWSAEDAPIGLEARLHALLAGFEVDSEQGRRDAMRHRLTRRLLDDPVLYLDSLDEETYGYFVNQRGVLAARLCDATGLVAEQRAEGLALVDESGQLTDVAMPAEGTEAHVTLLVAEYLATRLRRARVPIHVAEAEIASFLREAAARYGKFWRKSARAPGAERELTDIAVERLCRLGLLTRVDGAVLPLPAIARFALGRTEVRDAAGTASLLPLAADP

SEQ ID NO: 40224 - protein, 1381 aa, Lysobacter enzymogenes
MTDHLQFLESSRPALPEPRRERWQPLRLGLIELFHYDSEEFWFHDGHLLLRGNNGSGKSKVLSLTLPLLFDAHLRPSRVEPDGDAGKKMAWNLLMGGRHDRRIGYSWIEFGRREPDGRVRYLTLGVGLLAVAGRAQVESWFFLLEGGDDSPDPRIGQDFWLTTADHHVLTRERLREALAGRGLMFEHNVPGYRRAVDERLFHLGTHRYAALMNTLIQLRQPQLSKKPDEKGLSNALSESLPPLPADLLGDIAEALNQLEEDRTQLEDIRRLEQAVTRFEQRYRIYAGMLARRQARELRQAQTGFDNASEARNRAQGECEATRSKHEAAQADAEAARQAWLAARERLETLQSDPANQDANRLARAETDADQRKGEAAAAGKRGVDARASLLRESQQSQQRADSAARTRRELEARRAWAFDMAVAVGLDGEFVGHALFAAQVDALATDPSVSNAGLEAAIQRRRGEIASLRRRHAEVERRHAVLLERQNATQEARNTVADVVARREQADLEAELAGESLVQAWTAYCDDLRHLRFDADAPLQALAEWVARPEGENPARSALDGARRMATRLQAGREADLNAQCQAQRLRRSALDAERERLLAGEIASPPAPQTRAADVRADRRGAPLWQAVDFQAQLGAEERAGLEAALEACGLLDAWVSPRGELIGSDGEVLLDSHWQRRAAVAGGNLAEALSPTPSDDSGLAPEAVAGLLAGIAYGPLDRSDAEGWVSPDGRFRLGALAGAWRKPAATYIGHAARERARRERIEEIAAELAELDVADAASARQLQALEDERDEAEREWREAPSGQPLQEAIAAAMLAAGEAERAYARLQRAENHSREAEALWLTSREELHRTATDLRLPAESERLTELEQALHDCERALNALVQAARDWRSAWPEHLLQQRREVDARQAVEQAEQALIEAEEQATQASAHLQALRDSIGQKVEELRAQLSAAREEAQRGEEAWDRRRNDASAADKEHAVASAHAEQAAQVLAERSAARTAAVERLHGFAVSGLLVSALPDQELPAQWSIDPALSLARRIEQALSRIDDNDSAWGRVQKGISEDLGELQRGLGALGHQAISEPSDFGLTVSIQYHNRAERPETLARLLAEDIAQRSELLSAKEREVLENHLQAEIAAQIQRLMRDAGERVNAINAELHKRPTTTGVRYRLQWEPLSVEEGAPVGLERARQRLLNTSADLWSPEERRTVGEMLQQQIDAERARAEADAIGGSLLDQLARALDYRHWHRFRIQRLQDGQWRKLSGPASSGERALGLTVPLFAAIASFYEHGGSQLAPRLMLLDEAFAGIDDSARAHCMGLVREFDLDFVITSEREWACYAELPGVAICQLQRREGVDAVFVSRWFWDGNARRIEDDPDRRFPPT

SEQ ID NO: 40225 - protein, 433 aa, Lysobacter enzymogenes
MSTPDARLRRLLGGPELAVVRQRLRRQFERIESDTPLVSVRLDQLDPDAHRALCQLSGKPSRLSRSMTLNIPDLDARLRSAGLADSLRDALEHLDGPIVSLAGSRRELQSRWAAVAKAPGLGPRLRAWLDESPAATGLLKRLGRDPERAEALLVAADAVLERLPATGMPRSQLAAETLGDAHALDSGKSVAALVQAGWRWHEGAAAGQTRAESEQAWVGRTAGEDADADAVIERPRDVWARAGVAVSELARPVLFLNLPVPYGGRCAWIAGEPGYLSLRQLLRDRPAWPVAGRSIHVCENPDIVAVAADRLGATCAPLVCTDGMPAAAQRILLGQLVSAGARLWYHGDYDWPGIGIGNFVIRTWRAAPWRFSAVDYRVAVAQAPSRARNLVGGMVEAQWDAELTAAMSERGLAIAEEAVVGQLLDDLRLDIDR

SEQ ID NO: 40226 - protein, 520 aa, Streptomyces venezuelae
MPHLATFGDPGADDWIVDEWARTGPEAQDPTRALGYTVSRVRQEHAAIMSVLDQAVDHLTPAEITMELAARGVTLHPGVVAQRLKALQETFLAVSGQPDNEIERWQELNGARWRYTATACGRQVQRLWTVLSAEGMVQREVALDGLARIREALTALQGEDVAPQEVAKWAGQVFVEHDQLDASLVGQTDMLARLADRFDLGAEGTGELKQLIVEYATHVVVHLDREVAAVHGLLMRLRPRFTLLAAGCGAQSRAGALVARGVLAPSRGTQSGDWEQLLSWFAPASGRAWRFGQQLVRAIPMMHANLQRQQSVVGPGTLRAKALSLAAACRDGERGEAVFRASVADRPWAKLHTCAEGEGSEVVSWHEGPRVPALAMLRASGQSSPRGPVTPRRERGEAAREVARERERVEAERRAAAAEVLAGVFPLTDRACRLALRAVMAAARGAEAGGARVGHWEGVSCTLTAAQGVVGRVEGVAWSVLVPGRQVAFHPQAAGGPGDGTDAAVRGGQAQAPVRVEVAA

SEQ ID NO: 40227 - protein, 325 aa, Streptomyces venezuelae
MWFWLTVGVLESLPGRVRLGQVTAAARTAAAEIELPVTQSRTELSALAAGLRQLCDYGVLEELEGRVEALMDGGEDPPVLLKVHHTRLLHVLPRGVQVDEWGQWAVDPGEDPAGWLAGLARPADAGVRVCAMLADQAVVHACDLDEDELRWLSDQGPTDGAALARSFGLALEHRVEGAAWVMPQETYDERVAGRFRFPGRSRSHAGTVPHAALLLIDSFFFEGERGGAGAPGPGWCGMPKSRVVGRLGELAKRHAWWSKDLRGDLPRLAQDVRGVLEPEADLLRVTGGFEEWWWLSPAAARWTVLSEQAPVVPAQCGEVGKGVER

SEQ ID NO: 40228 - protein, 1397 aa, Streptomyces venezuelae
MSAVAEIERWWRRWHLIGAGVDNVWYYTREWLPCPSGRWLARGPNGTGKTTLLEGLCPFLLNPVHMHLSSASGRATSLVSLMKGGSSGKRRFGCMWLSFGPPGDPASGDADAGEQHYGLRLEYAASSNSVETVPFRLPVVPGHDGQDLSIMKQDDFCAWVAAQGGEVFASTDAYVADLAQRIFGCGPGTLKRIARRIKKVRNPGLLAGLSPADAAAELRMALPTVSADTVRLTQEALAAAEATRRRYERDAKTAQVLEDLSAAWSYAAARTGTQAVDAALACAGVLARNRAEALQAHTDAEARGLELDDLRVLIRERAAAELRAGQHAGALARDAASSDVAHAHTKVGQARKGHEKDCELLTAHTRAASRCAGDVQDAADAVTGLMEKVALSCRTAQVPVPVAVTAAVSVRRSEPSPLRIGERDFDQAPGVDAVVDEEAVGQAAEQLEQARARLERRGEAAGMTVVAYQRVATAQEESVQARSLADAAAETAREAVARHQQTLEHAQACVADLAGGVQAWTQTVREQFRTPLMDLGGVAAQTREWCEGQECSQVIHDAGKLARKVTRSAARSGERARSRADHHTGRAEQARQWAAEAAQRARRLESGELLPLPGPAWHREVDEKRAFACAVEWALPQTGASAVGDVAEAVMAAAGLLSAEVTEHGANGHGRWLVHPHGPALPEGQSLAAVLRAMPGHPLQEVTTRILQRIAYLPSAVGPEADHVGAGLVVGADGTFRTGVTTGRLPASAGQVPRASHIGTAVRRAAALRAAAAAQADCDRWQQTALGHAQTAHRLHRFTDTLQELAALFPHDKVAAADRAETTRAEASRAAHTAAVHASEQDRAAQHKESSHRAALGQWRASAVALGLPDTIAAVKQEAEDAGARAAAVSTAAGLVEDARDLLMKVTQAAGQAAESGAQAQQAAAAAQASHAALLAAHADLEACRQRSGMDEIALAQAAEDASAAHQTAQEQLEDARSRMEGVSGRAADAARAAQEADRSLEQAGPAARESLARVIGLLAFDALHELLGRPPQDPGDEDAGAWLADLNKRLAAVPAASVPLEECAMAVRLHLAGEDDDWQLTHGQAPGELPVHQLTLTGYKAMSPPTAAREATARLHAAQSAYNAAEDQALQTFVLGRIPTAISNAWVDLHDWVDDINGQMKLARASSGLLVQLRVRLAPDLTPARARIHHLTCEIGDANRTSEQQHSVGQELLAVMRHGEEGGSTDRATRLAEAIDIRNWVTVEYVVVRGDGGAEEVWGRQKTTVSGGESRLVVLAPMLAALAAEYRDLPAHALRLCALDEVPGEIDQEGRDGIAAYTASLDLDLMCTSHHWDGSPGAWDGIDIHDLAKSSTGIIIAEPMHLYTHQMLAATSRLPAQNAGPEPESAGPEAAHEATQ

SEQ ID NO: 40229 - protein, 296 aa, Streptomyces venezuelae
MSTAGPDCPQKWCTGGACDGARLDSLLTEEARWLWEQLAARADRSGEPSMTGGTAVITAPAASTQRAAVLGLLGSRPLAPGERRRIRLEELTLRLRQHGERLTPGAVAAHAAGRALGSTAAERARQIARTTGLRKLRARLAGALPKNARLRPSEEAWQELHRTGRVARVLQHPQPEQLLKTAAEVLRLLPPQGRVDRRLLAFKAAGDPHGLDAGTDLAGLVLAEAAAAGLTTSGMPPRTAWGALGVDLDRLGGGLLSLGVHPDGWLVPARFPLPLPPATLADVSWPAPPHEAPGCS

SEQ ID NO: 40230 - protein, 520 aa, Streptomyces venezuelae; identical to SEQ ID NO: 40226

SEQ ID NO: 40231 - protein, 325 aa, Streptomyces venezuelae; identical to SEQ ID NO: 40227

SEQ ID NO: 40232 - protein, 1397 aa, Streptomyces venezuelae; identical to SEQ ID NO: 40228

SEQ ID NO: 40233 - protein, 434 aa, Streptomyces venezuelae; identical to SEQ ID NO: 40131

SEQ ID NO: 40234 - protein, 515 aa, Streptomyces hygroscopicus subsp. limoneus
MSDVFDASEPPASEPIDEGAFGIDAFSVDDRLRLFHFAAAEKRHEYLWLLRAFDRGRANYQVLLHASDVVGLLERLAVDHPDAGVVGGAAGVQPLLDALAEWQVLDRSYDGTRAANLAEYRNRHYVYQFSQAGYRAYRAVEDVLGASLEDAQLSRLVFPDILGDLRALAGANVAGDGEEVYRKLGRLDSVLNEMAQRAARFYLMLGDLARTNDTRPEVFLAHKDTLLAHMREFTAELGRYAPLLAEAVEKAAATGVERMIEYAAEADERLFRSPAERLTDWRHRWDGIVHWFAEREHSESERLQDATVTAIRSVLALLRRVTEARRGGVSRESQLRHLAQWFTSCESDEDAHALFQAVFGLGAPRHIAVPYADPELIPGRTSWWEAEPVELARTLVQSGRTPALHGPGRIERDDDRRALLRAQQLKEQAERRGAATSLASDGVYGRTLDESETSALLALLDVALAARVPASRRVTAASGSAHGVRLTLTPAEGSTTVDTARGRLHLDGLRLEVTV

SEQ ID NO: 40235 - protein, 471 aa, Streptomyces hygroscopicus subsp. limoneus
MSRVAEGVSPLELADYQKAVRLVLRHPLITSGYPDKAALATVRRWADQLRTDLMEALGYRLVTTADTARLQRAQDGLDATRPALTRAGRPFDRRRYAYLVLTLAALGRHGAQVALGELADAVAADAVRIDGLGLDTARKPDRDAFVDAVTWLTERGALTLADGSATAWAGDPERAEALYDIDREILLAVHHPTRVLQHLTSVTALLDSSGALGLSAGRAAQRRDQARRARRLVLENPVAYYADADTELLGQLRAPALAEDLERLTGLTVERRAEGVALIDTSGRLSDLRFPGGGTVAQAALLLAARISAAVQRSGRHALELLPAPTAAERLTVRARRIDTALPSRGLVTELAEPDEASAYGASGDEGQEPTETRYPFVTDSWLRGRLKEITAEYGAGFAADLRGDPDRLLDQALGLLAAMSLIARVDGGALALPLIARYRGVTARVKTRTAARPLSRTTLFTDDIAKDPTP

SEQ ID NO: 40236 - protein, 1363 aa, Streptomyces hygroscopicus subsp. limoneus
MSAPAPTPSARFVPTRAGIINLWDYRDEEFSFAGGWLVLRGPNGSGKTKALEVLFPFVLDGRIDPKRLNPFAAEDRTMKSNLLFRGQDSALGYVWTEFTHRDTGQAVTCGIGLHAQRHRDTPARWHFVAEGRVGEDFSLLTHDDRPMTKKQLAAELGRELITSAADYRAAVDQRLFGLGPERYEQLLTLILTLRRPQLAKNLDPAKLSDTLTAGLRPLDDDLIAEAARSFDDMESVQRTLEGLAAADDATRAFLASYSTYLRVHARAAADRLTARRTETAERAAALNTATTGLAVAREQQAAAETTAESADASLAAQRARLDQLRSSAAYQAVEQLADLERLVRTCEQTARQATADRERRSAATGRARAEAEHAARLAAELDAAVSRDAAAVADHAHTAGLSWTPADAEPARLAERSAALAAARHEGVRAVRAAQQAACGAEQARDLARASLDRAQEAVAAAEIVETAAESALESAREQARTALGQWTQAHSELLTEEGAGRLAEALERTGEAEAVTLADAFTEATAPAVQELRDTLASLRARRTDVERRCAETEAERGRIAAERDDAPPPARGRGADRAAGDGVPLWQLVDFEENLTERQRAGLEAALEASGLLDALVTAKDTPVAAGHSEGYLRAGAPVNGPSLADLLSPEVPEAGIAIPTAARITAVLRSVAVTGDLDTGIPQISPDGRYAAGVLVGAHSKEHAEYVGATARARRRAARIAACETVLAELSAQLDEAARAQARTDAALDGYAAARAALPRTSGITEALRELDRAAARLRATRDAADAAQGSYDESVAACSVAERALRRTAAEYAIETERVDAVETATRAFETAVRELAARRREHARQSEAAAAATGRLTVAAEDEEAAADTERAARRRYTEEAAGLEALQDAVGVEAQEVMRQVQETEDGIDALAREAEAARTAQHTAIAGTAAAEARRTAAAEAGAVAAAEEKDTARGLRPYAARELLDILRCPPGLAWPAQEADWTGETLPPAVVAVHEAILSATRDLTPTETSLKQSVTRLTKALDDLQAQLAAAGQDYQPEWDGSDGVILVRVADEEGPLPVAAFAQKIASHRRDQAELLSESEQRILEDALLTRLAQQIHDRTVDARDLIRRMNTDMRKRTMSSGTTVGVSWLLADHLDDEQRAVCGLLDADAARLGPEGLARVRTHFAAQIKTARARHRDQPYRELLAEVLDYRCWRHFAFQLVRPDKTEERLTRARHSRLSGGEQSVSLHLPLFAAAHAMLNSAHPHAPRLLALDEAFAGVDDTGRGELMSLAAQFDLDLFMTGYDLWAAHASVSAAAHYDLAHSAVDHTVSALLLVWDGDRLLADDTGDLTAALGSPGTRRAPTPEETAVVG

SEQ ID NO: 40237 - protein, 428 aa, Streptomyces hygroscopicus subsp. limoneus
MSAEQRESHGYDELRDEGWTRLLAAARRRLERTGGALDGDISLTGPSEAERRTVIGITGRYRPETLKRLAVPLRDLDGYLYDRYGAGLLQTLGRLHGPLRDRPAERADEQARREQALTSARSSRLAGQGWFAAWLDRIAADGTLTRLVRRGDVPLLDAAVRVLEGLTGDGDHRAGSPHRVPGVLPLPVLAEWATGDTKALVPGAPLEQLVLRALAQRAGDGRDVPRERAGRRALWESAGAIADDLASQVLVLNIGAEGDTVVCDWLRDAADFGIPFRLTLHQLATDPVVPAARTIYVCENPAVLRAAAGELQDTGAALVCTEGVPSAACHKLLGDAVRAGSRLHWRADFDWAGLRITANAVARHGAQPWRMTAADYTAALVEGESTPLAGSPAASPWDPGLTLAMEESGSAVMEERLLPALLSDLTRA

SEQ ID NO: 40238 - protein, 489 aa, Enterococcus faecium; identical to SEQ ID NO: 39252

SEQ ID NO: 40239 - protein, 381 aa, Enterococcus faecium; identical to SEQ ID NO: 39171

SEQ ID NO: 40240 - protein, 1385 aa, Enterococcus faecium; identical to SEQ ID NO: 39172

SEQ ID NO: 40241 - protein, 426 aa, Enterococcus faecium; identical to SEQ ID NO: 39255

SEQ ID NO: 40242 - protein, 501 aa, Rhodococcus enclensis; identical to SEQ ID NO: 39142

SEQ ID NO: 40243 - protein, 480 aa, Rhodococcus enclensis
MRAREITPLALDSYQRAARVILSNHLITSTYPDRIALPLLRRWATELRDDLLELFGYRLEVTETTARLFTVSDRLNPSAPARTASERTFDRTRYAYLALCLAALGRAGNQITLSELADHVAADAAQVDGVELSTDRASDRDAFVDAVGWLGVRGAIALADGDANGWASNPEAGEALYDIDRSVVVALFRPPRALQHLHSIRGLLAAETSSASEDDGIPVDAKEIGRRVRRALVERPVVLAGELDQHELIALAQPKTASEVELLTGLVAERRAEGIAMIDPTGRLSDVRFPSTGTIAQVALLLAGEIADRVLDVDAPELPKLPIPHVSDDHLIEQLDAAIPEAGIFEDLADEDDDFVLPAGEPAEPPPPVTYPKIDDDWLADKVTELVDQFGRTFAAQWQADHNGLRKQALGLLQRLRLTHAVDGGVLVLPVLARYRDVVVSVRERDPQIDFAVDNSAPDPVDEFGPEPSPNGELSEVENV

SEQ ID NO: 40244 - protein, 1391 aa, Rhodococcus enclensis
MSNARFRPTRAGIINLWDYRDQEFSFADGRLVLRGPNGSGKTKALEVLFPFVFDGRIEPRRLNPFAGEERTMKSNLLYRGQDSAHSYVWMEFCRGSLEDPESVTVGIGMRATRTNDKVTRWYFVADGRVGVDFSLIGNDDRPLTKKQLAEQLGSDSITDRPLDYRTAIDARMFGLGVQRYDQLINLILTLRRPQLAKNLDPKGLSQALTDGLRPLDDQLVLEAARSFSDMEEVGRALEGLAAADQAAQSFIGVYTKYLRQQSRGEIEQVSTRLAAVTRGVAAMDESSLAQTRSREARAAAEERFNQAEQALENARANVEALQRSSAYEGKQQLDDLAQAVATLKLSTEQQADKSRKAQAALAQRGDEADKAASSVKRAAEALSRVEDELQAAAEDAGIVWTPLPDGSRSDQITAAVRGHAEERDGDVRVVRTALATVEKAATERTRAENSSRRGQELLEASKAAVLEGEAAVELARSQCASGLRAWWTDHSSLFSAVGADTSLFEALDAALAEVGDEDAPALSAVLAEHTEAGTETLRERRREAEAEISASHASIAALKSERKAVSAEHDDAPPAFHARTDNRSELGGAPLWQLVRFADSVEPDVATGIESALQAANLLDGWVCPDEKIPEHVSEQFLTALPVKQRPKGRTLADVLEVEGNADVPDARVQDILASISLVEAPGDSDASVAIGVDGRFWQGVARGRHVKADAEYIGTTARARRREARITEIDAALEELAAAVDTAKALVAQTNEQLSRINSAAKELPKTGSILRALKTVTESAGALRTRSEATETAQRELDAAIADLAAKEKQLRATASQHRTPHIGRELDSLAAAIRHFEKQGELALRCRREHAKEVELERESRDRLDESRANAEEFAEEAAIAEESLLQQVQRLETLRDTLGASAEQVDLDLAKARAKIEECKVEQRAARKAYDAAVLQIGTAEGAYNTAVETLRHTLTETRSDAERLAPYARPDLLELLGVKEHLSWPASSAAWMSPDQLVYRIQNEDRSEDAAHPPVLPEDVDRLYRALEAATSAVRVTDGARKATRTALTSALQDFDAQLAAAGQDYRLQWDAPDGLTVVRVQDDQGYSSIGEFATRIHDARGDQEQLLTESERRILEDALLTGLAQQIHERTVDARELIAQMGTEMRERRMSSGNTIGVHWVLADNLDDSSRAISKLLDRDASALGVDELATLRAHFATQIRTARAAHPERSYPEILSSALDYRQWRVFSFTLISGEGKEDRLTVARHSALSGGEQSVSLHLPLFAAAHVMLDSADPHAPRLLALDEAFAGVDDNGRSELLGLSVQFDLDLFMTGYDLWITYADVPGCAHYDLAHSTAEQAVSAALLVWSNGELLAEHDGTDLARALGSPLRRRVPTPAEGALDYA

SEQ ID NO: 40245 - protein, 511 aa, Blastochloris viridis; identical to SEQ ID NO: 40125

SEQ ID NO: 40246 - protein, 435 aa, Blastochloris viridis; identical to SEQ ID NO: 40126

SEQ ID NO: 40247 - protein, 1392 aa, Blastochloris viridis; identical to SEQ ID NO: 40127

SEQ ID NO: 40248 - protein, 427 aa, Blastochloris viridis; identical to SEQ ID NO: 40128

SEQ ID NO: 40249 - protein, 518 aa, Paenibacillus sp. 32O-W
MEHQGPGLPAQALRGIPELKYVNADNVARYRAIMRFFYQEYKRLKYWLKPEEVYETMKAWNIWPDYTPEMCHHDLEQLVEWQNLTARHDGGRSSTLEEYLKKKMQYSLRPYSIEIERLLENLEKVTGYGGSLESSLFDTIAEKLFAIRRDADRWQPEEALELWNVLYRSFVSLHENAADYIASLQTAKAEEMMVTEAFLVFKEKLTDYLQNFVQALQRSAYKIEGNLLRINDSVRDLFLEKVAEGELAKPRLEEGPDKEEWMKELQRSWANIRRWFIGEGNTPSELTLLERATKDTIARIVRSAIRIQERKRAGLSRKKELEHLARWFASLDSVDDAHRLAAFAFGLFPTRHLQGEDLRDSDRADMSSWEERPMVRMLRSRSRKRGERLQSDPVRDNEERKRREREAYRIRQAEEMRMIEAMLERGRVRISEMGVVTAKERLRLLQWIGRCMTAGKTYTFVTPEGVRIRMSNPRTDKRTILYAEDGELEMADYELHFMLTNTAAALEAAASAEERGDQ

SEQ ID NO: 40250 - protein, 402 aa, Paenibacillus sp. 32O-W
MASGALRRAVRKERNAEQLAERKRACMHALLNRPWVTKEDDPDLYFAIKDHYEELRDWFMDKAGFPLIVTRSMAKLDKTPVKAFPWMGFAEFRETSDYVFFTYGLWYLEGKTELDQFLLSDIVEEVREQMLGAGLEADWRNYYHRLSMARALKKLRSLGVLYNVDGDESFWAQDAERNALYECSPLTRYVLRRFPRDLTECSTLEELTDPIPYADTQDGQSMRRRHRVYRRLLLEPVVTDRQWDEEDLNYVLWQRRAIIDQLGKTFGWVGRRYREGLLFFHPELTGEGELFPTLSAASDLALLAAGEIRKQLAEGGGLYTEDNGTIRLTRAEMETIMYRLQSRHKEYWSKELRESASQELAELCMNHLAEWGLGEWESEASFLVSPVLGRWNADYANSDFDA

SEQ ID NO: 40251 - protein, 1415 aa, Paenibacillus sp. 32O-W
MEQTTVGTTERTAELGTAVAGTASMRRADGAQPPDRWQMNRVGILNFWYYDEEEFQLEDGRLILRGANGSGKSVTMQSFLPLVLDGDKRPHRLDPFGSRDRRIEYYLLGEDDDGKGKTDATGYLWMEFRHGRTGAFKTIGIGLRARRNASQVQFWGFVLEDGRRIGRDFWLYDRNRWLEDQVRIPLDRKELEGKIGSGGMVVQDQKSYQDLVNKQIFGFADIEAFQDLLQLMIQLRSPKLSKDFKPSAIYEILHQALPPLMEEELRPLSEVLEDMDQMADRLDEIRRHRGEMVRLQERYDFYNKHILYTKAGELLENHASYKEVAARVKASETALEQAEREKEAAAAERADIQRRLQDIALERELLEKHEAIGKQREYEAAAKALEDTERQLERSRDKAQKARIRQDRLQREQEEAASSRDASERIQRETLDEMEQMAGEMEFAEHAVYHRYWTPNVPEDDAWKDAWRRDIRRHRERVELALVKAAEEREAASMVKEREIELGEASRVRDEAERERAEREKRLEEAKERLKDAIVVWRDGLKELEFGDEAIRETFGAIRNYGPEQPSLELVRAPLLQRYAVGRDALVERRLGFERRRDELLEQKRRLEEEKRSWEESREPEPPRSEARENFRRGKARVGAPLYALCDFRKQVGEEERARIEEALERAGLLDAWISPDGWLEDCGSGDEEAWIVPKPIEFGYTLADLLVADPPEESGVTAEMVDAVLRSFLWDEGSALQDGADWHGIIAADGSYRLGPLAGRSRVKVRAEYIGRETRKRTRMFEIARLAEAIAAVEAELHEVQLSIDGQREAESRLAEERDRFPDGTELTDGLRALQEAGYRLEAALRHEERALERFKAKSEEWRELQRQLHEMTAGWSRLKREKELAEAASVIREYEGALSELHSLWRQYRDASAAWERLRDELETTALELEDEEAQMDELDERRRDQRAQTETLRKLIEELGLADVARRLEEIRAEQTALVQRNREQERLLDAAKDKAARAEAQLALLSEQAEGRKLGLDRATVQLWTELRRGLVPEWREELREEWPGDERNDAEPFAVQPPEGDAACQLAREIRRRYEPLFAGRNAENITNRLLEQFTAARMMLTEYVLQTTDDETTGRILVHSMRDPHRPLPPQTLLDELAEQEAEQSALLSEKDRELYEEIILRSVGKAIRQRIHRAEQWVREMNKLMEERDTSSGLRLRLEWEPKPASGEQQLDVYDLVEMLKRDSHRLREDEIDAMIEHFRAQIAGAKQSAEEEQESLRQHLYRALDYRNWFYFELKYKKGEQTGYRPLTDARFNVLSGGEKAMAMYIPLFAATWSRYSDARSDAPRLISLDEAFAGVDEENMRDMFKLLTDMGFDYMMTSQVLWGCFDTVPKLAIYEIYRPKDVDFVTLFRYRWNGKRREYVENVRTE

SEQ ID NO: 40252 - protein, 606 aa, Paenibacillus sp. 32O-W
MQDRCLQIVRCITRLDRGQAGDGMNGFQGFNREDRTNGLRADRGERAKAYFSRPGFERPLQAVWDRYASFGKARGNAVVRNATPEECEMVNSFMGWNVKPGGDIRLPLAAFERELLESAFAMTIEELHAVLTGEPLLTKSDRQQLDRQEWEELFRIVKGKLEREEGLLHPVVADWLEQLKAGKADGYRMLRELWRQYAQDAERELANAAAAWNLLLARHLGSEQRLEESSMQSIEPLLGGLRSDDSRLDGSLDRSGPASPSDGLHPIRLPVLAALATGNPHALDRNVPAGRLLFQALRVSARRAVPEPGQDQESEVRCRADRIGQMGLISQVDRTGQAVNAADSAEAAAGSDSDSDFESESAGTPERDSSIEEPEASAIEADSLASREIYRVAGIADDDISTLVHVFIPWESGGLSILSLRQIERMKQVPFAGDLYVVENPAVFSTLIDMTERWLEKGGAFRLSVDGPALLCTSGPASAAALRLLDRYVQEGPRCGTLYYSGDFDVKGIEIGNVLAARYRGQFRPWRFDSQSYAAGSRSSNREGVRFSDEERNRLKQMGAVWDDSLCRAMSGIGRKLFQEEQIAFYMEDWMCALEHAVAGVSDSSK

SEQ ID NO: 40253 - protein, 496 aa, Rhodococcus pyridinivorans KG-16
MEDALVRDDRLRLFSFATAEKRVHYLWVLRAFDHARGNYSVLLHAGDVENVLTRLPGASGDDVPDSSEIPALLEQLHAWGVLERSYDGSRAATLAEYRNRHYVYQFGQAGYRVFRAVEDVLSSRGEDVSLSRLALPDLLADLNDLADANAAGDGELVYRKLSRLDATLSDMAERAARFYLVLGELVRTTEVTPETFLAHKDALLTHMREFSTDLARYAPKLSAALDRVQVTGVQKLTAAAARHDERVLLSFEEREADWAQRWWGIEHWFVGVGCEPSESERLRGATINAISAVLGLLRRLTEQRRGGVSRESQLRHLAGWFAAAPSEDAAHALFGAVFDLGRPRHFSVAHPDADIVPVTRSWWEAPPVEIARTLAETGRRPAAGAPGRIQRNDAGVRRLREAQLEKQRRRAEAARSLAAGGVRERKLSEPEAEVLLSLLDAALSARVPVSGRVRSDDASSGTQNGVKLTLRPSGESTVVDTARGRLYLDGLSVEVR

SEQ ID NO: 40254 - protein, 464 aa, Rhodococcus pyridinivorans KG-16
MRARSIPSVELDSYQRAARLVLTHHLVTATFPDRSALATVRRWATELRDDLLATFGYRLEVTETTARLFTVADRLDAGAGTSTHTGRPFDRRRYAYLALAIAALGRGAGQITLSELAEHVASEASRVDGVELDTERAADRDAFVDAVTWLGVRGAITLADGDADRWASDPDSGEALYDVDRAVVHALFRPPRALQHLESVRGLLGNAGAPQSDTAEVRRRVRRALVHRPVVYADDLDDDEALQLALPRTTDEVELLTGLVCERRAEGVALVDTSGRLSDVRFPNTGTVAQVALLLAGEMCDRVLDPDAPAPPRIPVPAQTQDTLVAAVDSAIPRSTVFTPLAASDTPIPDEQEQDDDARAPLEHPLLEDSWLAGTVGRLVDIYGRTFAAQWQADPAGLTEAAVDMLDRLRLVARVPGGVLVLPAIARFRGVTVIVRERDPEIDLFPETTPPTVPALDTTPTEIS

SEQ ID NO: 40255 - protein, 1384 aa, Rhodococcus pyridinivorans KG-16
MSSARFRPTRAGIINLWDYRDQEFSFADGRLVLRGPNGSGKTKALEVLFPFVLDGRIEPRRLNPFAGEERTMRSNLLYRGQDSAHSYVWMEFCRGRADDPEAVTVGIGMRATRGNDKVTRWHFVVDGRVGVDFSLLDDEDRPLTRKQLVDQIGADAIADRPVDYRAAIDARMFGLGAQRYDQLINLILTLRRPQLAKNLDPKGLSQALTDGLRPLDDDLIVEAARSFSAIEEVERTLESLAAADDAAQQFVKVYSKYIRQQARTAVDKVATRLGVVDTAVRSLREATEARTEAATARTASEEQLLVAERDHEQARTTLEALHRSSAYEGKQQLDDLASAVKNLERTTAAQAEQANRAQAVVADRLRDHDSARDALETATAARRRAEDGLSAAAKDAGITWAGLDGIERTEQLNTAIDALAEERDADVRAVRSALSQLDGATAARSRAEAAAVRARAQRDTASAAVEAAETMVELSRSEVAAELGRWWSDRAETFAAVGLSTPVFEALDTAFGTVGQDDAPSPAAVFAEHTGPVLDDLRFRRRVCGSEIESLGTRIAELETERAAVAAERDDAPPAFPARTGNRDDLVGAPLWQLVRFRDDVSAQDAAGIEAALQAANLLDGWIADGDLPDIESEQLLVPLEPEHRPSGPTLADVLVPEPDTAVPEERVAAVLSSIAWATDPGPAARVSVDAHGGFRQGVQLGRHVKEQAEFIGATARARRRQRRIVELETTIAECRADVESLREQDREIGHRLTALDEAVKSLPRNGSVLAALRKVTECAGALRTASESAAAADRDLDQAIAAVATKEQHLRSTAGRHRAPLTATELDILDAAVRHFRSQGQALQRALREQVTCDDRLRDSDVRLDEARVSAENAAELAAENAETLANEQQKLETLRESIGASADRIDAQLDEARRRIEAAKAAERAARKAHESALERIGKAEAAHTGAEQTLRSALTEARADADALAPFARRDLLTLLGVESEHVWPSSAAAWLDADQLAYRIRQSPDDTVDVLPTEVLSLFRALDAATESVTASESTRKSTASALTSALQEFDAELARGRDYRLHWDAADGITVVQVQDEQGYTSVAAFAQRIARARQEQETLLTDSERRILEDALLTGLAQQIHERTVDARDLIARMGTEMRQRHMSSGNTIGVHWVLADHLDEPARAVCKLLDRDASMLAPEDLAGIRAHFASRIRAERAAHPERSYPEILAATLDYRRWRVFSFSLVGADGSEDRLTPARHSALSGGEQSVSLHLPLFAAAHVMLDSADPHAPRLLALDEAFAGVDDTGRSELLGLSVQFDLDLFMTGFDLWITYAGVPGCAHYDLSHSVAEHTVATTLLVWSGGELLAEHDGSDLESALGSPRTRRVTRPVEGALEFA

SEQ ID NO: 40256 - protein, 509 aa, Rhodococcus pyridinivorans KG-16
MGEHIGRDLFRHLVADEADEYLAVMDCFTDLLLADLSADDIAVSCARRGVALDIAVVDARCRSLVRWGNLALTSGGTDGGGSHRRSAPETASTEVRARYRPTPAGLRVHRETGRLLSTSDDVRGVARVSLRCVADGLARIEELLVDDGSVPDRDELAAHVTALFAHHRLFTDSVADFYSHLAEILSRLERSGRLEHSSDRERAGVVDDYAETKNLLLDYVDVIGSDVERLAPLVAGRLDRMEPRLDSLLAAVRESGPPNTVPGSPGRSRTDWDELAQWYAEDAGPRRMREAAASALNRLLVRTRRITTTTPGFSHRADLLRLARWFTESSDEQAHRLFAATFGAFPSRHLLLGPDETDPRVGAGTSWWRADPVVVPVSLRERGDHTSRGAVGRLPDSLPGRVRADELARRESRRRSDAVAELGAAGDLHGADLSTEARDVLLDVLAAALAGHRTTDGPVHVDDPDLGLSLTAEPGADTVVHSPDGDLTVHGFRLRTSATAPLDYSAVAP

SEQ ID NO: 40257 - protein, 376 aa, Rhodococcus pyridinivorans KG-16
MSTSYASAVSGDVSGRRDAARALLQQPIVTAAGDRETFDLVRRHAPALKSMFADRLGYRLVVEPTFARLTKAPLGPTSPHRALRHADGTEFGAITYACLALVCAALLEPGTGERVSVDDLLEQVRADARENGIVFGDPVSEERNFAAALRVLEEWGVIAESGRGDEASGDGPHLDVHRDLLPQLLDIPLHGMPGPAAALARHEHEPAARRLYRRLVEDPFVARDELDDESATILARDRHELARMLEDDFGLVLEVRAEGALAYDPAGVLTDEAFPGSGTLKHACLLLLAELTERFGDSAPTTLHVDVHTLDSVLADLAAARSRTWKSIYVRDLALLRRDVVALLVRLGLARPHEDGLELTAPAARYRPVPAESKCR

SEQ ID NO: 40258 - protein, 1408 aa, Rhodococcus pyridinivorans KG-16
MTHSSDPSALDENPPPRFPSRWRLHRAGIVNVWHYLDVEFVLSGGRMILRGTNGSGKSRALEMLLPFLLDADRRRMDATGAAKVDLDELMRTGASDTTDRVGYLWLELARSSGHLTVGAHIRYRADARRSDVHFFTTPLRVGTELHLVDDARIPLSRERLAGLVGADNLTRDPERHRETVRRSVFGLHGETGRERYDGLLQLLHTLRSPDVGHRIDEGRLPQILSDALPPLTENMLAEAGGRLDLLGDTRQEQLRLEAAHAHVLRFHEVYRLYAADLLRADAETARDLAQRVVETRRALVVAEAEAADLDAQAAAADTRLKERRDQVAELDRAIRGLETHEMFRSADDLAQRQLAVDALRRAAEHAAAAADRGRLQERRDTDNAARLLDELSCSVTRAARRLATAGRDLLSVGLPHDTVPTMLHFSADRPPAVLESVRTGIDDTTEQVVRPVVATVLLDAGHVDEVRDAVLRATEATRRQRDQAGRRLLEARRLDAAAHAVREAEAAADRAARDAEQRAVEAAETDAGVGAAAAGLQHRWREWITADRTTALLPELDRDRVVLMRRLSTRLDALIDSSPTDAGDTDSEDVDLDSALAELDSLPTTAARSALSNLAGAPAERERREREARTARKDLVREQAALDAIGEGPEQAPWHVRTDGVPLWRAVEFVDTLGDDDRAGIEAALLSAGFLTATVDGEGRLRALGGQVLVSPRGEPPAQPLSTVLRPDPEADVPRPAIEAVLNTIGFEDATAVASVSRDGRWHNGVLRGRHTAEAPRSIGRPAREAATAARRVRLDEIRAELTRIDLAVEQLRVDYPDAVHRRAEIDAHLSTAPTSHALRAALERRRHAYAHVRSGANTAVELRERATTLRARWTAELDAHRTACEHFGVPGDVPELEALVAGCASAETLCTELARDLCDVLAAHVRFTDAAERCVQATAERIDAEELAESCRYEWHAKAAVVAAQTAAVDVDAADLGRELRDSEAERARADEQFRRTVAHRDHLGRAVAEVLQRCAAARERLDRDRRELAAAAELLAAHMQLPELRAALEEDPGSDSASARTVLPPVHLEDPDHVLSVARTLLAALPPRTGVDENAMLVALQQFDRDITARFDIEHTVTHGAHRVRIAGAGDDTTPAGVSATLTRQVEDGRRALSQREHDVFTGFVLGGVADELRRRIERARQVIAAMNDSLADSRTTHGIGVRIEWRPDGEDADAARLTQLLTATERSPDDASELVGMLRRRVESAHTADPSVGYAQHLSQALDYRRWHEVEVTILGPEPDRERRISARAKISQGETRFVSYVALFAAADGYLSGLPDTGTALRLVLLDDAFAKIDDPTIGELMGLLVRQDIDFVLTGHALWGCVPEVPELDVYEVRRLADGAAVTTRVHWDGRVRQLRPLTELQT

SEQ ID NO: 40259 - protein, 490 aa, Planococcus rifietoensis
MLEEEFKRIKEATYLSAEKSGTYRTILRFFYIQHERMKEFLLPEEVFAHLKEYITFEDYAIEELHMDLTQLVKWGNLFAQQESGNVRTIEEFKKRRFRYQCTPYTVEFERMLTGLERSDTFSGSLEKTQFDRLYKCLKSIEVFSKDDDDEKCAQYWDDVLTYFNKIRQNTSDYFAYLRSEDASEQMKSEAFLLYKDSFTAYLRDFIIALQQTASQIQGLLQSLDHRHMASFFEKVDRHEGKTFRFEQNDTEAITVMLEKWANIRDWFLGGEDSQYETIQRQTNEAIRRITRTVQRLGERNQQFRSRKDDYLHLANWFAGMESVDEAHKLSSVVFGVFHTRHFHSDHIPTDDIYTETWEEQPMIHETLPRVLKYGEKTKPTEMSDHTERKEEAKRQHLKRRNEEKRVIEQYMNGSEILLHELPSVEPYVRKLLLSWIAKAMVREDRIIQTEYGTKVEVTLDSHETVLLKSSDGTIEMPNARFRFIREEVRS

SEQ ID NO: 40260 - protein, 389 aa, Planococcus rifietoensis
MNVREEYFDEQTEEALGLLFEKFWILRAEDPNAYKQIQEREHKLKRYISEKFGFDLIIRQHFIKMEKVPVEPKSWMGIQVFQEPMDYAIFCCALAFTEQKAVSEQFLLSDLTESIQEIYSGDFPLDWTDYRHRKSLVRALKEIAQLKLIRTIDGNVELFQSDGGEEVLYEVTIYARYFMRSYPDDLFRFNSIEEILESEWQRHLDDQRRKRVYRKLMFSPVVHRNGEADADFAYIRNYRNSLRDDLEAHPPFRLEVFKNAAMLTLPERKQRYTFLPDQRGISSVALHVAAYLREEENFEVTELGEVRLPRQTFEAIVRQVKERHGHGWSKQHRDETDKETVASLLSMWQEWELAEVDKEQEVIVIRSGAARMIGHYPKDYMKEVKRSDE

SEQ ID NO: 40261 - protein, 1370 aa, Planococcus rifietoensis
MTNKWKMNRAGLLNFWYYDEETFDFEDGKLLLRGSNGSGKSVTMQSFLPVLLDGKKSPDRLDPFGSRSRRMEDYLLGEKEITNREERTGYLFLEYKRQGTDQYVTTGIGMQAKRGKELKSWGFVITDNRRIGVDLELFKVENQNGKLAKIPRSRIELENLIGTGGEVVKTNQEYMALVNKYVFGFSTMDAYKELIELLLQLRSPKLSKDFRPTVIYEILENALPPLTDEDLRYLSDSIEQMDQTKQQIEQLDREVKALSKLTKAYDAYNHRILADQIEELKRAILRVKKEKEDEKAMVASLRILESVILSIEQELREHEQREKALKQTKDRLTGHRMWGLEAEREKLLKSQSDNQNKFKRENNRLATYENKERQSKQVIEDTEETLNEQLGRLKDHLQDMAYEGEMSGFGQHEQNAADFGRYLEEKFSFGTWERETAAHHKRLEEARGKLQTFEALKEKIAEKRKEISNIEHQRDEKKQEAKGWNDTFEEDKQKKLNEFHLWAQTYNQYGIAGTAHQQASRLLGELYVDSSYSEVKQSYLPFVQAYDDKLQLKRLKQENELNVQKDKLADKKTELEERKAQRDPEPERQPATVEARQVLLEKGVVFAPLYELVEFQPNVSEGMQKRLEAALIDAGLLDALVTEQAVDILHDRVLEEAPVMLAHTLVDYLKPDTGQTGISVEQVEKVLQSILVGDHDSTTGIGEDGTYSLGILNGHAVPVEHVRYIGREARRRFRERLIQELELEIASIKERINVFVAKQEATATELANSKIAWSTFPEDLDLKTSFNEKREAERQIQFLDSQIEQAAEGLRKMDKDFQQLKRDVYEVTQTLSLETTAESYREALGFLRTYEKQLAELKNQHLIRLHDAESLRKEQEQLKYLVEDIDELKGELNMLEDTLAIASQSLQHLDEQLEEEGANDIRKQIRSVQHELRQIEEVLADRRTTLPQRKAEKTALSDQLSVSSKRLAFWRNMQTSWEEAVRGELKRGFISLKESVWQDVTKVEAALLVDVSKDKSQIERKLTNVFYEVQTDLAEHRMRERSVKWELEDWMAGVDADELLPIIDQWRQKTSRRIIEFDNRGISVTPYSLYKEIGDAQLLQENRLNEQDKELYEEILFNSVGHKLRSRIRRAENWTEGMKKLMESRDSSSGLKFSIRWKPRSADSESQLDTTDLVALLKQDARLLKEEDIERISTHFRSKIEMAKQWMLEKGEGQTLLQVLKHVLDYRKWFSFELSYERPNEKKRELTNHKFFTFSGGEKAMAMYIPLFTACYSRYLEAADSAPYIITLDEAFAGVDENNINEMFEVVEQLGFDYIMNSQVLWGDYETVSRLSVCELVRPRNADFVTVIRYKWDGRALVAVTDTERDWQNE

SEQ ID NO: 40262 - protein, 419 aa, Planococcus rifietoensis
MNKEIICQAVTYFQSTPVYHKLFSEFRAKIESLGRIGGTVNIEDYSAEELESLTLFFGEMGNKKAIPLIAFDERLQETKFVDIHLPELLEVFFGEPIRFNKDVRKEKRDKEEEMLKKLGVTYPVLNGYFNYLSKRTADSHWIIRLLLTDSFTLSAQFLAKAANALPQKFERLPFFSQRVSGNPHTFDLSGMNGKLLIHFLHFRLYDGGAPPSGTEEVNELLLQFLILRDDISNFVSFANLLGTQDGTVHPVWYAAVKTESAVNMPLRELLLIDLVKPAVGTDVYVVENSGIFSSLLDAVPSAPLVCTHGQFKLAGLRLLDFLVESGSYVHYAGDFDPEGVAMAARLLERYPERVRLWKMDSESYATALSSFELGDRVKKIGSIKHPDVQEILAMMRETKKAGYQEALLEEMVNELKEKY

SEQ ID NO: 40263 - protein, 511 aa, Desulfitobacterium hafniense; identical to SEQ ID NO: 38554

SEQ ID NO: 40264 - protein, 416 aa, Desulfitobacterium hafniense; identical to SEQ ID NO: 38555

SEQ ID NO: 40265 - protein, 1362 aa, Desulfitobacterium hafniense; identical to SEQ ID NO: 38556

SEQ ID NO: 40266 - protein, 473 aa, Desulfitobacterium hafniense
MELISRKTARQYYGDPLLGNLIDAVFKKYQGQNGVRGNAKICVSSSEEAQRLQDYFGNRLKHLIRPGSEVEVPLKVFAEELQLGYRLSIPDLYEVLKGEMLLTKLEQRQLKEEAWAQIFMQVRMELREKAEIDLDNEVFRAETFDWLKRLEGGEASGYHVLRSAMNKGEDAVDALFCCLKGLWYLLVDKEKIKDKIGKNVKEIRIPIFAVHVTSDKDSHGFDWTKTAGRLLWYALYDIDIQRIKAGKKMASEKLIVPEYMQKRQIYRNFGLKDDDISSFSHVFAPHFVSGTSPRTLNLREIQSYGKFPMYSALYVFENPAVLSHIIDELIHFLDMNGLSLEQIPKKFPALLCTSGQPRSAALEFITKCLEANPNCLIRYSGDLDLPGVQMMQGIQGQFTFRFEAFRMDDKTYRNYSDANHLRLSFQDKTVLKRMGDELSKVMVELGVKIYQEEFVKDLAEDVLETIRQEKEIE

SEQ ID NO: 40267 - protein, 539 aa, Streptomyces sp. AVP053U2
MRVRQTGAESRLSGRGEYVSSRSEEAARSVSDEPDAPDPVDEGAFGIDAFSLDDRLRLFHFAAAEKRHEYLWLLRAFDRGRANYQVLLNASDAVGLLERLAADHPAASAVGGQAGVQSLLDALAEWQVLDRSYDGTRAANLAEYRNRHYVYQFTQAGYRAYRAVEDVLGASLEDAQLSRLVFPDILGDLRALAEANTAGDGEEVYRKLGRLDSVLNEMAQRAARFYLMLGDLARTNDTRPEVFLAHKDTLLAHMREFTAELGRYAPLLAEAVEKAAATGVDRMIEYAAEADERLFRSPAERLADWRHRWDGIVHWFAEREHSETERLQDATVTAIRSVLALLRRVTEARRGGVSRESQLRHLAQWFTSCENDEDAHALFQAVFGLGAPRHIAVPYADPERIPGRTSWWEAEPVELARTLVQSGRTPTLHGPGRIERDDDRRALLRAEQLKEQAERRGAANSLASDGVYGRTLDEPETRALLALLDVALAARVPASRRVTAASGSAHGVRLTLTPAEGSTTVDTVRGRLHLDGLRLEVTA

SEQ ID NO: 40268 - protein, 474 aa, Streptomyces sp. AVP053U2
MSRAAEGVSPLELADYQKAVRLVLRHPLVTPGYPDRAALATVRRWADQLRTDLMEVLGYRLVTTADTARLQRAQDGLDATRPALTRAGRPFDRRRYAYLVLALAALGRHGAQVALGELADAVAADAVRIDGLGLDTARKPDRDAFVDAVTWLTERGALTLADGSATAWAGDPERAEALYDIDREILLAVHHPTRVLQHLTSVTSLLDSSGALGLSAGRAAQRRDQARRARRLVLENPVAYYADADSELLGQLRAPALAEDLERLTGLTVERRAEGVALIDTSGRLSDIRFPGGGTVAQAALLLAARISAAVQRSGRHALELLPAPTAAERLAARARRIDGALPSRGLIAELAELTPSDEESAYETLGVEGQEPTETRYPFVTDSWLRGRLREITAEYGAGFAADLRGDPDRLLGQALDLLAAMSLIVRVDGGALALPLVARYRGVTARVRTRTAAGPPSQTPLFTDPTAKDSTP

SEQ ID NO: 40269 - protein, 1380 aa, Streptomyces sp. AVP053U2
MSTPAPTPADLSAAAPAARFVPTRAGIINLWDYRDEEFSFAGGWLVLRGPNGSGKTKALEVLFPFVLDGRIDPKRLNPFAAEDRTMKSNLLFRGQDSALGYVWIEFTHRETGQAVTCGIGLHAQRHRDTPARWHFVAEGRVGEDFSLLTHDDRPMTRKQLAAELGRELIASTTDYRAAVDQRLFGLGPERYEQLLTLILTLRRPQLAKNLDPAKLSDTLTAGLRPLDDDLIAEAARSFDDMESVQRTLEGLVAADDATRAFLASYSTYLRVHARAAADRLTARRTETAERAAALRAAAADLEAARERQAAAETRAESADAALAAQRSRLDQLRSSAAYQAVEQLADLERLVRTFEQTARQASAERERRSAATGRARAEAEHAARLAAELDAAVSRDAATVADHAHTAGLPWTPADAEPARLADRSAALAAARHEDVRAVRAAQQTARGAEQTRALARVSLDRAQEAVTDAETAESAAESALESAREQAREALRQWVGTHGELLTEEGTGRLAETLELAGEADAFTLTDAFTEATAPAVQELRDTLAALRAQRTEVERRRAETEAERDRIAAEHDDAPPPARGRTAARAPGGGVPLWRLVDFDNELTDRQRADLEAALEASGLLDALVTAEDTPVTAGQSEGYLRAGTPVSGPSLADLLRPDNPDNPDNPAGAAAIPTAARITAVLSSVAVTGDVDTGIPQISPDGRYAAGVLVGAHTKEHAEYVGATARARRRAARIAACETLLAELSSQLDESARAQARTDAALDAYAAARAALPRTTGITQALRELDRAAARLRATRDAADAAQGAYDESVAACSVAERALRRTAAEHGIETGRPEQVDAVETATRAFETATRELAARRREQARQFDAAHVGADRLTAAAEDEEAAADTERAARRRHAEEAAGLEALQEAVGAEAQEVMRHVRETEDGVDALVGETEAARTAQHGAIAGTAAAEARRTAAASAGAVAAAEEKDTARSLRPYATRELLDILRCPPGLAWPAQEADWAGEALPPAVAAVHEAILSATRDLTPTETSLKQSVTRLTKALDDLQAQLAAAGQDYRPEWDGSDGVILVRVADEEGPLPVAAFAQKISSHRRDQAELLSESEQRILEDALLTRLAQQIHDRTVDARDLIRRMNTDMRRRTMSSGTTVGVSWLLADHLDDEQRAVCALLDADAARLGPDGLARVRVHFAAQIKTVRARHRDQPYRELLAETLDYRRWRQFAFQLVRPDKSEERLTRARHSRLSGGEQSVSLHLPLFAAAHAMLNSADPHAPRLLALDEAFAGVDDTGRGELMSLAAQFDLDLFMTGYDLWAAHASVSAAAHYDLAHTAVDHTVSALLLVWDGARLLADDTGDLTTALGSPGTRRVPTPEEAAVAN

SEQ ID NO: 40270 - protein, 428 aa, Streptomyces sp. AVP053U2
MPTERREDDGYDELRGEGWTRLLAAARRRLEHTGGALDGDIGLTGPSEAERRTVIGITGRYRPETAKRLAVPLSDLDGYLYGRYGTGLLQTLGRLHGPLRDRPAERADEEARRDQALKSAHSSRLAGQGWFAAWLERVAADGTLTRLVRRGDAPLLDAAVRVLERLTVDGDRSAGSPNRVPGVLPLPVLAEWATGDTKALVPGAPLEQLVLRALAQRAGDGCAVPRQRAGRRALWESVGAIADDLASQVLVLNIGAEGDTVVCDWLRDAADFGIPFRLTLHQLTTDPVVPAARTIFVCENPAVLRAAAGELQDTSAALVCTEGVPSAACHKLLGDAVRAGARLHWRADFDWTGLRIAADAVARHSARPWRMTAADYTAALGQGESTALAGPPAASSWDPELARAMEESGSAVMEERLLPALLSDLSRI

SEQ ID NO: 40271 - protein, 530 aa, Streptomyces silvensis
MTDARKSVGYLVRPESSEYIAIMDVLEGSVADLTVSEVATALSAAGLRLDARLVETRLDALKDIGAVSVRSDTSHARRYAEILARNWRYTASPAGRHVQRFYRQVLAGTVTVREIPIVSLGRIVSHLEQLTAALGAGEPDADRLDATVLDAVNAVFTSHDDLDAALVGAEDALIGLADRFDLDEEHTNDLKGLLVDYATRVAAELDSGSARAAAALAVLQPWFALLAQAAVDASQARDLIAVGALSASRGGRAEDWEGLYAWFDARTGRAARFSLRLVRALPSMHANLRRLHSSAGTASTRSRALALARAVLTPQIGVQIFQAALGDHSWRKLYGQAEEDDRGRNPSWRGGPQVPVPTLLRTVGRSGPRGRGAAPRDDTAAKAQVAEARARRQAEHQRALAAVLAALPGQQLDEVAARAALAALMAAARAGATGPRRTGSNGGLACTLLHTSSGTGILHAPTWRVLLPGRIPLFHRPGQRPSVAALAALAGTTTTDDPSAHATLRITPHTGPSTPDNDASPFVPRQEGAA

SEQ ID NO: 40272 - protein, 412 aa, Streptomyces silvensis
MAATCWLIGGRHDELIAAVRRNEHALRSAVTRLGWVLIIERDLVRLRKSPPPRPQAWADQGPSPAVCSWFFMLLAAAESMPPRTAVGHLVTQAHAAAAEAGLPVHHDIAERRAIVAALRMLDDRGVVERLDGDLDGYLHDDQAPVLLAVHHTRLAYVIANPGTLDPAADPHAWLEQAQREPDAARRMRRALVDDTCVHTALLDEAEAQWLSQRVRGDDGGPLADAFGLVLERRAEGAAFVVPDEAFRHFSELGPMPFPASGTIAHAALLLLDHAALHGTAENAPGPGWRGLSEEAVVAALTAFGADNASGRGGWSAEHVQDPLLLAGKVGDLLTGTHLARLTLTTPQADGKTSLWWFAPTTGRWAEEGTAQPKTARTRSRRGTSTPQRSPIPLQQGLFSATETDENPEEHPA

SEQ ID NO: 40273 - protein, 1414 aa, Streptomyces silvensis
MSDILDLDFALPPAPEPSGNAGRFGGRWRLVGAGLSNVWRYGDLELPAASGRLLLRGPNGTGKTTALEALWPYLLDLNGAKLAAGKARPTTLKLLMSDGAPAKGRRYGYLWLTFAAPAGEPVSDTPDGAAVGGVVSFGVRLQYSPSSTPAVKVVPFTVPGRPLKDLALRGPHNNSALEHEEFSDRVEAAGGRVFAEPEDYVEELAARIWSTTSGELRLLASRLREVRNPTLLGDVSPAAAADALRQSLPGVAEDVLTATAEALAESDTTREAFERDEHAAVLLEEFARVWTGHAVEVTRTAHTSARHAHDDASTRKRRVQLCTGLLESAKAEADQAAGDVQRLENAHQKAQAAVRAIETSDAYRSHGHVMDLRKRLRAEQRAASSSYDSLHAAAQQARTQTKTGHDALDDIIGDIAETLAGAEAAGSQPVALEILLAHHPRARVTRPVADRIADPGPGLTLTHDREGLDRLAATWRARAQEHRSTADRATLVLRDHDPVAAAEGTAATTHRTAAGAESAYDEASQAHDRATAAARSAARQALAAVTRWAADHPALRGLHDEATLDGDELTVWDTGDVDALIHAEPAAVRDQLNAWANQALRIGETLAAGHESAAQHHLATATSLDLTATQHRTEARHLRSGRLLPLPRPTWAGPGEDDTALGSLLEWHPALEDADDHKALLELALASSGILGAHLHKGRATTHAWHISPAGAVQEHNLTAILNIAPGHPHTDLARAVLQRIALADTATPSGHRDTPALVIGRDGTFTAGPLAADPATALRAAGTRIPAASHIGARTRLARAHVRAYELDATAQELETSAANERRLADECRQQRDALRAEGRGFPPRDDLTTAEAERSRTANTAHERHGTARSLRRHADDAAAEHTRLRTAWETRARSLGLPTEPEGVAQLIDTSQAVAQQLNSCTTQLTTRLLPRLERIVHTLPDEAALTERLAELQHTAQDMHITVLETQAELTEAQSHGDADDAARRYEQATAQAKDLHQQSKHAAEQAVIAEKRLSTCESDLIAAQERLDESLPLQKTTRSYLTALLAWPPLAQALGADASLTSQDTDTAELLTAVEELLARRPTASKKTLGERYDAVRAELAQTWTIARDDPPAGIEQLDTFVLTHAETHYDPFTAAQRAQALAVRAKAALDAAEAAALRDFVIGRLPSAIGTAWAALTGWKKTVNRKMRAAQASSGVGVQVQIDLRSDLDAATRTVYELSCKISDAVRTDTQKEEVGQALQSLLAAADGSTMQERLAAAVDIRNWVDVRYLVERPGPGGTPVTGQWGSRTGLSGGERRLVVLAPMLAAIAASYDRFTSTGLRLVPLDEVPAEVDERGREGLARYLAELDLDILCTSYLWDGAPGAWDGIDAHDLEAGADGTVVAFPMLIRAGQALPGDTGSAPQAGGVA

SEQ ID NO: 40274 - protein, 194 aa, Streptomyces silvensis
MDCDDLLGGLIITGVTPRGWRIPPGATFTLPPRELAHIDWEPPETTGTWVFVTENPSVLAAASTEALARDNLVRPRVICTAGTPSQRECEAIGALADTGWNIAVRADFDQAGLAHMRALLAAAPSAVAWRMGAADYLAAVPEGTDVLHLQGSDAPWDDHLVPVMRKHSVPVYEEDLLPALLADITAGAPGSCVP

SEQ ID NO: 40275 - protein, 522 aa, Streptomyces acidiscabies
MHIRNNGRTMTSTPSEPTRAEYAPFAHLSAPNAALYRRVMRVFLTAKERFAVHLRPEDVHAALEPEHRPADQDTVAKALDSLVGWGNLRADPDTSRVTAVEDFYRKRFIYQLTRAGEATEQALSVYDEALGRRGALQAVALHDIVTQLRALLVLTGDPDAAKAHLALSALTARFEALAENARAFMGSLQRTIDLHEVDVEVFLAYKDRLIQYLERFIQDLITLGGRIALLIGELEERGRVDALLRLAAAREAADAAPDEAVDAEARAYGRWAAKWSGLAAWFVSADGRESQARLLRGRALGAIPQLLAVVRQLNERRAGRSDRSADFRALARWFAEAPDDAARHRLWRAAFGLYPARHLTVDATALDRRTARPVPASTPWAEAEPLRISPQLRRTGSYERRGKARRVQDRSEQRRRLAEIAAKQTQEIAAARARLATNGVTRLSALGELDPLSFRLFLQLLGDALATWRPGMTTTVATSNDGTMEIRLTALSDGTTAEIRTPGGVFRGPDHTVEIITGEGRP

SEQ ID NO: 40276 - protein, 404 aa, Streptomyces acidiscabies
MTTPLGEVLENRRTAEFHKAARALLKEPLLLAHGPHADEFRLVRRHAADLRDWFDRNTGWPLRVDAEAARLSRTPGTLADPTHPAREASRARVPFTRRRYVLLCLALAALERGEAQIALGRLAEQVVLDAADPHLAAAGIAFTLERRDERLDLAAVVRLLMHYGVLRRVAGDEDAYVSGAGDVLYDVQRRVLAGLLAARRGPSLIGADGFEDRLAELTAESALDSDELRFRAVRQRLTRRLLDDPVLYYAGLTDEELAYLTRQRAFIAARITELTGLVAEVRAEGIAMVDPLDDLTDVRMPEQGTHGHVTLLLAEHLAASNSAVSRAELERRVRELAVEHGGFWSKSARQPGAEGELVELALAKLTALGLVALVPGGVSPLPALARYAVGETVVKESPRKAQRS

SEQ ID NO: 40277 - protein, 1362 aa, Streptomyces acidiscabies
MTALPSPAPGRWRPLRIGLVDLFYYDTEEFWFRDGRLLLRGNNGTGKSKVLALTLPFLLDGDLSARRVEPDADPGKRMEWNLLLGGQHPHPERLGYTWIEFGRRDETDGREHFLTLACGLKAVEGRGIARHWYAVTDQRIGADLSLLDATGTALSRDRLAEALAGHGMVYDTATAYRRAVDEALFGLGERRYAALVDLLVQLRQPQLSKRPNEAALSRALTEALPPMDQAVIADVAEAFRSLDEEKEELRAAGEAERAASAFLDHYRRYARVAARRRARLPRHEHARYEQLGRDLAQAQTDRAAAEEERELIAGRIADLEESATRLKAQDAALREGPEMRSARELEQAAAGARRTAGELRRAEADREQAAQVHTRALGRSETAGRRLTAAEQQVADTLGRAREAASAARLDGEVRTEGAQEPELRRAAEESVARRRRTLDHVEELAARAEEAAAERRAAARRLDEAQSEAGHTARRQAEAESAAAEAGRELVVSVREHLDVCEELVPADPAGLLDSLQDWVTHLRGPSPARVHTADAHRARAAHLADAAASLGQRLAVLEARRAEAERELGDLEAGGQRGPAAPHTRTPGVRDRAPGAPLWRLVDFRDQVGAGERAGLEAALEASGLLDAWVCPDGTALRGDGHDVLVSPGDPLPGSTLAEVLRPAVDHGDARASEVGERTVARLLAAVGLGSDSSGDTWVAADGRFRVGALRGSWSKESAAYVGEGAREEARRSRIAVLREELGVVAGRLEAVEAERAEVARSRRTLDAELAAVPDDAALRHAHALAGAAVDAAHRARARQDERAGELAEAAGVEAEATAELTDTAAAVNLPADRPGLTAVRRALADYTAVLAALWPALRERADAGRAVAEERAEAESAGTRVAELALRAEESARLATAADERHTTLRATVGTAVAELERLLAATAEALAGCERDQRRSREEHAAAGRRVGHAEGRIEQLAKDVREAAAARAEAVAALQRFAGTGLLAVALPEAAVPASDGGPWAATPAIALARAVEADLSSTDDSDGAWERVQKRLSEEYKKLQDALSRGGHTATATMVEDGMVVDIVYQGRRRTVPELAGALATEVAELARILSAHEREILETHLLTEVAGTLQELIQAAERQVGAMNAELKERPTSTGMRLRLVWRPSRKAPAGLEQARGRLRQSADAWAPEERAAVGEFLQAEIARRQSDDAAGGWLEVLTAALDYRAWHEFGVERDQHGSWVPATGPASGGERVLAMSVPLFAAASSHYATAAPDAPRLVTLDEAFAGVDDDSRAKCLGLLHAFDLDVVMTSEREWACYPQVPGIAIAQLSRVDEIAAVLVTRWEWDGSERLRGTEPEHRLTAGEESDADQEALWA

SEQ ID NO: 40278 - protein, 414 aa, Streptomyces acidiscabies
MGVSACDGSGPHVDRDRLDRLLGDPGLGWLVERVRRRLERDEPLTGPVTLAAPSAAERAAAERLLGRAPRTGGSLTVRLDAVDAVLRRSGISPGGLTPAVTALTGPVPRLADVRAQEASAWRDAYAPLAALPPELADWADRLRGDGLVRRLARTPPTAKSLLADAATALRALPADPAMSLAAFAAGTLGDAHALDDGTPLATLVLSGVRALTGFPDGAGAEWRREAWASAGLLRDALSSTVLTVGLRSTPALDWMTDAGEPAVLTLRQLTRTPPRTAPAVVHVCENPAVLATAADTHGPACPPLVCLQGQPSAAALALLRHLHTRGSRLRYHGDFDWGGLRIAGALLSHVPWSPWRYTAAAYRAAAVAAPLAPPLTGTPTTAPWDPELAPALAELGLRVEEETVLDVLLADLAP

SEQ ID NO: 40279 - protein, 612 aa, Streptomyces scabiei
MRRVPPEMFRFTTGETPDLDGAVLDAFGAAAEHLETEVGPDAVRAWLRRAGRATAVEDAELHETLGRLVRWELLDVLHDHHAEHHPAAVEHERHPRTPEDYGGHHRTAVDYEPHPRTAEEHEPPTPRYSLTRRGEAALAGVRRTLEVLGSTGAPRTAVPDAIADRLDELCLLSGEPASADRRIFTALRELEGHMETLVENTTAFNGELQRLLRAESADPEAFREVEAATVAHLQEFLADLDRRGRTVAAAVARVEERGSAGLRERALRGAELPPSAGPDRAAAWLENRRARWAVLRSWFRPEDGTRPRIERLHDIARRAVVSLLEALERIDASRRPSSGAAQDFRELARWFAAAPAEEDLHRLWSAAFGLGPARHAHLAHPDPELIPSSRSWAETPPVEVSALLRSSGRTERFTRTARVRDVTAVRAERAERARAERAELALACRMLQTRGPVRLSAFGELEPAVFDRLLDLLGRALSTRPDSAGLRRATTGDGRVEIVLAPPSDARTALLRTARGTLAGPDYVVRIMEAGGAATPPATPPAPRPAESAPARQPWAQPSVRTGQPAGPPQRGTHPGHLVAPAARPPLPPSSDVSAAAFPAGHSSALRRETAR

SEQ ID NO: 40280 - protein, 432 aa, Streptomyces scabiei
MSSLANHLAATEREEVSRAVRLLLARPLLTETSDPAGFALVRRRREPVARWFDHTCGWTLLVEPRRGYARLAKVRADPDGSRPARAARAGRAPFDRRRYVLLCVTAAELLAAPTTTVGMLADRVVRATAADPALPAFDPARRAERTAFVDVLGLLESYDVLHAVDGSTEAYAASPHATVLYRVDTTLLTRLPAAPVGAARLAVPPDGMPARFGDLLTGPVRERSHGGPDTGDGTADDEHAATDARHGRRLRHSVLRRLFDDPVLYRSDLTDEELAYVTSPAGRLTLRRSAEQAGFLLEDRAEGFLLVDPDALATDVRFPDDTSTARVAALLLLERLCAEPAGLLPEQLAEAGTDLLRRFPRWARTYRPEEDGGARLSDDAVDVLCDMGLARRAAGRALARPAAHRYRLTGTTCPAPGTPETEKSAKTEEDER

SEQ ID NO: 40281 - protein, 1140 aa, Streptomyces scabiei
MSLTELPLPRRPEATDPARPAARAADGPGGRWQPHRAGILNVWRYYDETFTFHRGRLLLRGQNGSGKSKALELLLPFLFDASLRPNRLSTFGGSERTMHWNLLGEGATGKTRVGYVWMEFRRVDDDGTERFFGCGARLQASVHTTGVHADYFTTGARIARPDGVLLVNEAGQPLTRAALAEALGDRGEVHTSATGHRTAVRRALFAGMGEQRYESLLSALLQLRQPKLSERLDPSLLSTLLSRALPPLGEGEIAELAAGFEQLDRQREHLRRLDDEVAAAETLAQEQRAYARRVLRAGAAALIETTAETDALTRAARKSAEEFAQALAQRESARALREEQERRARALEETVEGLRQSEAYGRGEELDRLRRRTEDAAAAAARRRALARAARAAAEQDRGLADGTAGRARILDEHASDAAEEARGSARPAGLESVHDEADTLLGTGAPRRTADDPPGESGARQARLLLRRAVTARRQQLTAVTGAMDDHDRAVRDRGAAEDLLDEARARFAEATARRDEAAGAWDTALAAQGERLLAWAANCTELRITDPGELAARAAAESEVTALVEAAARPSEREIATAEATVRAARPGLWDERGRLVEEVQRLGDESDLPPPAPATRTTVRSATAGAPLWRLIAFREGVPMPVQAAVEAALEASGLLDAWVGPYGGITLPGHDTRAESALAVAAPGHSLLAVLRPEEGIPVPVDTVNRILAGVAFGAGLPDGHAAAVSAQGAWRLALATGSWSKQEPVYIGAAARQRARQRAIAALTDGITRTSASLAALDDRSRDLAARRARLDADLAARPDHRELDAPRRERDRAEEAVAAHDDAVRHAAGRLARCEDEVAGALRELSRRAAEHALPADRGRLRALDAGLDRFRDTADGWVDARLAAHGAADAARQAAARAERSGQAADEQEGDATAAEAEAEALRARLEAAEAGTGAHHRQIVARLAEAREELRRCREAVARAADLQLRLEGRAGGLRAVSGQDAARHEQAVLARDRAAHRLRHLCLAGLAEDAGIALGPDAGVAPGPEGGVAPGPDAGDDPGDMLEAARAIAAKWPALPYAPRHLGEAATRLSEAVHEARRHLGARADLDLAADDDVLIFSAGLDGVRVGATGLLGALARQRDSSRDDLTGGER

SEQ ID NO: 40282 - protein, 544 aa, Streptomyces scabiei
MGASVSGSGQDADEETRRRLNAYTYLSAPERLEHVAIMRVFCGTLLADLAVPDIIAKLRQAGGSAAGLDADTLTVRLEQLVQWGNLLRSSHTVNASSISEYQRSRSRYQLSKLGERIQRDADGVLTEADAAREVSNELLALVERGLRELAGLVTAPGGIEPQDGLERISTLFVQFTEFADSIRDFYAYLGQVLSRYDLDSAEYQGFKELLLDYVEAITEDVAFRAPRISAALDTLWPHIPALLDRLDAHAQGLTGLSTQAQAQGESRPDVRIQRSRGREFADWEGLRGWFSNTDGQGSQVDQLRDATLRALQSLLANAKRMLRSATGEMSRRKDLLRLARWFEEAAPRDAHDIAVAAFGLYGARHLGIPPATDEVVPAYTSWWTGPVVEVPVALRERGSRAQRGRASAVEDHSAQKQLLREAARQRAAARAAAADELRSASGRFAEVRLTSAALGLLLELLATALGNAQLSRPVSTDGERAAGFDLDSASSEDAELRIRLTVRRTEGTRTVLYSADGDLLLDDLELDIGRTSAAVGGEAEASVS

SEQ ID NO: 40283 - protein, 441 aa, Streptomyces scabiei
MTLPSAHDVALAAERRTAARLLLAHPLIASDGPHADLFPLIRRHADWLGKRFQQVLGYRLLVDSSYARLFKAGLGTDSGHRLERSTGTPFTPHTYACLALALSVLVTAPEQMLLSHLVADIRAAAADAGIELEETGRAAGKRTLVAALRQLVDWDVLIETEGHVAALAQEAGGEALITIDRELARVIVAGPLSQARNGADLVRRAADPGFGGPRTYVRRMLVETPVVHLDELTDAERDWLRTRQRREAQAFSELLGLEMEIRAEGVALVDPEEELTDLHLPGTGTVAQAALLLAERLVERLRPQEPGHPATGGTLIIGVAVPDGLVDEVLAELITEYGQRSNWQRGYLEDLPSLREAVLDLLVRMRLMARAGRLRAEGEGLPEGYVEEASEGRTVTDVHGARPGGDCWVLLAAAARYATQVTVRPATAAGKGTDVQEEFPL

SEQ ID NO: 40284 - protein, 426 aa, Streptomyces scabiei
MSGLPAATRDWLTGPGLTRLWQGARKRLESNGVQAAGSLRLTAMNAQERNDLSLLLGKPLTGAAVTIRLDVLDARLRASAAGLGLRQTLEELGPPLTDRRAARADVAARREQVWSSLASSLDASPLADQEWPRQWYDLLRRSGVPRGVTPEAAIWTLQQAVQVLTALLGPDGPERNGTCGRGELAAMTTGSAHGLDDGTWLARLVQRGVALAHGTEFPDDAAGRRALWRLVSVTPDEVSSTVLTYGLRPDGEGWRERALRERADHHAEVHVTPRDLHGLRLQLPAGTLIHICENPRVVEASADAACVQPLVCTSGSAATVVFTLLDALAATGCRFAYHGDFDWPGIALANRVIRRYEAQPWRMGTADYEHLAARSQAEGIPQLALDGQPVNADWDPDLAPAMTALGVALHEEATLELLVDDLSRQT

SEQ ID NO: 40285 - protein, 497 aa, Oceanobacillus picturae
MQQPFKKVIEASYLTADKAWRYRAILRYFYIQHERMREFLFPEEILAYLTDFQEFKDYTEDQLHLDLDQLVKWNNLLARQEMGRAHTIEEFKKKRFRYQCTPYTVEFERMLMEMEKGGNVFGGSLEKKEFERLYQALADIESRINQKELSDASECSQLWNDVFTYFRSITQNTSDYIAHINSEEAEERMQTEAFLVFKDQFTTYLRDFIIGLQQTAWKIQQLLQSMGTSHLQPFLHQVILHQQQVPRFEDIAADEKELMTEQEEKWHSLTAWFLGNAHRESELDSLQTRTNEQIRRITRVVQRLGERHQNFRSRKKDFLHLAKWFDSLNDINQAHELSAVSFGVFHTRHMFSDHVPTDDIYTDTWEEQPISHETKPRIRQYREKTRAGAILSQTHKKEAAKEDYLREKMAEEETLNAYMQGNEIKLGALPIVEKHVRKMLLSWIGKAMAKKDHTFKTEHGRTVQVMVSKQERIQLQAEDGVMEMPAVTFRFMDEVKN

SEQ ID NO: 40286 - protein, 391 aa, Oceanobacillus picturae
MEITTFDEKAQTGLRLLFEKFWILRSKEPEVYQQIREREKIIKRYVDEKFGFDLIVHQHFIKLEKIPVETKSWMGMQGFLEPRDYAMFCCALAFTENRTVDEQFLLSDVCEDIKDLYPGEFPLDWTNYNHRKSLVRVIKQLEKLSILAVVEGEIEQFALNEEQEVLYEVTVYARYFMRSYPKDLVQYKSIEEILEGEWERHETDVRRKRVYRKLLFSPAVHRESEQDPDFAYIRNFRNRLRDDMEEHTLFRFELFKNAAMLVTDERKQELTLFPDQKAIMDVALHFSHYLRNNQHEYVPDTLGNIHVTTVAFEQIVTQLHAEYGKGWSKQYREGTVKQTMQELATLMGEWEMLERDPFTGEYLIKPLAGRLSGHYPKNFDAEKGVTNEKTQ

SEQ ID NO: 40287 - protein, 1381 aa, Oceanobacillus picturae
MKKHNKWKMNRAGLLNFWYYDNEIFDFADGKLLLRGSNGSGKSVTMQSILPVLLDGKKSPDRLDPFGSKARKMEDYLLGEKDIVDREERTGYLFIEYKREDTNQYITTGIGLQARRHKSMNSWYFIITDNRRIGEDFALYETERHGGETQQIPLSRTQLENRVQDGGHVVRTQGEYMKLVNKYIFGFEEIDAYEDLIKLLIQLRSPKLSKDFKPTVIYEILEAALPPLTDEDLRHLSDTIEHMDQTKQQIEQLEREQDALNKLIKRYDAYNEYAIADRAHEYVEAKKRHTKEERLLNEKEAIEATLKEEIKRGQEQSVKLEQTKEVLEKKQERLRQHKVWNLEKERATEQEALEEVKKELERKNQQLTNKKNDELETKSRLKALDDELYNQEQQMGETLRDLEADAEASSFTGHSLNQQDFHRNKESDFDFKVWTQEAENHFQNLESITEGLRYYENLREQIVAFQKKLSDLTMERDKTKQAEQDWLALFEKDKQEKLDEIHRWAADHSFLPIEEKTLQQSARQMEQLYEPLSFETVRNPFVQVSNDFQMDVNQEIATKKSDLSTLEKEKTGKEAELAEWKAKRDPEPPNQREETREARKLLEASNRAFVPFYEAVEFQDHVPENVRNQIEAVLLDTGLLDALIAEEQTTITHDRIIKADPHMMAHTLRDYLTPDLAAERQVSSELIDEVLRSILVDEEVEGKISIQENGSYTIGIVHGHAVPVKSVRFIGKNARKRYREEQITRLEEEITGLNSNYQSIEQHVHALSEKVEDAKQAMIAFPVDHDLQVSFSTIKEKRFDLEQLQKSLQQVDRDMEITTKAYQEKKRELDRKTRELNITFSFTAYNEAKSIMRDYEKALRSLITTHTTYVLQQQNRRGVIERVDELMEEVDELQGELNERTDKESKLVGNIEEIVKQLEMQGVADIRNQIQEVQASLKQTEQELMHNRTTLPQNKARLETLTEEISQHHQKLHFQQQMIHVWADTIGQEMNYGFIDLPDDLQKMEERAKWIDKHFKQLLKEKDPASIEGQLTSIYFEQHSNLMEYRLSDQHVPAVEAPWMREQEWTDEQRMQIEHWRQKAARRLIQLDYQGKKIDPYFVRDRIDQDRLQQQHLLDDQDRQLYEEILFDSVGKKLRSRISKAQAWTEKMDKLMAESDSSSGLSFSIRWKPRTAETEEELDTKELVELLRRDSRLLKDEDMDMVIDHFRSKIERAKELVDIKGEGSTLLQVLKDVLDYRNWFSFVLSYKREREPKRELTNHAFYKFSGGEKAMAMYIPLFTACYSRYSEADPTAPYIITLDEAFAGVDEDNISVMFRIVEELGFDYMMNSQVLWGDYDTISNLSINELVRPKNSDFVTVIRYHWDGKKRSLLVKDQAETVKNR

SEQ ID NO: 40288 - protein, 428 aa, Oceanobacillus picturae
MMDKQTKQAATFFKCERLYDSLFKQLRKKYESIGRIGGTIPIRLFSYEELEAIAGLFGKSVATLERKGTVSIVELAEALNDTRFSGVDLKALLDAYFGEELVSKKEQRLATAARLTSLLERLRKTYPMLTDWFAYIQASTSEGRWILRQAEKSPGQFEQEVALLARAVTALPTHSERLPMFSQRITEDPHAFDLHTDLGKMFLYVLAVRTGDEKPVAIPKSTETVNELLKTANIYRDDLLNFVTCANLLAVDQSGEQHPVWQATGASHTVQNVPLREIVSLSRIYPAQGKKVWIVENSGVCSTLLDYQRDIPIISTNGQFKLAALMVMDLLIKENCSLHYAGDLDPEGLQMAERLFNRYPDHVQLWHMDGKAYKKSAPSKELSQERLAKLDTIEHKTLREVADAMRLSGKAGYQEALVAHMLVDIRSS

SEQ ID NO: 40289 - protein, 542 aa, Streptomyces albus subsp. albus
MGASASGAGQDTNEGARRRLDAYTYLSAPERLEHIAIMRVFCGTLLADLAVPDIMAKLRQSGGSAAGLDADTLTVRLEQLVTWGNLLRSSHTVKASSISEYQRSRSRYQLSKLGERIQRDADGVLAEADAAREVSNELLALVERGLRELADLVTAPGGIEPQDGLERISTLFVQFSEFADSIRDFYAYLGQVLSRYDLDSAEYQGFKELLLDYVEAITEDVAFRAPRISAALDTLWPHIPALLDRLDAHAQGLTGLSAQGEGRLEVRVQRSRGRELADWEGLRGWFRDTDGQGSQVDQLRDATLRALQSLLANAKRMLRSASGEMSRRKDLLRLARWFEEAAPQDAHDIAVAAFGLYGARHLGIPPATDEVVPAYTSWWTGPVVEVPVALRERGSRAQRGRASAAEDHSAQKERLREAARQRAAARAAAADELRSASGRFTDVRLTSAALGLILELLATALGNAQLKRRTGTNGEGPAGFELDSASSEDAELGIRLTVHRTPGNRTVLSSADGDLLLDDLALDIGRISMGADGEAEAEVSVP

SEQ ID NO: 40290 - protein, 442 aa, Streptomyces albus subsp. albus
MTLPSTHDVALAAERRAAARLLLAHPLVASDGPQADLFPLIRRHADWLGKRFQQVLGYRLLVDSSFARLFKAGLGTGSGHRLERSTGTPFTPHTYACLALALSVLVTAPEQMLLSHLVADIRAAAADAGIELEETGRAAGKRTLVAALRQLVEWGVLIETEGQVTAIAQQAGGEALITVDRELARMVVAGPLAQARDGADLVRRAADPGFSGPRTYVRRMLVETPVVHLDELTDAERDWLRTRQRREAQAFSELLGLEMEIRAEGVALVDPEEELTDLHLPGTGTVAQAALLLVERLVERLRPQEPGHPATGGTLVIGVAVPDGLVDEVLAELIVEYGQRSNWQRGYLDDLPAMRETVLDLLVRMRLMARAGRLRAEGEGLPEGYGEEAPEGRTVTDVHGARPGGDGGWVLLAAAARYATLVTVRPAAKARQGTDVQEELPL

SEQ ID NO: 40291 - protein, 1418 aa, Streptomyces albus subsp. albus
MTTDARGLVPLPRAGTATTAAPATSTGIRFRLYRAGIQNVWQYDAQEFSFGDGRLLLRGKNGAGKSKALEMLLPYLLDGDSRALDATGTGRTTLAWLMLDGFEQTNRLGYLWVEFRGTADDGGHRFLTLGAAIRASKSTQKALPTFFVTPLRIGEDLHLVEGGKPLPVDRLKEIVGSDNTTERAVMHRSRVARDLFGITDTTRYRNLTQLLHRLRRPTVGDRIEHGGLASLLSETLPGLDEDVVEKVARNLHDLDAVRDELGRLERTDAALRTFLTSYRGYLAGVLRTSAQRVSHELGVLSQRRRAAGDAAQRTSDLRTQEEESEGRLETLREEEQAARTDLAALHASHAYRSLRELSERRSTVEALHTAAAAAFTTLRNAHDAEEATAERLAEGVEHLGSRLVELGTEHRELLTQAEKAGLPTGHLGEAVALPRTVLAQATETELTTPDGETRTVRHRPVARVDTATTQEELRSWQNQLENAEAVTRNRARMVEEVTRLVSRADEARVGAAQADAERERLEGEAEEAVGRLDISRQKVVEESRAYADRVAEWVAYTRTALGPDCPPLDNVHTSVGCETSADAPFADRTLPPDIDSQARQTAQAALEPYGEELTGRRDALALDVSRLGEELDRLAEQKRDWEQRTDPEPPAPHHRVAARTPGNGAPFYRLVDFADDLAPADRAGLEGALEASGILDAWVGADGVLLDPRTRDTLLRPGAVLPDGPALASALRPAPEPDCGVTSEQVGRLLATIALAPVQETSAHNAVFYDGSWRLGVLSGRHDKGAAEYVGAAVRAETRRRILAELEERIARAELRLAGVREELAVADAMRRALTLAERDFPRARRLADAWSRTESAERTLHALTAKATRAARLAEEARALAVSARAEADATATAHDLPGDPDALDRVRTALAALLGGVGHLRRAVGSTGERLGAHETDAERYGRAREDRLAAEEGYRVHLTGLRTAEQDLRTREVAIGSSEEEILTREKEAKQRIVDAVRDLPAAQRSRDGLHDRRVRAEEDEKRLRGTLTDQETAVIDTGSALRGALGRPEVVLGAGLDRSSLPEYVSDDPGADVRSRLRALRALADTVEQAIGRPKDEVSDSALLIRHTALRDQLAGGYDAQLEERDGIKVCRLVDDHGSHDVAAVGERIAVQAAEARGRLTEREREVFQRFLTGELGDHLSAQVITAANLVAALNDTLRTVRTSHGLGVELLWKLDEDVDADVRAAVDLLRSPSSLRTREQTEQLREVLQRRIEDARRADPSAGYAAHLRTALDYRDWFRFHTFVVEDAAPSRRRKLTGRTGLSQGEQRVLSYLVLFAAAAAHFTSLAESAPYAPRLILLDDAFAKVDEPTHGRLGRILVDLDLDFVLTSERLMGNWPEVPSLHIYECLRDPHVRGVATLHYTWNGRHRRLVSV

SEQ ID NO: 40292 - protein, 434 aa, Streptomyces albus subsp. albus
MERPPSASGVRVSALPSATLEWLTGPGLTRLWESVRKRLESNGVQATGSLRLTAMNPQERNDLSLLLGKPLTGAAVTVRLDVLDARLRASAAGLGLRQTLEEIGPPLTDRRAARADATARREQVWSSLASSLDASPLAGQEWPRQWYDLLRRAGVPRGVTPEAAVWTLQQAVQVLTTLLGPERGSARGRGELAAMATGSAHGLDDGTWLARLVQRGVALAHGTEFPDDAAGRRALWRLVSVTPDEVSSTVLTYGLRPDGEGWRERALRERADHHAEAHLTPRDLHALRLQLPSGTLIHICENPRVVEAAADAACVQPLVCTSGSAATVVFTLLDALATTGCCFAYHGDFDWPGIALANRVIRRYEALPWRMGTVDYEHLAARSQAEGIPQLALDGQSVSADWDPDLAPAMTALGVALHEEATLDLLVDDLSHQA

SEQ ID NO: 40293 - protein, 495 aa, Thermoanaerobacter thermocopriae
MEDKLDLNVIKPIEEVKYLSAENASRYRLIMRYFYEQYQKFKYWLYKEDVYEYVSQFDMFADYTMEKCEQDLKALTEWKNLIATQDTSKASTIDEFKNKKFRYQLSPYSIEIERMTIRLESIVGYGGSLQPSLFERIYRNLIKINEMAKKEDLQEINRWWEDLNTDFENIYHNATDYIASLQSSNADELMKSEQFIIYKDKLIEYLRDFIKDLQRFSVAIESFLKKVSPEIVNSVVDKLCQYEMSIPRIDRVLNEEEVKEDLMDKWNNISFWFTGHNFEDSEAVRLLNISNEIIRKITMYAARIAENRMKAASRKNEYIALSKMFAKASNIKEAHLLSAAVFGCFYTRHIKGDFERKTESVNQSVWEEPPFKVIIKPKTRSYSNSVKTNAIIDRSADKTEMLMDYLNQKNIEDEIIASCIVGNRIRIKDLPVVKPFVRATILKWIGKAMARNGFIGKTEDGRTYKLHMPKNGERAILKCTDGNLDMPDIVIEFVD

SEQ ID NO: 40294 - protein, 383 aa, Thermoanaerobacter thermocopriae
MEELQMLLENFWILREDRENFNKIRDAENKIKPFVEEKLGYRLIINPYIIKLEKVPSDVEEWMGIDAFQMPMDYAFLCLLLAFLEDKGPEDQFVLSNITEYIEAQYDGPDKVDWTLFQHRKSLVRVLNFAVDIGIIKIDDGDHERFSESEDTEVLYENTGISRYFLRSFNREITEDMKIEDFLQEDLNLSTPKDAVIQRRHRVYRKLILSPSVYSEGPDDQDFMYIKNYRNTIAKDLEEYLDAKLHLHKTSAFVLFNDNKYLKSYFPDKNKNISDIMLQVSKIIRQMIGDGKLAYNPDDTIDITEAEFINIILKVKERFSDGWYKSYREMSEKQLIEEVIENMESFKMIKRVEELHSIKILPMAAKLIGEYPPDFEKGEGADE

SEQ ID NO: 40295 - protein, 1388 aa, Thermoanaerobacter thermocopriae
MSEKLAERWMINRIGLLNFWYYDDEIFEFADGRLLLRGANGSGKSVTMQSFIPLVLDGNKSPERLDPFGSKARKLEDYLLGEEEVSGLDERTGYLFMEFKKEKKDSYITIGIGLKAKRHQNMDFWGFVILDGRRIGIDFFLYKMEIGDDGKRAKVPLTKKELKNRIGEGGEVVESQKEYMEMVNKYIFGFSSIEEYDELIKLLIQLRSPKLSKDFRPTVIYEIMKASLPSLTDDDLRPLSETIENMDQIKMHLDVLYRNMAAVKKLKNEYDNYNRYILYEKAGDLVKAYSDLYASKKEYDNLTKDIENYRSTIANLGNDIISLESEREALKKKEEQLSSGDAKKTQKELLEEEDRYKQYLEDKSKKEEELRNKQDKYYGLERKIKNTEEQKYKLDKELQDKLEDISSIAQDIDFMEHEFSVSELKKVYGKEFDFTYWKNELKKHKDKIKRAMSALREEIEANKRYDAALKEQERLKKEREDRAKKLNEAERLFDEQKREYVERVYSWSQGNAELKLLSSQLEGLSRVILAYGEDKGFDDILAFVRKPYEEILNGIQQEILRLQNQREVKENQLHEKEKLLEEWKNKKDPEPERDEQVINNRKRLKEAGIPYIPLYMAIDFKEDVDEETRGNIEAAIEDMGLLDALIVPKEYFEKALQMDSNMADKYVMPGSFNMMLNVSQYFKVVDNEEGVSPEDISDALSNIFVSEESGTTYIDSNGTYGIGVIKGKARDKVKSKYIGSESRKRYREELIKSIQEEIQAIKAEISAIDEEINAKKSRIQRLDYEYSAFPGKEDIEEAYRYLKTAKADYEYTSHKLDEQLFTVKNCFEDLQKKKAVVRELTSGINIHPDIDTYSSAYEYAEEYASGLNEVEILYNKYVLHISNEEMLLQQKQDLEYDIDNLKYEIDVLENKIQSSVKKIEMLKETLKELGLEEIEKELEFCLKRLEEIPKEITNKSAEKAKLEERLQRSLKDLLNIEEEIHLKEEIYNIVEEGLKKELALGFVKQDVEMEDMLKLSKSILSEYKGFFDKAGFDREKFTERLQNVYFETRNELLEYGLSIGNIFDEACEGDNERIKEAKSKQRRLNITANINGKVVSLYTLYSNIEEDIMANESLLRETDKILFEEIIMHNVGIKIRAKIFKAEEWVKKMNKLMSERDTSSGLKFSIEWRSIPASNEEELDTKELVDILKSDADMLKKEVFDKVVNHFRSKVERARRAMEEKNNTETFHKIMKEILDYRDWFEFKLYYRKEGESRKELTDNAFNKLSGGEKAMAMYIPLFSAVYSRYEGAPPTAPRIISLDEAFAGVDDTNIRDMFKLIEDLRFNYIMNSQVLWGDYDTVPKLSIYELIRPKNAKAVLVMKYLWDGKVKHLILPEKEEVAALEVGAVNE

SEQ ID NO: 40296 - protein, 230 aa, Thermoanaerobacter thermocopriae
MNKEELKYFKEKKGYKRIFKGIREKYRSLGRLGGVVKLDNLTEDEKEVLTNHFKKDYRTKKSASIDVAKFEESLKNTRFEEYTLKDILEYYFGEKLTSKKEDMEILAKEREEFFKELFSKYQECKCIDWLKSLYEGTAVGVRTVNQRYLNDRNGLKKDIMYVCDAINNLPVYKGEKKRLPVFSSQIARNPHYFDSNTEAGSMFINALCTLMGLNEVKGSEEISELYYNVG

SEQ ID NO: 40297 - protein, 471 aa, Caldanaerobacter subterraneus
SRYRLIMRYFYEQYQKFKYWLYKEDVYEYVSQFDMFADYTMEKCEQDLKALTEWKNLIATQDTSKASTIDEFKNKKFRYQLSPYSIEIERMTIRLESIVGYGGSLQPSLFERIYRNLIKINEMAKKEDLQEINRWWEDLNTDFENIYHNATDYIASLQSSNADELMKSEQFIIYKDKLIEYLRDFIKDLQRFSVAIESFLKKVSPEIVNSVVDKLCQYEMSIPRIDRVLNEEEVKEDLMDKWNNISFWFTGHNFEDSEAVRLLNISNEIIRKITMYAARIAENRMKAASRKNEYIALSKMFAKASNIKEAHLLSAAVFGCFYTRHIKGDFERKTESVNQSVWEEPPFKVIIKPKTRSYSNSVKTNAIIDRSADKTEMLMDYLNQKNIEDEIIASCIVGNRIRIKDLPVVKPFVRATILKWIGKAMARNGFIGKTEDGRTYKLHMPKNGERAILKCTDGNLDMPDIVIEFVD

SEQ ID NO: 40298 - protein, 383 aa, Caldanaerobacter subterraneus; identical to SEQ ID NO: 40294

SEQ ID NO: 40299 - protein, 1388 aa, Caldanaerobacter subterraneus
MSEKLAERWMINRIGLLNFWYYDDEIFEFADGRLLLRGANGSGKSVTMQSFIPLVLDGNKSPERLDPFGSKARKLEDYLLGEEEVSGLDERTGYLFMEFKKEKKDSYITIGMGLKAKRHQNMDFWGFVILDGRRIGIDFFLYKMEIGDDGKRVKVPLTKKELKNRIGEGGEVVESQKEYMEMVNKYIFGFSSIEEYDELIKLLIQLRSPKLSKDFRPTVIYEIMKASLPSLTDDDLRPLSETIENMDQIKMHLDVLYRNMAAVKKLKNEYDNYNRYILYEKAGDLVKAYSDLYASKKEYDNLTKDIENYRSTIANLGNDIISLESEREALKKKEEQLSSGDAKRTQKELLEEEDRYKQYLEDKSKKEEELRNKQDKYYGLERKIKNTEEQKYKLDKELQDKLENISSIAQDIDFMEHEFSVSELKKVYGKEFDFTYWKNELKKHKDKIKRAMSALREEIEANKRYDAALKEQERLKKEREDRAKKLNEAERLFDEQKREYVERVYSWSQGNAELKLLSSQLEGLSRVILAYGEDKGFDDILAFVRKPYEEILNGIQQEILRLQNQREVKENQLHEKEKLLEEWKNKKDPEPERDEQVINNRKRLKEAGIPYIPLYMAIDFKEDVDEETRGNIEAAIEDMGLLDALIVPKEYFEKALQMDSNMADKYVMPGSFNMMLNVSQYFKVVDNEEGVSPEDISDALSNIFVSEESGTTYIDSNGTYGIGVIKGKARDKVKSKYIGSESRKRYREELIKSIQEEIQAIKAEISAIDEEINAKKSRIQRLDYEYSAFPGKEDIEEAYRYLKTAKADYEYTSHKLDEQLFTVKNCFEDLQKKKAVVRELTSGINIHPDIDTYSSAYEYAEEYASGLNEVEILYNKYVLHISNEEMLLQQKQDLEYDIDNLKYEIDVLENKIQSSVKKIEMLKETLKELGLEEIEKELEICLKRLEEIPKEITNKSAEKAKLEERLQRSLKDLLNIEEEIHLKEEIYNIVEEGLKKELALGFVKQDVEMEDMLKLSKSILSEYKGFFDKAGFDREKFTERLQNVYFETRNELLEYGLSIGNIFDEACEGDNERIKEAKSKQRRLNITANINGKVVSLYTLYSNIEEDIMANESLLRETDKILFEEIIMHNVGIKIRAKIFKAEEWVKKMNKLMSERDTSSGLKFSIEWRSIPASNEEELDTKELVDILKSDADMLKKEVFDKVVNHFRSKVERARRAMEEKNNTETFHKIMKEILDYRDWFEFKLYYRKEGESRKELTDNAFNKLSGGEKAMAMYIPLFSAVYSRYEGAPPTAPRIISLDEAFAGVDDTNIRDMFKLIEDLRFNYIMNSQVLWGDYDTVPKLSIYELIRPKNAKAVLVMKYLWDGKVKHLILPEKEEVAALEVGAVNE

SEQ ID NO: 40300 - protein, 431 aa, Caldanaerobacter subterraneus
MNKEELKYFKEKKGYKRIFKGIREKYRSLGRLGGVVKLDNLTEDEKEVLTNHFKKDYRTKKSASIDVAKFEESLKNTRFEEYTLKDILEYYFGEKLTSKKEDMEILAKEREEFFKELFSKYQECKCIDWLKSLYEGTAVGVRTVNQRYLNDRNGLKKDIMYVCDAINNLPVYKGEKKRLPVFSSQIARNPHYFDSNTEAGSMFINALCTLMGLNEVKGSEEISELYYNVGILIDEISNYVTLSGLLAYEGDTENQVFKAAYESNQVLQVPLLNLSKIERVVSPSKKVYVVENPSVFTSLIDATSKVFPLVCTYGQPKLSSLLLLDMLYKEGTEIYYSGDFDPEGLMIADRLYKRYKDKFHFLRYDVEDYLKSLSNEVINDVRLSKLNKIESPLLFDVAKEMKIIKKAGYQELIIDDIINDIKLIEDGKGKW

SEQ ID NO: 40301 - protein, 525 aa, Actinoplanes awajinensis subsp. mycoplanecinus
MAGQRSGSFGLDDFGVDDRLRLFSYVNADNRLAYLWLLRAFEAARTSYQVVLHTSDVHAALAGLSAAHAECPDPATLELARLLDALVDWGVLDRGQDGTRAATLAEYRNRHSVYQFTEAGYRAHRAVESVLAAGIEDSTLSRLVFADLLADLKALKDANESGDAEEVYRKLNRLDRALADVAERAARFYHMLGDLGRTHDIRPEVFLAHKDALLVHLRDFHDELQRYTPRLREAVHEVEATGLDRMIEAAAEADERLFATPAERISDWARRWQGLRSWLAPSTDVPSEAERLSGATMAAIGDVLALLRRVTEARRGGVSRESQLRHLAAWFTGAGSAEAAHALFEVVFGLGAPRHAGVAYPDPEAVASRLSWWEAPAVELSRSLVQSGRMPGQGNGRPARIDRSEAPRRVLRERQLADERRQTEAAAGLVEHQGLTGEKDSNLSDDQTAALRRLLDIALSARAAGRRDAPLAAAAFGVRLTLHPCPGRFSTVTTDAGRLHLDGYELTVTIAGHTTARRPAEAVTA

SEQ ID NO: 40302 - protein, 441 aa, Actinoplanes awajinensis subsp. mycoplanecinus
MRFAADVADLEIADYQRAVRLVLRHPLITATFPDEKALPRVRRFAADLRTDLSEAFGYRLELHGATARLVRTADRLDPDRGAVSRTGRPFDRQRYAYLSLCLGTLGRAGIQITLSELAESVGGDANRITGLGLDPDVGADRRAFVDAVAWLEERGVLRLADGSSSSWASDPGAGEALYDVARDAVFALFRPPRVLQHIDSVGALLERSPISSGNAERRAAAQAARRAVLERPVVYFDDVPAEVGNHLRGQTLAADLQRLTGLRLERRAEGVLLVDTAGWSSERFPGTGSVAQAAVLLAVAIAERVSDPDGRKARRMPMPDPGEARAKLAGQIDAGLPAGVPLLLDEPDPVDPAGDPDETDQRRLPLITDSFLREATAEVLSAYGSAFGTAWHADPERLRTEAVALLVRFDAVVVVPGGVLARPLIGRYRSTVAQVKQRTLF

SEQ ID NO: 40303 - protein, 1381 aa, Actinoplanes awajinensis subsp. mycoplanecinus
MARFAPTRAGIINLWDYRDEEFLFVDGWLVLRGPNGSGKTKALEVLFPFVLDGRIEPRRLNPFAGEDRTMKSNLLYRGQDSAYAYVWMEFGDGASFVTIGIGLRAHRHNDRVTRWHFVADGRVGVDLSLLDADDRPVSRRDLIDRLGAEAVRDSAEEYRHLVDARLFQLGPARYEQLLDLVLTLRKPQLAKDLNPVELSRTLQRGLRPVEDQLLVEAARSFDDMEAVARTLEGLIAADAATGAFLGVYATYLRTHARSAADALTARRDAAAERRATLEAARHAAEGAQQRAGEATERLRTAEGEPGRLRAHLERLKGSAAYRSHEQLADLERHVTDLAKAARDADELADGERATAGKRQSESVKAATAAQDGRARTGRIAAALAAEAESGGLDWHTADAAPDGLATRLAARSETRRADVRAVRGLADRLAEAERDHVRSADADRDARAAVDDAITAERGAAEALGVARRETAAAVRAWGVQHTALLTELDLPHLPERLAATLTEPDTAPEPAHPAGPDDSRTGDAISLRDLYTEQVAVPVAAIRDEVAALGAEADRRGRERDEVAAERAAIAAEHDDAPPASPTRPAPRTGRSGAPFWRLVRFADGIPDAEAAGIEAALHAAGLLDAWVHPADTDTETALGRGAQDAFLRTTGGQPTPPAGGKTAGQEADPPIGGATLATVLVPEDQEMVPAARITEILSGIALGALTGASGVAGDGRWAQGSGVGRFVKDRCEYIGATARAARRAARIAACDERIAALDTEIARVEAVRQARRTVLAEVAAAGAALPPRTAIHQAERLVDRAATLLRVRREAASEAAGRLDGAVAEQASAGAALRRAVAERSLPVDRVEQTAAALDRFDRFGLELTHAYETAERAAVLADEAAERHAEAEERAESAARTARESRQRHGEKDEELRTLAAAIGAEATQILAEVKDTEQAVTVAESALRDAQAAQSVALQEKAGATARVELGEQAVAEAAAETAREAVRLRPYAQADLLGLMRCPPHLRWPTAGLADLDLDPAVVALHEAVLTATRELSPTESSLKQSATRLTSALTELQAQLPAAGLDHRPEWDTDEGVIVVRVADEQGMTPVAHFAERIAGERRDQEQLLTAAEQRVFEDALLGQLAGQIHRRTIEARDLVDAMDTQMRARRMSSGLTVGVGWRLADDLDPDQREVCKLLERDPARLGPVQLTMLRRHFATRIKAARAQAAEKPYRELLAEVLDYRQWRVFAFTLHRPGGTTEPLTRARHSQLSGGEQSVSLHLPLFAAANALFGSARPDAPRLLGLDEAFAGVDDNGRGELMSLAKQFDLDLFMTGYDLWATHPAVTGCAHYDLSHSTVEHTVSTVLLVWDGTMNVADFDGTLARALGSPETRRVPADA

SEQ ID NO: 40304 - protein, 397 aa, Actinoplanes awajinensis subsp. mycoplanecinus
MPDPGAEPGWQRLLAAARRSLERTGGSLAGSVSLAAPDEAERRVVIGVTGVHRPAGVARVTVRLAELDAFLRAAHGAGLAETVGPFRDRPGERAREAVGRDAALSLAGESRHATQPWYLDFVASLRRDGTLTRIVRAGLPLPAVVTVLDALPAAGEPMPVFAERVLGDTKALTDGPVRGLVLRALAGWHQVPVPAGAEQERALWELAGVVPDDLASQVLVLNLPAGGGLLGEWLTGAAAAHVPFRVTLHQLRLTPPVLAVPEIFVCENPAVLRAVTGRATAPLVCTEGVPSAAVHLLLGAAGPGTVIRWRNDFDWTGVRLTGSALARYPSAVPWRMGAADYAGAAGTGPGLLGAAAATSWDPELGELMTREGRSVMEERLIDTLADDLCGYPGRAVA

SEQ ID NO: 40305 - protein, 542 aa, Streptomyces violaceusniger
MGASASGAGQDGDEEAWRRLNAYTYLSAPERLEHVAIMRVFCGTLLADLAVPDIMAKLRQSGGSAAGLDADTLTVRLEQLVTWGNLLRSSHTVKASSISEYQRSRSRYQLSKLGERIQRDADGVLAEADAAREVSSELLALVERGLRELADLVTAPGGIEPQDGLERISTLFVQFSEFADSIRDFYAYLGQVLSRYDLDSAEYQGFKELLLDYVEAITEDVAFRAPRISAALDTLWPHIPALLDRLDAHAQGLTGLSAQGEGPLEVRVQRSRGRELADWEGLRGWFRDTDGQGSQVEQLRDATLRALQSLLANAKRMLRSATGEMSRRKDLLRLARWFDEAAPQDAHDIAVAAFGLYGARHLGIPPATDEVVPAYTSWWTGPVVEVPVALRERGSRAQRGRASAVEDHSAQKERLREAARQRATARAAAADELRSASGRFADVRLTSAALGLLLELLATALGNAQLRRRAGADGEGSAGFDLDSASSEDAELGIRLTVRRTEGTRTVLDSADGDLLLDDLELKIGRISATADGEAKAEVSVS

SEQ ID NO: 40306 - protein, 441 aa, Streptomyces violaceusniger
MTLPSTHDVALAAERRTAARLLLAHPLVSADGPHADLFPLIRRHADWLGKRFQQVLGYRLLVDSSFARLFKAGLGAGSGHRLERSTGTPFTPHTYACLALALSVLVTAPEQMLLSHLVTDIRAAAADAGIELEETGRAAGKRTLVAALRQLVEWGVLIETEGQVAAIAQEAGGEALITVDRELARVVVAGPLAQARDGADLVRRAADPGFSGPRTYVRRMLVETPVVHLDELTDAERDWLRTRQRREGQAFSELLGLEMEIRAEGVALVDPEEELTDLHLPGTGTVAQAALLLVERLVERLRPQEPGHPATGGTLVIGVAVPDGLVDEVLAGLIAEYGQRSNWQRGYLEDLPALREAVLDMLVRMRLMARAGRLRAEGEGLPEGYVEDVSEGRTVTDVHGARPGGDGWVLLAAAARYATLVTVRPAATARQGTDVQEELPL

SEQ ID NO: 40307 - protein, 1421 aa, Streptomyces violaceusniger
MTTDARGLVPLPRSGPATTAAPATTTGTRFRLHRAGIQNVWQYDTQEFSFGDGRLLLRGKNGAGKSKALEMLLPYLLDGDSRALDATGTGRTTLAWLMLDGFEQTNRLGYLWVEFRGTTDDGSHRFLTLGVAIRASKSTQKALPTFFVTFLRVGEDLHLVEGGKPLPVDRLKAIVGSDNTTERAVRHRSRVARDLFGITDATRYRNLTQLLHRLRRPTVGDRIEHGGLASLLSETLPGLDEDVVEQVARNLHDLDAVRDELGRLERTDTALRTFLTSYRGYLAGVLRASAQRVSHELGVLAQRRRAAGDAAQRTSDLRTQEHESRGRLETLRDEEQAARTDLAALHVSHAYRSLRELSERRGTVEALHTAAVAAFTTLRNAHDTEESTAERLAEGVDHLGSRLAELGTENRELLTHAEKAGLPTGHLGETVALSRTVLAPATETELTTPDGETRTVRHRSAARADTATTQEGLRSWQNQLEGAETVAKNRARMVQEVTRLISRADAARAGAAQADAERERLEGEAEEAAGRLDVSRQKVAEESGTYARRVAEWAAHTRAALGPDCPPLDAVHSTVGHETSADAPFADRTLPPDIDSQAWRTAQAALEPYGEELTGRRDALALSVGRLDEELDRLTEQKRDWEQRTDPEPSAPHHRVAERTPGSGAPFYRLVDFADDLAPADRAGLEGALEASGILDAWVSADGVLLDPRTRDTLLQPGPVLSDGPTLASALRPAPEPGCGVTSARVERLLASIALTPAAQNSAHNAVYHDGSWRLGVLSGRHDKGDTEYVGAAVRAETRRRILAELEQRITQTEQRLADVREELAVTDAMRRALTRAERDFPRAQNLANAWSRTESAERTLRDLTTKATRAARQAEEARALAVSARAEADSTATAHDLPIDPDALDRVRTALAALLSGVGHLRRAVGGTGERLGANQTDAERYERAREDRLAAEESYRVHLTGLRTAEQDLRTREEAIGSSEEEILTREQETKQRIANAVRALPGAQRALDDLHDLRVRAEEDEKRLRGTLADQETAVIDTGSALRGALGRPEVVLGAGLDRSSLPEYVSDDPSVDVRSRLRALRALAGAVEQALGRPKGEVSDSTLLNRHTDLRDQLAGGFDAQLEERDGIKVCRLVDDHGSHDVAAVGERIAVQAAEARGRLTEREREVFQRFLTGELGDHLSAQVITAANLVAALNDTLRTVRTSHGLGVELLWKLNESAVEADADVRAAVDLLRSPSSLRTREETEQLREVLQRRIEDARRADPSAGYAAHLRTALDYRDWFRFHTFVVEDAAPGRRRKLTGRTGLSQGEQRVLSYLVLFAAAAAHFTSLAESAPHAPRLILLDDAFAKVDEPTHGRLGRILVDLDLDFVLTSERLMGNWPEVPSLHIYECLRDPHVRGVATLHYTWNGRHRRLVSV

SEQ ID NO: 40308 - protein, 424 aa, Streptomyces violaceusniger
MSGLPPATRDWLTGPGLTRLWEGIRKRLESNGVQATGSLRLAALNTQERNDLSLLLGKPLTGAVVTVRLDVLDARLRASAAGLGLRDTLEELGPPLTDRRAARADATARREQVWSSLASSLDASPLAGQEWPRRWYDLLRRAGVPRGVTPDAAIRTLQQAVQVLTVLLGPERSGNALGRGELAAMTTGSAHGLDDGTWLARLVQRGVALAHGTEFPDDAAGRRALWRLVSVTPDEVSSTVLTYGLRPAGEGWRECALRERAKHHAETHLTPRDLHSLRLRLPAGTLIHICENPRVVEAAADAACVRPLVCTSGSAATVVVTLLDALATTGCRFAYHGDFDWPGIVLANRVIRRYDAVPWRMGTADYEHLAARSQTEGIPQLALDGQPVSADWDPDLAPAMTALGVALHEEATLDLLVDDLSRQM

SEQ ID NO: 40309 - protein, 538 aa, Streptomyces ciscaucasicus
MEGDELHRSPSYDETGRDSRDSGSDAWQRLSAYAYLSAPERLEYVAVMRVFCGTLLADLAAPDVLAKLAQTGGPGAVLEAETLTARLEQLVRWGNLLRSTHTVTATSIAEYQRSRSRYQLSKLGERVQRDADEVLADADAAREVSSELLTLVDRGLGDIAVMVAAPGGADPRQALEKISTLFVQFAEFAESVRDFYAYLGQVLARYDLDGAEYQGFKELLLDYVQAITEDVSFRAPRIAAHLQKIWPHLAALLSSIDAHAAGLGALSEALPETRVQRSRGRQLADWEGLRDWFADTDGHGSQVDQLRDATLRALQSLLANAKRMLRSASGEMSRRKDLLRLAAWFDAAQPDEAHDIAVAAFGLYGARHLGVAPDPDASVPAYVSWWTGPVVDVPVALRERGSRAPRGRAAIVEDHSEQKRRLMEHAREQAAARQEAAAELRSASGRFDQVRLGSAALRLLLELLAAALGNSQLRKDEGDFRLDGAQAGDADLGIRLMAWRTPGRHTLLRSVDGELLVDDLTLAVESASAPTAAEEASA

SEQ ID NO: 40310 - protein, 447 aa, Streptomyces ciscaucasicus
MPLPSAHDVALAAERRSAARLLLAHPLVTSNGPHSDTFPLIRRHADWLAQRFQQVFGYRLLVEASYARLFKAGLGPGSGHRLERPSTGTPFTPRTYAYLTLALSVLVTAPEQLLLSQLVADLRAAAVDAGIEVGDIGRQAERRTLAAALRQLVDWGALVETEGQVAAVAEERGGEALLTVDREIARAIVAGPLTQSRDGADLVRRAADPGFGGPRTYVRRRLVETPAVHLDDLTGAEREWLRTRQRRESQAFSELLGLEAEIRAEGIALVDPDGDLTDLHLPGTGTVAQAALLLVGRLVDRLRPEDPGHPAVGGRLVIGVPVPDKLLPQLLDELVEEYGGRSNWQRGLVEDRDALLAAVLDLLVRMRLMAPAGPVRADGHDLPEGYEDAALDGRSVTDVSGARSRHGTGGWVLPAAAARFATTVAVASRTQPPSVNDTSQQPQEPTR

SEQ ID NO: 40311 - protein, 1395 aa, Streptomyces ciscaucasicus
MNRSPSPHRYRLHRAGIRNVWQYDEQEFSFGDGRLLLRGKNGAGKSKALEMLLPYLLDGDARALDATGTGRTTLLWLMLDGFEQTNRLGYLWVEFARTDEEDSEQHLTLGVAIRASQSTRTAKPFFFVTPLRVGHDLDLAPAGQPLPVDRLKSLVGPENVTDRAVEHRARAARRLFGLGDPARYRNLLHLLHRLRRPTIGDRIDSGGLVSVLAETLPALDDEVVEKVARGLDDLDAVRTDLGRLERTDEALRTFLTGYRSYLHGALRRRAEDVHDELERLAEYRRSAGEAVKNAARLRAHEEELAARLDALKAEEEAAETDLAALYASAAYRSLRELGDKRATVTALHSAAATAFKALRQAHGSQEETGRRLTEEADRLGADLIDLSTAHGEMLREAERAGLDPAHLGEPAQATAIPVTQAASAQLTSPEGDLHLVRHSEVLAVDTRACAEALHTWAAQLGAAGPVIRNRTRTVTELTALIHTTHRAQREAQEADAARERLEEQADDARERAGRRRAETARAGVAYADAVRTWTERLHSLTGVALDAVDALMAHDPAEGPLPAHAPDEVADTARSVVEPWLAELAEQRDARAVAIREVTAERDRLRNQRDDWEARTDPEPTPPPHRSAPRTPGTGAPLYRLVDFADGLEPTDRANLEAGLEASGLLDAWVCADGTVLDPATRDILLAPGAPPAGPTLTEVLRPVVATDSGVTAGQVERVLRAVALVTDATAAGTAESALGTDGFWKLGVARGRHTKQTAEYVGAEVRAETRRRALAELDLQLADKDQELDDQQRRLQTLTAHRTQVADTLSHPPTGRTLTDAWARTTEAERAAQVLAGKASTAARQAEQARARAVAARREAEATAGAHDLPVDPTALDSVRLCLDRLATGTERLRGRLRAVDSSADAHRQDREGYERALTSTREAESDYAGPLTRLEAARRTIRGLEEALDAPEQEILAREDAAKRRLDAVGRQLPGAERDVNAVHDERVRAEEDERVRREALAQQESVAVQSGGRLRAALALPGVTRGAGLDMPVTDTAEATSAVDSDEQIEVHDRAKALRRLVTAVRERLDAERRDLSDTALLNRHTDLRDQLSGGYDATLEEHDGIKVCRLVDDHGPQDIATVGERIAAQAAEACERLTEREREVFQRFLTGELGDHLSSQVLAAGALVAALNGTLSTVRTSHGLGVTLDWKLADGVEADVKAAVDLLRSPSGMRTRDQSEQLRDVLQRRIEDARRADPGAGYAAHLRTALDYRDWFTFTPWVVNDAAPTSRRKLSGRTGLSQGEQRVLSYLVLFAAAAAHFTSLADTAPHAPRLILLDDAFAKVDEPTHARLGRILVDLDLDFVLTSERLIGNWPDVPSLHIYECLRDPHVRGVATLHYTWNGRQRRLVSV

SEQ ID NO: 40312 - protein, 432 aa, Streptomyces ciscaucasicus
MTDPRARDAKPLNAETLAFLTRPGLARLWTAARTRLERNGLQPNGTIRLQRLTAQEREDLSLLLAKPLSTEAASIRLSDLDARLRTSAVGRGLAQTLAALGPALTDRRAARDAATAQRAGLWSGAEAALVRTPLASQPWAFGWLEETRRAGTVARQDPHTAATILDQAIRALATLFPGPDAQPTPAVWGRGELATRTTGSAHGLDDGTLLSRLVLRGIALACRADFPADAPGRRALWRLASVTPDEVSSTVLTYGLRPIGATWGERTLRERADHCMETHLTLRELRALQMELPYRTRIHVCENPRVVEAAADAGCSEPLICTSGSATTVVLTLLDALAAAGCAFVYHGDFDWPGITLANRVVERYGAEPWRMGTEDYEYLATRAQAHGTPQLLLSGPCAEAVWDAELAPTMEALGIALHEEAALDLLLEDLG

SEQ ID NO: 40313 - protein, 529 aa, Streptomyces avermitilis
MEGNEGKPVRGAEADAEAWQRLSAYSYLSAPERLEYVAVMRVFCGTLLADLSVPDLLAKLAEKGGPGAALDAETLTRRLEELVRWGNLLRSTHTVRATSIAEYQRSRSRYQLSKLGERVQRDADEVLAGADAAREVSSELLALVDRGLREIAAMAAAPGGADPQQALERISTLFVQFAEFAESVRDFYAYLGQVLARYDLDSAEYQGFKELLLDYVEAITEDVSFRAPRIAAHLDAVRPHLPALLDRVDAHAAGIGALAHGLTETRVQRSRGRDLADWEGLRDWFTDTGGHGSQVDQLRDATLRALESLLANAKRMLRSASGEMSRRKDLLRLAAWFDAAEPEEAHDLAVAAFGLYGARHLGVAPDPDRSVPAYVSWWTGPVVDVPVALRERGSRAPRGRAAAAEDHSEQKRRLMERARQQAEARQAAADELRSASGRFEQVRLSAPAMRLLLELLTTALGNAQLHKDAHDFLLDGAQAHDADLDIRLTAWRTPGRSTVLRSVDGDLTADDLTVAVESASAPAVGEASA

SEQ ID NO: 40314 - protein, 445 aa, Streptomyces avermitilis; identical to SEQ ID NO: 38536

SEQ ID NO: 40315 - protein, 1399 aa, Streptomyces avermitilis; identical to SEQ ID NO: 38537

SEQ ID NO: 40316 - protein, 445 aa, Streptomyces avermitilis; identical to SEQ ID NO: 38538

SEQ ID NO: 40317 - protein, 525 aa, Streptomyces griseoruber
MTSQTSAPSEPAEPPAPPPVDYTPFTHLTVPNAPLYRQVTRAFLVAKERFAVHLRPEDVHAALDADTRPADIEAVVKALDSLVAWGNLRADPDHARVTAVEDFYRRRFIYQLTRAGEAAEAALGTYDEALGRRGELQAVALHDIVTQLRALLVIVAEDEPDPAKAYVALSVLTARFTDLADNARAFMGSLQRTIDLHDIEVEAFLAYKDRLIQYLERFIQDLITVGGRIALLIGELEQQGRVGPLLRLAAVREAADASPEDAEHAEAVAYERWAGRWSGLAQWFVSGEGRESQARLLRGRALGAIPQLLAVVRQLNERRAGRSDRSADFRTLARWFAEAPDDEARHRLWRVAFGLYSSRHLTVDGDTLTERTAAPEPASTPWGRSRPLRISPQLRRTGSYERRGKPRRVADRGEARRRLAEIAARQAGEVKEARERLATGGPVRLSRLGELDPIAFQLFLRLLGDALATWRPGMTTTAATSGDGSMEVRLTALDDGSMAEVRTPDGVFRGPDHLIDIVDLTAEIR

SEQ ID NO: 40318 - protein, 399 aa, Streptomyces griseoruber
MTGPLTEILDGQREADLQRAARALLKEPLLTADGPYADEFRLVRRHAAALREWFERNVGWTLRTDADAARLRKTPGTLADVTHPAREAARTALPFNRRRYVLLCLALAALERGEAQVALGRLAEQVVLAAADPGLVAAGITFTLERRDERVDLAAVVRLLLRLGVLRRVAGDEEAYVSGSGDVLYDVRRRVLAGMPATLRGPSLVEAGDFEERLVEMTAQTALDSDELRFRAIRWKLTRLLLDDPVLYYDDLADDELAYLTRQRGFITARISELTGLVAEVRAEGIAMVDPLDDLTDVRMPEQGTHGHVTLLLAQHLARAARPVTAAELALRVRELAVEHGGFWSRSAREPGAEPALVEQALAKLEALGLAERTERGVVPRPALARYAVGEPVLKESGR

SEQ ID NO: 40319 - protein, 1390 aa, Streptomyces griseoruber
MTALPAPVLPRPAPGRWRPLRIGLVDLFHYDIEEFWFRDGRLLLRGNNGTGKSKVLALTLPFLLDGDLSARRVEPDGDPGKRMEWNLLLGGEHPHPERLGYTWIEFGRLDETTGEPYFRTLLCGLKAVTGRGIARHWFAVTDQRIGAGLDLLDATGTALSRDRLAEAVGSHGMVYDTARTYRRAVDEALFGLGERRYGALVDLLIQLRQPQLSKRPNEAALSRALTEALPPMDQAVVADAAEAFRSLDEEKEELRAAREAEQASSGFLDHYRRYARVASRRRARLPRTEHARYEHIQRELLKAQGDREQAVTDRAEAQERATALDERAARLAAEDAALRTGPEMRDARALDQAAVDASRTAAELTRSEADRQTASGAHTRALGRLTTATNRLTAAQETLDDLQGRVAESAEAARLHAPRTEGAPAAVLRRAADEATAGRRRAVEHVEALATRAERAEEKRGAARLRADEADEEAVHSGVRLAEAEEGAAGAGHALVAAVRDRLTRCVELRVTGLPGILDALQGWVSSLDGPHPARAAATAAHSALASHLADQAAALAHREAATAERQRLVEQELAALETGGQRGPSAPYTRTSDVRARGLGAPLWRLVDFRPQLTEAERAGLEAALEASGLLDAWVRPDGTAVAADGHDVLLDPLDPPAPRSGGGLDRALCPAVNHADVGAAAVGEQTVQRLLTSIGLAGKNDDAPTEDAPGTGGHRTWVSMDGRFRIGALTGSWAKDSAQYVGEGAREQARRARIGELRIEREAWETEREQLAEALRAVAGRRGVLDAELAAVPGDDDLRHAHARVTAAADAMQRALTRQRERAAELDRASDDADRAAAELGETAAAMNLPTDREELGKVRQALADHTAHLAALWPALRERADAGHAVAGEQAETGRAELLVSALAERATEAARLAAAADQHLRTLRSTVGAAVAELQRQLEETAAAARVCQTEQQRAQADIRDADRRAGHAEGRIERLAEDVTDATAAREGAIAALQRFVATGLLAVALPDIAVPDDDSGAWAATPAVSLARVIEARLSATDDSDAAWERVQKRVSEELGRLQDALSRHGHTATARPSEDGMRVDIVYQGRERAVPELAEALATEVAELTRILSAHEREILETHLITEVAGTLQELIGAAERQVQAMNRELEERPTSTGMKLRLVWRASRRAPQGLAPARERLRQSADAWSPQDRAAVGAFLQEQIARRQADDSAGSWLEDLTAALDYRAWHEFGVERHQHGKWVPATGPASGGERVLAASVPLFAAASSHYASASGAHAPRLVTLDEAFAGVDDDSRAKCLGLLRAFDLDVVMTSEREWACYPQVPGIAIAQLARVDDIDAVLVTRWEWDGSDRRRGPEPGSTAFARVPAQSAAARDAPGEQESLWT

SEQ ID NO: 40320 - protein, 517 aa, Streptomyces resistomycificus; identical to SEQ ID NO: 40040

SEQ ID NO: 40321 - protein, 428 aa, Streptomyces resistomycificus; identical to SEQ ID NO: 40041

SEQ ID NO: 40322 - protein, 1382 aa, Streptomyces resistomycificus; identical to SEQ ID NO: 40042

SEQ ID NO: 40323 - protein, 420 aa, Streptomyces resistomycificus; identical to SEQ ID NO: 40043

SEQ ID NO: 40324 - protein, 503 aa, Streptomyces sp. RV15
MDPVDDAAFGIDAFSLDDRLRLFHFAAAEKRHEYLWLLRAFDRGRANYQVLLHASDAVGLLERLAADHPAAGVVGGSAGVQPLLDALAEWQVLDRSYDGTRAANLAEYRNRHYVYQFTQAGYRAYRAVEDVLGASLEDAQLSRLVFPDILGDLHALAEANTAGDGEEVYRKLGRLDSVLNEMAQRAARFYLMLGDLARTNDTRPEVFLAHKDTLLAHMREFTAELGRYAPLLAEAVEKAAATGVDRMIEYAAEADERLFRSPAERLADWRHRWDGIVHWFAEREHSETERLQDATVTAIRSVLALLRRVTEARRGGVSRESQLRHLAQWFTSCESDEDAHALFQAVFGLGAPRHIAVPYADPERIPSRTSWWEAEPVELARTLVQSGRTPALHGPGRIERDDDRRALLRAGQIKEQAERRGAANSLASDGVYGRTLDEPETRALLALLDVTLAARVPASRRVTAASGSAHGVRLTLTPAEGFTTVDTVRGRLHLDGLRLEVTP

SEQ ID NO: 40325 - protein, 474 aa, Streptomyces sp. RV15
MSRVAEGVSPLELADYQKAVRLVLRHPLVTSGYPDRAALATVRRWADQLRTDLMEVLGYRLVTTADTARLQRAQDGLDATRPALTRAGRPFDRRRYAYLVLTLAALGRHGAQVALGELADAVAADAVRIDGLGLDTARKPDRDAFVDAVTWLTERGALTLADGSATAWAGDPERAEALYDIDREILLAVHHPTRVLQHLTSVTALLDSSGALGLSAGRAAQRRDQARRARRLVLENPVAYYADADTELLGQLRAPALAEDLERLTGLSVERRAEGVALIDTSGRLSDVRFPGGGTVAQAALLLAARISAAVQRSGRHALELLPAPTAAERLAARARRIDGALPSRGTVAELTELAEPDEESAYETVVDADHEPGETRYPFVTDSWLRGRLKEIIGEYGAGFAADLRGDPDRLLGQALDLLAAMSLIVRVDGGALALPLLARYRGVTARVKTRTAPQPPAQTALFDDETAKDPTP

SEQ ID NO: 40326 - protein, 1365 aa, Streptomyces sp. RV15
MSTPAPTPAARYVPTRAGIINLWDYRDEEFSFAGGWLVLRGPNGSGKTKALEVLFPFVLDGRIDPKRLNPFAAEDRTMKSNLLFRGQDSALGYVWIEFTHRETGEAVTCGIGLHAQRHRDTPARWHFVAEGRVGEDFSLLTDDDRPMTRKQLAAELGRELIASTADYRAAVDQRLFGLGRERYEQLLTLILTLRRPQLAKNLDPAKLSDTLTAGLRPLDDDLIAEAARSFDDMESVQRTLEGLAAADDATRAFLASYSTYLRVHARTAADRLTARRDETAERAAALRAAAADLAAAREAQAAAETRAESADASLAAQRARLDQLRSSAAYQAVEQLADLERLVRTCEQTARQATAERERRTAATGRARAEAEHAARIAAELDAAVSRDAATVADHAHTAGLPWTPADAEPARLADRSAALAAARHEGVRAVRAAQQAARGAEQTRDLARGSLDRAQEAVAAAETAETAAEAALESAREEARTVLGRWTEAHGTLLAEEGARRLAEALELTGEADAVTLADAFTDATAPAVQELRDTLAALRAQRTDVERRRAEAEAERDRIAAEHDDAPPPARGRTSDRASGDGVPLWQLVDFGSDLTDHQRADLEAAMEASGLLDALVTAEDTPVAAGHSEGYLRAGAPVGGPSLADLLKPEAPEDLDGDAAIPAARVTAVLRSVAVTGDLGTGTPQIGPDGRYAAGVLVGAHTKEHAEYVGATARARRRAARIAACEALLAELAAELDELGRVQARTDAALDAYAAARAALPRTTGITQALRELDRAAARLRATRDAADAAQASYDESVAACSVAERALRRTAAEHGIETERVDAVETATRAFEAAVRELTARRREHARQTEAAQAGADRLTAAAEDEEAAADTERAARRRHAEEAAGLEALQAAVGAEAQEVMRQVQEAEDGIDALAREAEAARTAQHAAIAGTASAEARRTAAAEAGAVAAAEEKDTARGLRPYAARELLDILRCPPGLAWPAQEADWAGEALPPAVVAVHEAILAATRDLTPTETSLKQSVTRLTKALDDLQAQLAAAGQDYRPEWDGSDGIIVVRVADEEGPLPVAAFAQKISSHRRDQAELLSESEQRILEDALLTRLAQQIHDRTVDARDLIRRMNSDMRRRTMSSGTTVGVSWLLADHLDDEQRAVCALLDADAARLGPDGLTRVRTHFAAQIKTARARHRDQPYRELLAEVLDYRRWRQFAFQLVRPDKSEERLTRARHSRLSGGEQSVSLHLPLFAAAHAMLNSADPHAPRLLALDEAFAGVDDTGRGELMSLAAQFDLDLFMTGYDLWAAHASVSAAAHYDLAHTAVDHTVSALLLVWDGDRLLADDTGDLTAALGSPGTRRVPTPEEAAVVD

SEQ ID NO: 40327 - protein, 430 aa, Streptomyces sp. RV15
MSTEEREGHGYDELRDEGWGRLLAAARRRLERTGGALDGDIGLTRPSEAERRTVIGITGRYRPETAKRLAVPLSDLDGYLYGRYGTGLLQTLGRLHGPLRDRPAERAEEEARRDDALKSAHSSRLAGQGWFAAWLERIAADGTLTRLVRRGDAPLLDAAVRVLERLTGDGDRSAGSPKRVPGVLPLPVLAEWATGDTKALVPGAPLEQLVLRALAQRTGGGSEVPPDRAGRRALWESSGAIADDLASQVLVLNIGARGDTVVCDWLRDAAGFGIPFRLTLHQLATDPVVPAARTIFVCENPAVLRAAAGELRSASRVAALVCTEGVPSAACHKLLGDAVRAGARLHWRADFDWAGLRITANAMARHGARPWRMTAADYTAALGKGGSTPLAGPPAASPWDPGLALAMEASGSTVMEERLLPALLSDLTRA

SEQ ID NO: 40328 - protein, 491 aa, Clostridium sp. C105KSO14
MEYFEPINETSYLSVPNAPVYRKIMRCFYREYEKMHFQIYKEDIFQLLKQDETFTGYTMEQLMTDLEALVKWKNLTPIQDPGRVYTIADYKNKQYRYTMSEYAVEIERLTVRLENLFLESGNLSTNFFVRLEKSLQKAEEIKDSSLKEINEWWGLLQEDFKRLNQNYQDYLRDFYSGKTEQLMKSVEFVVHKDKFIKYLNEFVQELQRHSKRIEQILSDNMLVIEEYILSKVIQSELDIPHAVLQLHGNAEPSIRENVMGKWNSLKNWFIDSQGNECECKKVLKITNDVIRSIIQNAALIVQLQNGGISRKDDYRKFLELFLQCEDLEEAQKLSAHVFGVQKIQHFKTLEPREGEGINDSIYKDEPAVFLLKPHTRAYREKKDRRGFTDKSLEKYMQREKYLQKIKRQKEIVMYYIKDNKITFSEIEEVISEETRITFLQWITQANMNSRKTGRTEYGQEYRLTQTKGKCVLRCEDGDLVMPAFVLEFITL

SEQ ID NO: 40329 - protein, 378 aa, Clostridium sp. C105KSO14
MNEFRTLLENFWICKDTDKETYYRVKRDIPNFQRFIREQLGWKLVHTENLLKLEKRPAHAEAFMGIGEFMEIRDYCILCVVLMYLEDKEEQEQFLLSELIDYVEAQLKSYVSIDWTSFTQRKSLVRVLQYMEKLQMLLVYEGRSEAFGSEAGQEVLYENTGYSKYFATSFPTGISIFESWEDFEKTDFEEFQENRGALRINRVYRQLAVCPSMYWENSEDADSLYLKNQRQWVAKYINDNMGGNLDLYKNMACISLDGDDCYGSVHPRDAMLPEIVLLVCGRIQKEVSEGNLEKQENECIYMTRKRISDVILSCRREWSSGWSKEYREMDEELLVEHVLKYMKTWLMIRNDGTQIALFPSVGRTAGVYPEDFKGGTGE

SEQ ID NO: 40330 - protein, 1355 aa, Clostridium sp. C105KSO14
MKDRFKMNRIGFVNFWLYDEEEFEFVDGKLLLRGQNASGKSITTQSFIPFILDGDRTPSRLDPFGSSDRRMEYYFLGEEGKDESTGYLFLEFKKERSEEYRTIAIGQRAKRGKPMDFWGFIILDGRRIGYDLKLYKEIGSSKIPYDRREMKTELGDDNFFTTSQSEYKKAVNQYIFGFRKAEQYEQFIKLLVKVRAPKLSKEFKPTKVYEILNDSLQTLTDEDLRAMVDAMEKMDEIQESLEILKRAFDDVKIIRNEYTRYNQYMLAKKAQAYIAMKQKIETEQCQLDIQEQKRQETEEARNSKSRRLADLEEQKKLKGIERAGLLDADLEGIDRKLEQARGEKEEAAGKVADWESKIRDYQEMIWRGERRMKEIMACLEQIQQEIGEAKLELGEQQEIIQWDQHEAALQMIDRGEHEKSGEIVKSLDSLKKLLAECKREIREYEERSRQYDELAAQLEKLHTEKAEAQQNFKAAQEDVVRCVDQWITDIYAAEKKSSQWSPDSGILPILVEKIREYQSAADAETVQALLRTDYERQRQGLMDLKSSLEYQKKIQEEELDQEKEKLTCLRNSGELEPERDESIERSRKALKRAGIKAVPFYKTVEFSKNLDETYCARLEAQLQKMGILDALVVSADDFENIRKRCPGFLDTVLYVKGNGGSGFSGLTVSEELEPALKETVQRILSNIYEDKEDGQGIYLGKDGTFKQGILAGKAGKTGSAEFVGVLARKRRKEQKIRELEGRISEITEIIVSLEKEITEVQEHLEKLQEEYQKLPGFSEINAALDQERECEYKLQRTCEECGKKEAQERQLIFKKNQQYQTMLQKCKPFPYGRTEEAYEEANDALEEYSRIWQEIRQAMLQLRTAQENLSTEKDRNVQSEQLMDDAFAEKRSWSAKEKESEIQIRQFEEYLNRPEIAKKAGRLKQLKKELEEIGTECDTLKEDLVILGERLRVILEDGPKLKESLRQKIIAETCLRNYFEEELALKLVFDRESQGIFECAKRAVSVLRESDKNREPTDLLQALHQVYQRHNGSLVNYGTSLEECFDTPVEAALETEAAGAIRKRVRVVSSWNGKRVYLEEFYGILKQGIDETELLIQKKDRELFEDILSQTISRQLTDRIAESRKWVSDMSQLMREMDTSMGLIFSLDWKPCKAENDMELDTAELEQILLRDHMLLTIEDIEKVAAHFRSRIRMEKLKLEEKGDMINYMDLVRDALDYRKWFEFHMYFRRGEGERKLLTNAAFNRFSGGEKAMAMYVPLFAAVNAQYKKAEQEDHPRIIALDEAFAGVDDKNISSMFELVHKLDFDYIMNSQALWGCFETVKGLRIAELSRPQDSQIVSVIRYTWNGREKILDVQ

SEQ ID NO: 40331 - protein, 432 aa, Clostridium sp. C105KSO14
MCNNKECANYFKSQRAYHRCFEEFRKKWKSYGKAAGRITLKQTSEEERRAVGGIIGKVFYEETIRFSFLEFEQGLQKTRFAPVDMKAVLEEYFGEPLITTQGRQREEQERRKKFLDRSCGYFEENAGREAAALAWLRKMISEKKYGYQLLMREYAKDEKQAELLVRNVGNAVMKLKELTDKEDEYPLAVLAAEITDNPHYFDRSTTAGLLFVHAICCCENMELPEDAHQWRKLLTQVSIVPDNISSMVHGYGLRLLTKQGWHGAYDTFCERKEPYVITMENMKGIIGVQAVGEKAYIVENEMVFSYLIHNLKNSDYTLLCTSGQPRSVAQVLITYILASGSKIYYNGDIDPDGLCIADRLWKKFGDRIHIWRMSPEDYDKSLSKERIGDIGRAKLENIGHPILKKTAECMKEKQLAGYQENMLKELLEDMQN

SEQ ID NO: 40332 - protein, 497 aa, Thermobifida cellulosilytica TB100
MTAYTYLTVPERADYIAVMRVFTGTLLADLSAHEVAEKLAHSGDPKPVDLVALRLDQLRAWGALLPSARPVRAATVTEYQRSRGRYQLSPAGEMVQRHSDELLAADSVREVSRELLGLVAEGLTALRDLAQEPGGVAGQDALGRVSTIFAQFERFVESVREFYAYLGHVLNRFDLGDTEFRVFKDVLLDYAETITEDVARQTPVIREALDGLWPVLPDLLARIDAADQGLSALGDSDVRIRRSSGRHLRDWQELRGWFIDSGGRGSGVGQLRLATMKALQSLLGNAKRMLRSSAMGELSRRNDLLRLARWVDAADDSQAHDLVAAAFGMYGVRHLGGARGDRDTATSSTSWWHDDPVDVPVSIRERGDRRPRGAVRREGEDYTQARRDLLRTAREREERRAAGAAELVAAAGREDTVVFSAAAFELFNELLGRAMAQPSGEPGSRVFRTADAGLRLSLEVREQADRTTVVHSRGGDLVLEGCTVHLSSSRTREATGS

SEQ ID NO: 40333 - protein, 445 aa, Thermobifida cellulosilytica TB100
MKPLADDRAAKVEIREAMRLLLRTPLLTARRDPEGFSLVRRYADELKSEFHQFLGYRLVVEGRFARLHKPGLGPDCGRRLTRATTGTVFSPRTYTYLVLALAATVTAPEQMLLSELVAEIRLAAADAAIDLGDPDGAQKRHLTAALRTLIEWDVLTETEGSVDALLADDEREALLTIDTDLARRIVSGPLGASRTPEEFLRAAERPDRDSPRLAVRRRIVETPVVYLDDLDETERAWLRRNQRREQLNFHEILGADLEIRAEGVALVRDQDDFSDIDFPGTGTVAQAALLLVERLLETERPEQAGHPATGGTLVIGVAVPTERLDAILTDLAAEYASAWAKSYVTDVSTLRADVCRLLCDMRLMAPVAPTRAERAARERDTAAEHPNRQVTDVSNARGQLATPPPRPEAGHWVLLAAAARYRPTTSGRTDRPRRHTTPSPKGGAR

SEQ ID NO: 40334 - protein, 1403 aa, Thermobifida cellulosilytica TB100
MSDTGAVRPLPAPRPLGFPHRFRLHRAGIHNVWQYDQVFHFGTGRLLLRGTNGAGKSKALEMLLPFLLDGRTRSIDSTGSGKTTLKWLMLDGYRDSVNRLGYLWVEFHRTDPEGREHLLTLGAAITASQSAKRADAEYFITDIPVGPRLPLHDRTRRPTVRELRETVGEGCHFTQASAYRAEVMRRLFGVQDSGKYHNLLHLLYQLRKPTVGDRVLAGELTKILDESLPPLDDEIIDTVARNLNDLDSVRDELARLEQTTTAVAQFLRDYRRYLHGVLRGRVDDVRGFLGELAQRRRAAGDRQREHAELVEREREAAAEAETVAAQLETARGDLATLVNSSAYQALGDLREKQETVRALHTGAVNTWQGLHRTLTTEHGQAERLTEEFTTIAKALVDLRDRQRGLRDAAHHCGIDGTLLGTLPQPVRDTSTAVPSTPLTSPDGERVEIARPRLAALPDRLAGHLRDTAAKLHGVEQIRRNHVRTVADVRSLFQQAEQAWHVARGAEAEADRCEDELARAHERHTEHAAALLEHAERYAEAVRSWAEALPETPSQESRPVVALAAVGAETEGSVADRVPGPETPEQVAEAARLLLAPRLAELDTERDRVGAAGQAAAQRAADLERELAEWQRRADPEPPRPDWAVAPRPEDAGAALYRLVDFADHLDAAERAGLEAALQASGLLSAWLDPAGRLRDSRTRDLLAVPGRPVDGPSLADVLRPVATETVSETAVADVLRTIALAGTETAAEHWVALDGRWRLGPLRGTHGKQQAEYVGAGVRAETRRRRIADLTARLEEARAAAEAFADQLAAIDERREGLRRALGALPSSRAFVSAWEAHRLTEDDIATAAEKLRTARRRAETTRAEATAAHARARAKASSERLPEEADGLDRLAVALERFQGTLARFVDDVERLAGAVEKFEVSRSALAATGETVQHAVDDYTSAFDRLTTEQRKLALLRDSLGAGEEELRQREAELRRRIGAAEQHLPRLTRHVQDLHDRRIAAEVEHRRATEARAQQEAATVEAAGRLLGPLGSPGLAAAAGITGAADMVDRFDAAQEGPVRDRIAALARLAGEVAAALGPPKSDVSANTLLNRGNELKDRLAGGYDATFRLAHGDIQMWELADDTGTHDIATVGQRLEANLAADRDRVSAREQEVFQRYLLGELGDHLTHQLLQARQAVQRMNRTLQDVRSSHGMGATVEWKLSPGASPDVQLAVALLDETSATRHPDDAARLRDALRRHIETIRRDDPTAGYGVHLRAALDYRTWFEFHPYVLGADGKSRRAFNHRIALSQGEQRVISYLLLFAAAASHFTSLAETAPHAPRLILLDDAFAKVDEPTHARLLGLLIDFDLDFVITSERLWGTFPNVPDLHIYECLRDPARRGVATVHFTWNGRERRLVST

SEQ ID NO: 40335 - protein, 423 aa, Thermobifida cellulosilytica TB100
MTDGLPPQIRRHLDRPQLSRLWDLLHDRLRRNGLAVRGRLRVPETTPEEREALSLLMRRTLTAENVTVDLADLDARLRASAARRGLVDVVAELRGTITDRPRELRDQRDARQHLRESAQSSAARLGADPWVQQWLDELFRSGILGRLTPTEAADLVDRAVRVLEGIPALSGNGTGTVGRHELAERVTGTAHGLDDTSLLARTVQRALALALDLPLPADAAQRRWLWAEAGVSTDNVSSTVLTYGLRPAGPDWLARQLRERAEHHAETHLSLRDLRRLRWDFPGTDPVVYVCENPRIVEAAADHGCAAPVVCTSGNATTVVLTLLDALCAAGAVLHGRCDFDWPGVAMMNRLVTRYNVQPWRMRAGDYEEHVTRARQRRTPLNPLSGPAREADWDPELAAAMHSLGVAVHEESALDLLVSDLSG

SEQ ID NO: 40336 - protein, 510 aa, Burkholderia oklahomensis EO147; identical to SEQ ID NO: 39657

SEQ ID NO: 40337 - protein, 424 aa, Burkholderia oklahomensis EO147; identical to SEQ ID NO: 39658

SEQ ID NO: 40338 - protein, 1393 aa, Burkholderia oklahomensis EO147; identical to SEQ ID NO: 39659

SEQ ID NO: 40339 - protein, 510 aa, Burkholderia sp. BDU8
MQSNATAAELFRHLSAEKSTFYRCIMDVFAAAKRQYRLQLRPDEVLAEANWPEGTPRIEEVNAALVQLTEWGNLESQPDTARVSSLSDFYRARFLYRLSHGGEAVEASLAVFFQTLQRRAELQTVALEDIASRLQALRQLLDDDTPEDGLDVAKTHQLLRDLVGVFRDLAENAQAFMAGVARSLELQQAEASAVVAYKRRLIDYLDRFLGDLVRRSDSIARLIQQLAPRIDSVFLQVAEREARDAAPEDMQNQADEKLRRWRAWRERWKGLRGWFLSTGLEPPQAELLRARARAAIPLLLGAIATLNERRSGRSDRSADFRMLAHWFAACGSDSDAHRMARAAFALHPARHYSLNPQADDDQPASTPWADAPPLQINPRLREYGEAAPRGPLARVRDRSAERALMAEQLAEESRQVDAARQRLATGRPVRLSELGELDVHAFGLFLNLLGEALTEQAHPDQTVERQTGDGLLYIRMEPLDVTMEARITTPAGVFAGRDHLLTIAFTQEPT

SEQ ID NO: 40340 - protein, 424 aa, Burkholderia sp. BDU8
MTARSSWKHDSQRIGELQRVQQQDEFRRALRALLLQPLMAPDHDAFPAVRRQAERLRDWFAREAGWPLHVEREGARLFKRPANLADDTRGLPNYDRQRYALLCLACAVLERADPQITLQLLGERLMQLASDPALVSCGFQFTLGSAAERRDLVAVCRTLLDFGVLQRVAGDEENFVHENGWTQSDALYDVQRRMLAGILAAVRGPSTWRVEDAPIDFEDRLRSLVAEHVADSEQGRRDALRHHLARRLLDDPVIYSASLDSEYLAYFVNQRGAMAARLCEATGLTAEQRAEGLALTDESGELTDISMPAEGTEAHATLLVAEFLAARLREAPEIALTAQDAVAAFLRGAAEQYGRYWRKSAREPGAEIELAEIALDRLERLQLIARIHREIRPLPAIARFALGDPEVRSKTAGAVAPESSLIDA

SEQ ID NO: 40341 - protein, 1393 aa, Burkholderia sp. BDU8
MTDILFDSPQTPRPVLPEPRRERWQPLRIGLVELFHYDSEEFWFRDGHLLLRGNNGTGKSKVLSLTLPFLFDAQLRPSRIEPDGDNGKKMAWNLLMDGYKRRIGYTWIEFGRRQADGTARYLTLGAGLSAVTGKTQVDSWFFLIEGTSGEQDPRIGQDLWLTSEQRVALTRERLRERLEERGQGTVFENARNYRRAVDERLFHLGEKRYEALMDTLIQLRQPQLSKKPDEAGLSHALTEALPPMPQELLADVAEALNQLEEDREQLNSTRQLEQAVRHFEQRYRAYAGTLTRRQARELRQAQTAFDNASDDRNKAQNALRTAKEEEAAAICTLEAAKRAQTTARERLETLQSDPANQDANRLSQAERDAKDRKEEAARAAEQREGARRHLKREEERSRESNQRTEAARSEIASARTQCTSDAQSAGTTFALSGNPLVALPLDELAELPAEELTSAVAELRDAANKRRENIRYLEQRHVAVAAKQSTLQARQAAQRDRHAELEEATERRAEADLEAETEGNALIDAWTDYCAGLEQLRFESEDALSELTGWTARPKGADPVHSALTAAYSRTLAQHATRQTELATRRRDLDQERRALVEEQEQLAAGQDATPPVPATRGANVREGRIGAPLWQLIDFHPHVTPQQRAGLEGSLEACGLLDAWVTPNGNVSDAAGRPIWDTHWRRRPAVAGESLLSLLSPATPDGCAVDPALVEALLASVACGPENDLVVESWIAADGRFRLGALTGAWHKPEAIYIGHTARAQARQRRMQEIALRLRQLDAETAILSQAFEALAADRAKAKEELDGAPSDTSLRQAILATTSAEREVLQARARLDQADNQCRVAETELYAAREVLENDAIDLQLPLAQADLAPIANAVDRFTDARHTLAQASREWRSAWPDHLQQREREAEAHVALEQREEELGTANERAEKASARYAVLQESIGAKVETLRQQLNEATQNASLAAADAEHKQIALTAAAEARAVADTQATSADRVLAERTDIRAQAIERLRRFTESTLLASALPDLLIPSAGVPWTIDPALQLARRAEQALAHIEVDDASWGRIQRQVSEDLTELQRSLSALGHQAASEPNDWGFTVHVTYQNRSERPDTLAAHLADDIAQRSELLSAREREILENHLQAEIAAEIQRLMRAADKQVDAINEELNKRPTTTGVRYRLQWQPLPPEEGGPLGLEIARERLLNTSSDLWSAEDRRAVGTMLQQQIVMERARAENDATASGFSLNDQLARALDYRRWHRFRVQRQRDKSSNWQKLSGPASSGERALGLTVPLFAAIASFYGRGGNPHAPRPMLLDEAFAGIDDAARAHCMGLIREFDLDFVITSEREWACYAELPGVSICQLQRREGVDAVFVSRWTWDGRAKRRENDPDRRFHDT

SEQ ID NO: 40342 - protein, 431 aa, Burkholderia sp. BDU8
MTRTDTLTNPDARLQRLLGGAELGSLRQRMRRYFERVDNGTAGSSLLLTQLSPAEHEALGLLIGRPSRTSRSVRIDIERLDIALRDAGIADSLRAALERIDGPIVSRAIVRASTHAEWTRLAALDSRHAMLRAWLNVPTALGLLKRLSRQDPATGQQLLERAEATLQRLPAQGITRSQLAAETLGNAHALDSGEPTATIVLAAWRNMERTAACEDGLRDADGNPDNSPQPDDRVRDIWARAGVLVNELARPALFLNLPVVGGDSAGGTPGEPDYASLRRLLRTPPAWAVHGTTVFVCENPNFVAIAADRLGAASAPLVCTDGMPAAAQRTLLTQLVHAGAHLMYHGDFDWPGLQIGNQVIGTWHAHPWRFAARDYEAAAANSPPVRYELYGAWVSASWDATLATVMQRYGIAIAEEAVAAALLEDLSRRCQ

SEQ ID NO: 40343 - protein, 510 aa, Burkholderia ubonensis
MQSNATTAELFKHLSAEKSTFYRCIMDVFAAAKRQYRLQLRPDEVLAEANWPDGIPRIEEVTAALTQLTDWGNLESQPDTARVSSLSDFYRARFLYRLSHGGEAVEASLAVFFRTLQRRAELQTVALEDIANRLEALRQLIDDDTPENGLDVAKTHQLLRDLVSVFHDLAENAQAFMAGVARSLELQQAEANAVVAYKRRLIDYLDRFLGDLIRRSDSIARLIEELAPRIDSVFLQVAEREAQDAAPDDMQSQADEKLRRWRAWRERWKGLRGWFLSTGMEPPQAELLRARARAAIPLLLGAIATLNERRSGRSDRSADFRMLAHWFAACGSDGEAHRMARAAFALNPARHYSLNPQADDDLPASTPWADAPPLQINPRLREYGEAAPRGPLPRVRDRSAERALMAEQLAEESRQVDAARQRLATGRPIRLSELGELDAHAFGLFLNLLGEALTEQAHPDQTVERQTGDGLLYIRMEPLDITTRACITTPAGVFAGRDHLLTIALTRGAA

SEQ ID NO: 40344 - protein, 424 aa, Burkholderia ubonensis
MTARSSWRHDSQRIGELQRAQHQEEFRRALRALLLQPLMAPNHDAFPAVRRQAERLREWFARETGWPLHVERESARLYKRPADLANDKRGLPNYDRRRYALLCLACAVLERADPQITLQLLGERLMQLAFDPALVSCGFHFTLSTATERRDLVAVCRTLLDFGILQRVAGDEENFVHENGWMQSDALYDVQRRMLAGMLAAVRGPSTWRVEDAPIDFEDRLRSLVAEHVADSEQGHRDALRHYLARRLLDDPVIYSASLDPEYLAYFVNQRGAMAARLCEATGLTAEQRAEGLALTDESGELTDIAMPAEGTEAHATLLVAEFLAARLREAPEIALTSHGAVAAFLRDAAEQYGRYWRKSAREPGAEIELAEIALDRLERLQLIARSHREIRPLPAITRFALGDPEVRSKTTDAAAPELTLIDA

SEQ ID NO: 40345 - protein, 1393 aa, Burkholderia ubonensis
MTDTLFDAPQTPRPVLPEPQRERWQPLRIGLVELFHYDSEEFWFRDGHLLLRGNNGTGKSKVLSLTLPFLFDAQLRPSRIEPDGDNSKKMAWNLLMDGYKRRIGYTWIEFGRRQADGAARYLTLGAGLSAVTGKTQVDSWFFVIEGKSGEQDPRIGQDLWLTNEQRIVLTRERLRDLLEERGQGTVFENARNYRRAVDERLFHLGEKRYEALMDTLIQLRQPQLSKKPDEAGLSHALTEALPPMPQELLTDVAEALNQLEEDREQLNNTRQLEQAVKHFEQRYRAYAGTLTRRQARELRQAQTAFDNASEDRNKAQSALRTAEEAEVTAIGALDAAKRTLKTARERLETLQSDPANQDANRLGQAERDARERKEEAVRAAEQHKSAQLHLEREQERSRESGHRTDAARSEIASARAQCASDAQFAGTAFALSGNPLVTLPLDELAQLSAARLTSAMVELRDAANKRRANIRHLEQRHAAMAAKQSALHTLQAAQRDRHAELEEATERRAEADLEAETASNALIDAWTDYCAGLEQLHLESENALSELAGWAARPQGANPVHSALTEAYSRTLAQHAARQTELDTSRRDLDRERRALTDEQERLAAGQDAAPPVPAARGENVRVGRIGAPLWQLIDFRPHVTSQQRAGLEASLEACGLLDAWVAPDGNVSDAAGKPVWDTYWRQRPAAAGDSLLSLLSPTTPDGCTVDPALVEALLASVACGQEDDLAVESWIAADGRFRLGALTGAWHKPEAVYIGHKARSQARQRRMQEIAVRLRQLDAETASLSLAFERLATGRAKAKEELDGAPSDTSLRQAILAAASAGREVLQARTRLEQADNQCRAAEDELYTAREVLENDAIDLQLPLAQADLAMIAGAVERFTDASHTLAQAGREWRSAWPAHQQQQGREAEVRIALEQRGEELSTANERAENAQERYSVLQEAIGMKVETLRMQLDEAARNARDSATDVEHKQTALTAAAEARAVADTQAASADRALAERTEIRAQAIERLQRFAESTLLASALPDLPIPPAGVPWTIDPALQLARRAEQALAHIEDDDANWGRIQRQVSEDLTELQRSLSALGHHAASEPNDWGFTVHVTYQNRSERPDTLAAHLADDIAQRSELLSAREREILENHLQAEIAAEIQRLMRAADKQVNAINEELYKRPTTTGVRYRLQWLPIPPEEGGPLGLDIARERLLNTSSDLWSAEDRRVVGAMLQQQIVIERARAEDDAAASGFSLNDQLARALDYRRWHRFRVQRQRDKSSNWQKLSGPASSGERALGLTVPLFAAIASFYGRGGNPHAPRPMLLDEAFAGIDDAARAHCMGLIREFDLDFVITSEREWACYAELPGVSICQLQRREGIDAVFVSRWTWDGHAKRREDDPDRRFPDT

SEQ ID NO: 40346 - protein, 431 aa, Burkholderia ubonensis
MTQTDTPTSPDARLQRLLGGAELGSLRQRMRRYFERVDNGTAGGSLLLTQLSPAEHEALGLLIGRQSRTSRSIRIDIERLDITLRDAGIANSLRAALERIDGPIVSRALVRASAHAEWARVAALGPWHDMLHAWLKAPTALGLLKRLSRQDPATGQQLLERASATLRRLPAQGITRSQLAAETLGNAHALDSGEPTATIVLAAWRHLERTAAREDGSRDANENPDDAQQPDDRVRDIWARAGVLVNELARPALFLNLPVADGDWAGGARGEPNYASLRQLLRTPPAWAVRDKTVFVCENPNFVAIAADHLGAASAPLVCTDGMPAAAQRTLLTQLVRAGAHLMYHGDFDWPGVQIGNQVMGTWHANPWRFAARDYEAAAANPSPVRHELSSASVSASWDATLATVMQRHGIAIAEEAVAAALLEDLGRRRQ

SEQ ID NO: 40347 - protein, 510 aa, Burkholderia ubonensis; identical to SEQ ID NO: 40343

SEQ ID NO: 40348 - protein, 424 aa, Burkholderia ubonensis
MTARSSWRHDSQRIGELQRAQHQEEFRRALRALLLQPLMAPNHDAFPAVRRQAERLREWFARETGWPLHVERESARLYKRPADLANDKRGLPNYDRRRYALLCLACAVLERADPQITLQLLGERLMQLASDPALVSCGFHFTLSTATERRDLVAVCRTLLDFGILQRVAGDEENFVHENGWMQSDALYDVQRRMLAGMLAAVRGPSTWRVEDAPIDFEDRLRSLVAEHVADSEQGHRDALRHYLARRLLDDPVIYSASLDPEYLAYFVNQRGAMAARLCEATGLTAEQRAEGLALTDESGELTDIAMPAEGTEAHATLLVAEFLAARLREAPEIALTSHGAVAAFLRDAAEQYGRYWRKSAREPGAEIELAEIALDRLERLQLIARSHREIRPLPAITRFALGDPEVRSKTTDAAAPELTLIDA

SEQ ID NO: 40349 - protein, 1393 aa, Burkholderia ubonensis
MTDTLFDAPQTPRPVLPEPQRERWQPLRIGLVELFHYDSEEFWFRDGHLLLRGNNGTGKSKVLSLTLPFLFDAQLRPSRIEPDGDNSKKMAWNLLMDGYKRRIGYTWIEFGRRQADGAARYLTLGAGLSAVTGKTQVDSWFFVIEGKSGEQDPRIGQDLWLTNEQRIVLTRERLRDLLEERGQGTVFENARNYRRAVDERLFHLGEKRYEALMDTLIQLRQPQLSKKPDEAGLSHALTEALPPMPQELLTDVAEALNQLEEDREQLNNTRQLEQAVKHFEQRYRAYAGTLTRRQARELRQAQTAFDNASEDRNKAQSALRTAEEAEVTAIGALDAAKRTLKTARERLETLQSDPANQDANRLGQAERDARERKEEAVRAAEQHKSAQLHLEREQERSRESGHRTDAARSEIASARAQCASDAQFAGTAFALSGNPLVTLPLDELAQLSAARLTSAMVELRDAANKRRANIRHLEQRHAAMAAKQSALHTLQAAQRDRHAELEEATERRAEADLEAETASNALIDAWTDYCAGLEQLHLESENALSELAGWAARPQGANPVHSALTEAYSRTLAQHAARQTELDTSRRDLDRERRALTDEQERLAAGQDATPPVPAARGENVRVGRIGAPLWQLIDFRPHVTSQQRAGLEASLEACGLLDAWVAPDGNVSDAAGKPVWDTYWRQRPAAAGDSLLSLLSPTTPDGCTVDPALVEALLASVACGQEDDLAVESWIAADGRFRLGALTGAWHKPEAVYIGHKARSQARQRRMQEIAVRLRQLDAETASLSLAFERLATGRAKAKEELDGAPSDTSLRQAILAAASAGREVLQARTRLEQADNQCRAAEDELYTAREVLENDAIDLQLPLAQADLAMIAGAVERFTDASHTLAQAGREWRSAWPAHQQQQGREAEVRIALEQRGEELSTANERAENAQERYSVLQEAIGMKVETLRMQLDEAARNARDSATDVEHKQTALTAAAEARAVADTQAASADRALAERTEIRAQAIERLQRFAESTLLASALPDLPIPPAGVPWTIDPALQLARRAEQALAHIEDDDANWGRIQRQVSEDLTELQRSLSALGHHAASEPNDWGFTVHVTYQNRSERPDTLAAHLADDIAQRSELLSAREREILENHLQAEIAAEIQRLMRAADKQVNAINEELYKRPTTTGVRYRLQWLPIPPEEGGPLGLDIARERLLNTSSDLWSAEDRRVVGAMLQQQIVIERARAEDDAAASGFSLNDQLARALDYRRWHRFRVQRQRDKSSNWQKLSGPASSGERALGLTVPLFAAIASFYGRGGNPHAPRPMLLDEAFAGIDDAARAHCMGLIREFDLDFVITSEREWACYAELPGVSICQLQRREGIDAVFVSRWTWDGHAKRREDDPDRRFPDT

SEQ ID NO: 40350 - protein, 431 aa, Burkholderia ubonensis
MTQTDTPTSPDARLQRLLGGAELGSLRQRMRRYFERVDNGTAGGSLLLTQLSPAEHEALGLLIGRQSRTSRSIRIDIERLDITLRDAGIANSLRAALERIDGPIVSRALVRASAHAEWARVAALGPWHDMLHAWLKAPTALGLLKRLSRQDPATGQQLLERASATLRRLPAQGITRSQLAAETLGNAHALDSGEPTATIVLAAWRHLERTAAREDGSRDANENPDDAQQPDDRVRDIWARAGVLVNELARPALFLNLPVADGDWAGGARGEPNYASLRRLLRTPPAWAVRDKTVFVCENPNFVAIAADHLGAASAPLVCTDGMPAAAQRTLLTQLVRAGAHLMYHGDFDWPGVQIGNQVMGTWHANPWRFAARDYEAAAANPSPVRHELSSASVSASWDATLATVMQRHGIAIAEEAVAAALLEDLGRRRQ

SEQ ID NO: 40351 - protein, 510 aa, Burkholderia ubonensis; identical to SEQ ID NO: 40343

SEQ ID NO: 40352 - protein, 424 aa, Burkholderia ubonensis; identical to SEQ ID NO: 40348

SEQ ID NO: 40353 - protein, 1393 aa, Burkholderia ubonensis
MTDTLFDAPQTPRPVLPEPQRERWQPLRIGLVELFHYDSEEFWFRDGHLLLRGNNGTGKSKVLSLTLPFLFDAQLRPSRIEPDGDNSKKMAWNLLMDGYKRRIGYTWIEFGRRQADGAARYLTLGAGLSAVTGKTQVDSWFFVIEGKSGEQDPRIGQDLWLTNEQRIVLTRERLRDLLEERGQGTVFENARNYRRAVDERLFHLGEKRYEALMDTLIQLRQPQLSKKPDEAGLSHALTEALPPMPQELLTDVAEALNQLEEDREQLNNTRQLEQAVKHFEQRYRAYAGTLTRRQARELRQAQTAFDNASEDRNKAQSALRTAEEAEVTAIGALDAAKRTLKTARERLETLQSDPANQDANRLGQAERDARERKEEAVRAAEQHKSAQLHLEREQERSRESGHRTDAARSEIASARAQCASDAQFAGTAFALSGNPLVTLPLDELAQLSAARLTSAMVELRDAANKRRANIRHLEQRHAAMAAKQSALHTLQAAQRDRHAELEEATERRAEADLEAETASNALIDAWTDYCAGLEQLHLESENALSELAGWAARPQGANPVHSALTEAYSRTLAQHAARQTELDTSRRDLDRERRALTDEQERLAAGQDATPPVPAARGENVRVGRIGAPLWQLIDFRPHVTSQQRAGLEASLEACGLLDAWVAPDGNVSDAAGKPVWDTYWRQRPAAAGDSLLSLLSPTTPDGCTVDPALVEALLASVACWQEDDLAVESWIAADGRFRLGALTGAWHKPEAVYIGHKARSQARQRRMQEIAVRLRQLDAETASLSLAFERLATGRAKAKEELDGAPSDTSLRQAILAAASAGREVLQARTRLEQADNQCRAAEDELYTAREVLENDAIDLQLPLAQADLAMIAGAVERFTDASHTLAQAGREWRSAWPAHQQQQGREAEVRIALEQRGEELSTANERAENAQERYSVLQEAIGMKVETLRMQLDEAARNARDSATDVEHKQTALTAAAEARAVADTQAASADRALAERTEIRAQAIERLQRFAESTLLASALPDLPIPPAGVPWTIDPALQLARRAEQALAHIEDDDANWGRIQRQVSEDLTELQRSLSALGHHAASEPNDWGFTVHVTYQNRSERPDTLAAHLADDIAQRSELLSAREREILENHLQAEIAAEIQRLMRAADKQVNAINEELYKRPTTTGVRYRLQWLPIPPEEGGPLGLDIARERLLNTSSDLWSAEDRRVVGAMLQQQIVIERARAEDDAAASGFSLNDQLARALDYRRWHRFRVQRQRDKSSNWQKLSGPASSGERALGLTVPLFAAIASFYGRGGNPHAPRPMLLDEAFAGIDDAARAHCMGLIREFDLDFVITSEREWACYAELPGVSICQLQRREGIDAVFVSRWTWDGHAKRREDDPDRRFPDT

SEQ ID NO: 40354 - protein, 431 aa, Burkholderia ubonensis; identical to SEQ ID NO: 40350

SEQ ID NO: 40355 - protein, 517 aa, Frankia sp. DSM 45899
MEENGGSAAEGESAVQDTAARRALFSYLTAEAADDYMAVMRLFSETLLADLSAAEVAMQLVERGRELDADTVETRCRQLVIWGNLVPSVRETRVRTVAAYHRSRSRYQVSKLGGRLHREAEEIMRATEGAREVARELLARVAETLRLILLQVSYRERPIDSELLAGQVTGVFNDHRLFHESVTDFYAYLSGVLTRYDLAGEEYAQFKNLLLDYVDLIGADVSRNAPEILGQLKTLLAPSLIDTLLENLPEPPATGDALIVVERLPGRTREEWEQLAAWYGASSVRSGPEQLRVAARQALGQLIANAKRMLAASGTGVSRRADLLKLAGWFHGADSETAHLLFDAAFGAYPARHLLLGPEEQDLRAGPSTSWWVAAPVDVPVSLRERGDRTVRGRASRVPDTKEQTDLLMNAARERAQAREAAAAELLAAGSLHRSRLSRAARDLLLELLPPVLSATAGGEAEADHHASDLRLALRGVPARGQLTVINGDDGTLTVDGLLLSVVPLAGPGRARTAASA

SEQ ID NO: 40356 - protein, 413 aa, Frankia sp. DSM 45899
MRPTPETGTAASSARERVEAARALLAHPVLTAASHPDELSFVRLHAPALRGMFKAQLGYVLVVEASFARLFKAPLAPGAPSRPARRRDNSPFAPVTYTHLALLCAALLAPGTGEMILISALIEQVRADAATIGVPIGDTLPERRALVTAVELLVRWGVLIEADGTAMAWGERQIEEALLHVARNQLPHLLARSLTGVATPDELLAPDPQAAEQPRRSLRRRLVESPLVRREDLTDAERDVLSRERSELTRALAENFGLTLEVRAEGALAYDATGSLTDEPFPGTGTIRQAALLLVGALLAELEPRPGDTAVLRDGRAVAGLVVGWPDVEATLARLSSQYGKAWSSDALDDPRLLRDSVAATLAEVGLASILPGGLVIHAAAARYRPQPIIAPPTRAARRLDKGRAAYHPELEL

SEQ ID NO: 40357 - protein, 1397 aa, Frankia sp. DSM 45899
MQQTLALTEGTEDRFGPTPIRRHPYRWRLSRAGFVNVWHYYDNTFDLSGGRLILRGTNGSGKSRALEMLLPFLLDADRRNMGTGTAVRMEDLMTAGAGEQTNRLGYMWLELRRDVEADEDPASGYLTLGALVRFSASTKEAKVWYFTTALRVGHELSLLTADRKPLGRKELGQAVGEDRISDGPEPHRERVRAEVFGLTGGDASKERFNGLMKLLHTLRSPDVGNRIEEGRLPQIVSDALPPLSEEALTDAGQQLDGLTSTRDEQQRLEAAHGQVVAFLDSYRRYVAGVLTRSLTGTRQRAASCLETEAEAVRRRAIATGLESELLETLERRQFLADQVSELAAALEALKESDCYRGAKELTELSATVSSLAETARAKLELAQLRREGEVELVGAANALLTDMSTAVDELSERIDQARDQLTRVRLTAHELPASVGLVRTPPERRSELVRVYRDAPPVPTLRPAADVPRLVPADLIGLRAAAGSLREAADLRAARATSRVADARQLSDDRAGVQRAVETADDAAVEAETAASRAEQQADERDREAVGLVESWRAWLGNPGTGDLLGDVDWSAQPSLGPLLLDRLVLCGTEADGPVDLSELDRAADDAAAGARDRLAGELHRLDADDTADRRVVELLVTERRQLEASRDDPPLEPFWVTAVRGAALWQCVDFAPGQSADEQAGIEAALLASGLLTATIDARGQLTAASGQLLVSPIGPRAAVSVAAKLVPDPAGPIEPGVISALLGRIGLADPSAAMWVAPDGSWANGPLRGRHTVPAPRHIGAAAREAHRVQRLREIGAELEELAAAARARVERCARVEERKKAIRGHLRSAPRSKPLSDARVRAASEERQATQAATKAARLRAKADRLAIALAESEKAHRAACAEFGLPVDADSLVDLARAATVAAGTCGAVIGQVDVLTGLAERHQRAVGALAAAAEPRGRAEGDAELAWNEWHTGDTRIQALRRALGADPARVLEELKAIEASQVAAKRKLGAAETAVGELRTTAATAAAQADNADQKVRDEQAALAEQVDAVRAQLGQPGVVASAFTAKPAEPFADHTARAVAADAAELLAGLRRSRIEENALIRAQQVFDREIAASYEVIVTRHSEVLLYELADADGRRPLVEAAADLARKCDQGREALTEREQRVFTEFILGEVGEELRGRLYQAEDLITAMNRSLRSIQTSHGIGVRLTWKLAADNDAAVSRIRQLVMTAASVRSQAQDAELLELLRERVAAEALAEPNAGYALFLRKALDYRTWHTVEVIITGPEPGQERRISRRAKLSQGETRFVSYVTLFAAVDAYLSGLDDTATALRLILLDDAFAKVDDPTIAELLGLLVRLDVDFAMTGHALWGCVPQVPALDIYEICRQDGGGPAATVHVRWDGRNRHFLHSA

SEQ ID NO: 40358 - protein, 477 aa, Frankia sp. DSM 45899
MTSPPTGALPAQVQAYLEAPVLRPLWVAARFRLERNGLQATGTLKVDLDETAAAQLSGLLGVRVTAGTKRPVGLAELDAALRCSKAGRGLVSVLEHLDGRPLHDRTAARRATDEQWAQAWRGLDEALAIAGLAGVPWVSGWIADLRRTGILTRAGADTAGRALACAASTLGLLARTSATGLRTGFRTGLETGPETMSAGPFGGDDPVGWEIASLATATTGDAHGLDDSRLTAAAVLRAAAIASGRPAPLTSAQRRELWHALGVATDGVSGTVLVWSLRPPGDDAWSAMMRQRRDLGLVTHLTLHELGRAGEVALGSPDQTVSICENPQVLQAAARAGAPAPLICLSGSPAEVGTQLVQALVRGGVPVRYHGDFDWPGIAIAGRVLALGAVPWRLSASDYLGAVAGVEASGGVPLAGSPAATPWDPDLATAMGRTGVAVHEEYLLDILIADLMHDTDARAAECDVHPAAAPAALPRTG

SEQ ID NO: 40359 - protein, 506 aa, Bradyrhizobium sp. BR 10303
MSGQFEIATHQDLFRHVTADNAALYRCVLDVCAAAERQLLLYVRPSEILAQAKWLGEPPTTSELDAILDKLTEWGNLDCQADNSRVTSLSGFYRRRMLYRLSKGGVSVEMALSAFAKEMQRRGELQTVALEDIGKSLLTLIHLGRSNDPDVAKIYETLNGLMTVFNNMAETARAFMAGVLRGVDLQDGDVDAVLNYKQRLIEYIRQFVGDLVSRSGAISEDINALQLRIDAMLQSVARRQARNAPPGEELAAYEAELKMWDERWQGLRMWFVGGSNGERSQSEQLRSRARAAIPQLLAAIIAINERRSGRSDRSADFKSLAHWFLDCDGDEDAHRLARAAFALNPARHYAENTAAADVTGVIPWHKAPSIVVPLRLRETGYSMPRGRLPHVHDRSAGRKKLEAQVGEEHAQIEAARQKFATGCPLLLSELWRLNSHEFRFFLDLLGEAIATKAAGDDGVTEIQSNDGLYLIRLEPLDADTEAEIVTEDGVFCGRDHRITITPTDAA

SEQ ID NO: 40360 - protein, 413 aa, Bradyrhizobium sp. BR 10303
MLRQQETQEHAERREAVRALLMRPLLTPTTAEAREALRLVRRHSAYLREWFAREAGWPLRVERDYARLWKRPSDTSDPTRGWANFNRRRYAIFCLVCAVLARSEPQITLSALGDQILSLAKDTDLLNRGFILDMADIHDRRNLASACVALGELGVLNAIDGDAESFVKSGQSEDRSRDVLYDVNRGPLASILACVRGPSTWPENDEPRTTVDRISAITAEIQPETDEGRRDVSRHRISRRLLDDPVVYDGTVDEADMQYFINQRGAMANRLALGTGLVVELRSEGIALCDPDGNCSDVAMPADGTDAHVTLLVADHLAHAGGGVPDRLRIERFVAESAERYGRYWRRSAQGEAGARELTAIAIYRLSQLKLITIEGDRIGVLPALSRYKLGDPDIKNRDDNDRLPDVSEEADE

SEQ ID NO: 40361 - protein, 1378 aa, Bradyrhizobium sp. BR 10303
  MOD_RES (519)..(520): Any amino acid
MNSVLAFNPQSTGPVLPLPGKKRWQPLRTGVVEIFFYDVEEFWFIDGHIVYRGNNGAGKSKLLALTLPFLFDANLSPFRVEPDGDRTKKMAWNLLMGRHKRRVGYVWVEFGRVDEEGNNQFVTLACGLEAVEDRANVESWFFIIDGSRVGQDCSFITPERAVLRRTQLKDGLSDKGGHFFDRADDYRRAVDQRLFQLGEERYRILVDTLIQLRHPQLTKTPDETRLSNALTAALPPVAAEMIDTIAEAMSRLEEDRSQLKSYELAHAAIGKFEQTYRRYAGARIRTFAREVRIARTKFEEASAEVNNADAQLASALHESTAAETANIAAKRQAEAADAAYKGILQHPDGLKAADLATKRNLAEEAEGRLTASEKRSATAAADLKTESERQQTARADLDRAMETLAVNRSKALDLARSVGMIAQFEHAKSYSAWPNELGRDGQTSLQSERGSLLTAIRGRRSSIDAVVELLREVDNKISALANAERDENTARGLLDEAGKTLVAAENALNGEIDALGTAXXWRRHIGACGHLMAIATEDAVDALVEWAHSLEGENPAARELIAECRLAYKRLTEALATLRHQKAAVRAELESMAKQIADLQTGSFERPHIPYTRRADRKDRKGQALWQAVDFVSEADDGVRAGLEAALEASGLLDAWILPDGRMFIGETEHDVSLVSRPLVTGRTLADWLVHCGEPSVQDAVETFLCAVSCTDIDDGAEMWVSPAGHFRLGALSGTWEKSRATYIGHSARERARLKKIEELEATAAALGEQLADLETAITSNAATTEAIEQVERTCPSDTNLRKSHDTVRSATNDLHRATENVAARANGTAVARQALKACSESAEQAALDTALPCDKRALEQARIACDSLSEAHLVVVEHCSNSIRAAQNLQDTNERAETARSRHRAAAEDVKAAAISATSARAIYDALKESVGATSEQWERRLIDAQKRLNDARADVDSTDGRRLSAVAVHTQAVGAHETATQALATRVEERQRAASNLQTLAATGLMAAGAPNVAFPDTGRTWTVDETRGLAAELNQALSDIRDNEWDGLQSKIYGEFVDLQNALAQLGYVPYSNNVDGFGLVVTIAVQNKTGLSPAEVLAQVDTEITQRRTLLTESETKILEDHLQSEMSVQIRNLIQDAEQYVDRVNAEIEKRPTSTGTYFRLRWIPLTEAQGAPADLEDARKRLLKTNADLWTENDRQAIGAMLQRRIEQERLKAEESGGSSLREQLSAALDYRQWHRFVVERNAMGRWISISQPASGGERALGLTIPMFAAVASFYGDEHSTRPRLVLLDEAYAGIDDGVRAHCMGLIHEFDLDFVITSEREWACYKTLPGVAICQLQRHDKFDAIHVSRWRWNGKTRSRMEEPARLMLNRSA

SEQ ID NO: 40362 - protein, 365 aa, Bradyrhizobium sp. BR 10303
MQVGKLNETERTALASLVGRRGGVAASISIDVSAVDRALSDAGIAPSLRTALELLDGPIIHRETELNRIRESWAAVLAGCSHTDLIAYLASPLNFGVLKRLSGNQPDSASLICRQTEDILRRLPAAGVPRAQIAAEHLGDAHGLDSARPVATLTLAVLRSRSSTDTGDDRDTWAAVGILVNELAKPALFLNVPCSGLPVSPGEPQYASLRLLARRPSEWTVARRSILVCENPNLVAILADQLGTACPPVVCVDGHLGAAQRTILKQLKESGADLRYHGDYDWPGIMIANYVIAKYGAVPWHFSAADYVAASKSVPQLAIPLSGRPVIASWDADLTAAMIKTGIKIEEEAIAERIIDLLGKESLHA

SEQ ID NO: 40363 - protein, 408 aa, Streptomyces thermoautotrophicus
MRDAADGHDQLVDVLDRQRDEERRRAVRALLRHPLLTSAEPEAFVLVRRHAAWLREWFAREAGWSLHVEGSVARLRKVPGEHGDATRAAGGPLGAKAFSRRRYVLTCLALAALERAESQVTLGWLVDRILAFSADPELVAAGVEFTLDSREERADLVAVARLLMATGVLTRVAGDEQAFVNRSGDALYDVDRRVLAVLLVARRGPSTVSTRDFAERLRAITEDVVPDTEDGRNRAIRHALTRRLLDDPVLYYADLTEEERAYLTSQRTHLLRRLTEATGLVPEVRAEGIALLDPTGETTDLGMPEEGTDGHAALLLAEYLAAALRERPGEPVAVSDLREHVARLARRHRTHWRKTATEPGAERELTEQSLRRLEALGLVRRDGDAVLPLPALARFAYAEPNIVGETTA

SEQ ID NO: 40364 - protein, 1372 aa, Streptomyces thermoautotrophicus
MRLHAVRTSVPTPNRERWQPLRAGLVDLFYYDYQEFWFRDGRLMLRGNNGTGKSKVLALTLPFLLDGDISAHRVEPDGDPGKRMEWNLLLGGKYEERLGYTWLEFGRITEDGGTAYLTIGCGLKAVAGRGIADRWYFVTPLRVGVDLFLIGPSGTALTKDRLTDAIGTEGYVTQKVELYRRAVDEHLFHLGPERYDALVNLLIQLRQPQLSKRPDPERLSRALSEALAPVDPAVITDIAAAFHDLERQRDELASLRETRNHVARFLDRYRHYARVAARRQAEELRLAQSAYERTGRDLSAVREEIDQARAEQQQAETRLEEIGGALAELTATREELAARPELKSLEDAERYAKLATEAAGSAARRAEEAVRTRDSRKAKRDEAARKAEASRTRVTERLGTAADAASRAGLGLEHAELVERLRLPDGPEDGFADAALDAALQAAEHAAGRRERAAKHVLELAEAAAEADEAVTHARRLLGEREADRDAAAGRKLEAEERVGAEAARLVAAWREYLAGVTELRPPPPDDLLPELAAWAETLDGENPAQAAMRSAASASHVSLAAARARAEAKLRACRDDLRDLRAERERLRSGEHAVPPAPHTRAEGVRDGRPGAPLWQVTDFADGLSAVERAGLEAALEASGLLDAWVTPDGRLLDPGTYDVVVTATRPVAANLGAVLRPAIDADDPQAGALRPEAVAAVLAGIGLGEAGAGTWVDVGGRWQVGPLRGEWAKPDAEYIGHGAREEARRRRLALLEQRISEAEAAVRAAEAELAAVEQRQRVLADELERQPGEQALRDAHGAAVAAARELERAAGRVQRQEEKVKEAEQAARKARRDLDEAASDLRLPTARSALAEVRGAVVAYRAEVLALISEVRQHAGQVAHLATWEAEYLVAEEAVRTAEEQAREAKVTAREAEGRLATLQGAIGATVEELRNRLAATKQRIEELNRESKRLRKRNDELIHKLGQAEGRKQELDGKLGEARRHRDRAAAGFHRFATTGLLAVAVPELDVPSTPWSPDPAVRLARRVEQALGGVEHGDGAWKRVQDEITRRFQELAETLSRHGHHAAAGMEEDCFVVTVTFQGRERAVDELAGLLDAEVEYRQRMLTAKERELLEEHLVNDVASHLQELISEAEAQVAEMNAELAERPTSTGMRLRLRWEPRPDGPAGLPEARRRLLRQEAELWSAEDRAAVSEFLQRRIEEERARDERGTWQDHLARALDYRSWHRFTIERWQDGRWRPATGPASGGERVLTVTLPLFAAASAHYRSAHLHAPRLVMLDEAFAGVDDDARAKCLGLLVTFDLDVVMTSEREWGFYATVPGIATHQLVRRDGIDAVHVTVWEWDGRLPQQVERDFAPRVEEEDQDRGADALW

SEQ ID NO: 40365 - protein, 413 aa, Streptomyces thermoautotrophicus
MSTPDLDRLRRVLGGEDLRWLVDRMWSRLARDLPLDGDVTLRAATPAQRQAVARLLGRAPGRGTSLTVPLPAVAETLRRAGIAPDLRTAVEALRGPVVNRVAEREAAERAWAAAIEPAEAAARLRPALRSWADWLRQTGIVRRLAGADAARGRALVENAVAVLDRLPASGVPLSVLAATATGDGHALDHGRPLATLVLRAAAALGGMPPGGDAEWRRAVWASVGVLHGELTNPVLVLNVPGDAKTATGRALAVWAEAGQPVHLTARQLLRDAPEPPVAGRRVFVCENTSVVAAAADRLGAAAAPLVCVESHPGAAATLLLRILLARGATLHYHGDFDWAGLVIANGVLARFAARPWRMSAGDYLAAAAPGGRPLRGDPVVASWDPALHEAMQARGVAVEEEVVLDDLLRDLAS

SEQ ID NO: 40366 - protein, 109 aa, Streptomyces thermoautotrophicus
QIEAARRRLATGRPIRLSELKDLDRHEFSLFLRLLGEALAAGPPGPDGRIRALSADGTFEITLVPLTDGRIAVITTDDGVLRGPDHEITIVDRTEETPSPAEFAAGAGR

SEQ ID NO: 40367 - protein, 408 aa, Streptomyces thermoautotrophicus; identical to SEQ ID NO: 40363

SEQ ID NO: 40368 - protein, 420 aa, Streptomyces thermoautotrophicus
MRLHAVRTSVPTPNRERWQPLRAGLVDLFYYDYQEFWFRDGRLMLRGNNGTGKSKVLALTLPFLLDGDISAHRVEPDGDPGKRMEWNLLLGGKYEERLGYTWLEFGRITEDGGTAYLTIGCGLKAVAGRGIADRWYFVTPLRVGVDLFLIGPSGTALTKDRLTDAIGTEGYVTQKVELYRRAVDEHLFHLGPERYDALVNLLIQLRQPQLSKRPDPERLSRALSEALAPVDPAVITDIAAAFHDLERQRDELASLRETRNHVARFLDRYRHYARVAARRQAEELRLAQSAYERTGRDLSAVREEIDQARAEQQQAETRLEEIGGALAELTATREELAARPELKSLEDAERYAKLATEAAGSAARRAEEAVRTRDSRKAKRDEAARKAEASRTRVTERLGTAADAASRAGLGLEHAELVER

SEQ ID NO: 40369 - protein, 524 aa, Streptomyces thermoautotrophicus
MEEREARPFAHLDSPLTPLYRRVMRVFVEHKRRFVVHLRPEDVAEALRRDGGAPVSQEAVDKALASLEGWGNLRADPDTSRVTTVEDFYRTRYLYQLTREGEAAELALATYEEAIGRRGELQAVALEDIRVRLRALREAAAASSPDPAVVHNLLLELTNRLDSLAANASAFMGSLQRMIDLQDVDEDAFLAYKDRLIHYLERFVSELVVKSYDIAATLRGFDDAQVDRLLRLAAEREAADAAPDMAAGGDDDLGGVIGNKLAEWRGRWSGLRSWFVGDRTHPSQAALLRQRTRKAIPDLLATISVLVERHAGRSDRSADFRALARWFAQAPTEADTHRLWRAAFGLSSARHLTVGAADPGEDVPATTSWLDAPPVTVAPRLRATGRYQRRGAPARVVDRSRERALLARQVAAERAQIEAARRRLATGRPIRLSELKDLDRHEFSLFLRLLGEALAAGPPGPDGRIRALSADGTFEITLVPLTDGRIAVITTDDGVLRGPDHEITIVDRTEETPSPAEFAAGAGR

SEQ ID NO: 40370 - protein, 408 aa, Streptomyces thermoautotrophicus; identical to SEQ ID NO: 40363

SEQ ID NO: 40371 - protein, 1372 aa, Streptomyces thermoautotrophicus; identical to SEQ ID NO: 40364

SEQ ID NO: 40372 - protein, 414 aa, Streptomyces thermoautotrophicus
MVSTPDLDRLRRVLGGEDLRWLVDRMWSRLARDLPLDGDVTLRAATPAQRQAVARLLGRAPGRGTSLTVPLPAVAETLRRAGIAPDLRTAVEALRGPVVNRVAEREAAERAWAAAIEPAEAAARLRPALRSWADWLRQTGIVRRLAGADAARGRALVENAVAVLDRLPASGVPLSVLAATATGDGHALDHGRPLATLVLRAAAALGGMPPGGDAEWRRAVWASVGVLHGELTNPVLVLNVPGDAKTATGRVLAVWAEAGQPVHLTARQLLRDAPEPPVAGRRVFVCENTSVVAAAADRLGAAAAPLVCVESHPGAAATLLLRILLARGATLHYHGDFDWAGLVIANGVLARFAARPWRMSAGDYLAAAAPGGRPLRGDPVVASWDPALHEAMQARGVAVEEEVVLDDLLRDLAS

SEQ ID NO: 40373 - protein, 388 aa, Streptomyces thermoautotrophicus
MLDAIAAHLDDLYGLLRDPASDNRRIFTTLAGLEGHLDALRTNTKQFNGELQRLLRDDAADLATFDEVKRATVAYLEEFVTDLDVRKHAIAAAIARVEELGVAVLHTRALAGADLPVLPGAADPAPRWLAQRQAKWDGLHRWFAPLDGSLPAVETLQDIARRAIVSLLRVLERFGEARRRSASTIQDFRTLARWFSACPTDEDAHRLFNAAFGLWPARHAHLALDDPDEVPAATPWHAAPRVPVSPLLRTHGVTEKAARTARVRDVAEIRRRQRARALRERAELEAAWARLATDGTVRLSTFGELDHATFARLLHLLGRALSVRPGRDGLRRATTTDGRLEVTLRDPGDGRTATIRTPSGEFTGPDYAVEIRSPLREIRRESRDEEAL

SEQ ID NO: 40374 - protein, 895 aa, Streptomyces thermoautotrophicus
MTVTRLRPAGRAERAGPARWRPTRAGIVNVWRYYNETFHFHNGRLLLRGPNGTGKSKALELLLPYLFDANLRPTRLSTFGGSERTMFWNLMGDGYPGTTRVGYVWLECGRTGDDGWFTCGARLQASKHSRNVTATYFVTHRRIDTPGGLSLLTADGRPLTRGDLAAAIGDSGGVFDSAADYRRMVRHTLFPEFTEEQYEALISALLKLRTPKPSEHLDPKELSKLLSEALPVIDQQDVAEIAEGFEKLDRRREELARLAQEVEAARGLAERNRTYARRVLRAAAASLISATSTMDGITRKARESREAYEKAKQRLAELTTEQERLAAEDDELAHRIDGLQESDLFREGQQLDRLRRDADTAAQAAAAAERKAAERAREADDDAAKASAVQAAYEQAEQAADRARGEAGQAAERVGFVASFEEVAAARDVPTARKLLQAAVDSRTRQVDQGRKALYEHVGAVAERRKAETRLEDCREQEARAEARLVEAQTRREEALARLREAIERWCSECRELPLAARLDELVDAAEDENAVMRVVNDAAAAVADELTRAETTLDARRQALAEERARLDAERAELARRTVLAPEPPRTRTADRARLPGGPLWRLVDWRPGVDESTQAGVEAALEASGLLDAWVLPSGELAVDGHDTFADGALTTPAPGSSLADVLTVDPDAPVPRVAALLRGIAFGVTAPDHPAAIGADGTWRLGAARGSWAKPAAGFIGAAAQERARARRIAELTARIEDLDERIAGVRAELDAIAGRREALNAEQRRRPGHDELRAATGQVARAEAEVAARADAVSRAQQEHAAAERRVATALRQLSLVAGEHGLPTEEAALDAVDAALGAYRNKCHAWLDLRQQAATLAGQAQAAAERAARSRRDADAAAQEAAELRRLPRP

SEQ ID NO: 40375 - protein, 216 aa, Streptomyces thermoautotrophicus
MLRALACLYDEPPPVNAEQRRALWRKAGLECDTLSTSVLVAGLRPLGEGPLATTTRLWTAAGQATRLTLAQLRADPVAGIPHHQVWIVENPSVPAQALDRFGPGCPPLVCTSGWPNTAVIELLRQLRAAGAELRCHADFDGEGLRIAAYVVAKAGASPWRMTTRDYLSAVPAHGPSVGRVSEVPWDADLAAALRLKGVTVLEERVADSLLDDLDAA

SEQ ID NO: 40376 - protein, 522 aa, Limnochorda pilosa
MLVSLNLRRLQRRFPEASYLVAVNVERYRPIMRLFYLRHMEHQYALDLHDVWAEIQAAVDPAYTEEQCEQDLAQLVEWGSLTGAQDRSRATTIQEFMRRHLKYSITPYGIALERLLSELEQEGRGTGSLNVDLLDQVLEGIDRLDRLLSQLPDRLEDGEERGLGPIYQAWDRTFTAYDENGKQASDYLAQLARNGEGDDVTDVEGFLAYKEVLKEYLASYVLHLMDVGDRVAAVLHRWQSDGLGEKLVEACARYEAHHLPMADGRLPALESCREGHAAEWRVFRSWFQPGGGLEELRRRTNEAVESVVRRVQRLTDRPAGLSRRRQLEELAVAFAACRTPGEAHRLAGARLGLMQPRHVSGEAQVFAMRPDDSPWRQRAYRVELLPVARGRRRRHEGAVPVRDRSQEEAEILRQVMEEQKLEESVWDRLFAAGELDLGALALDDVDLRDRLLALLGACLASPDRSALAPDGSTVRLLPPRRPAVGWLSAPDGSLALPAFRMVRRKEGERALVPGAGSAAALH

SEQ ID NO: 40377 - protein, 411 aa, Limnochorda pilosa
MPSYRVQDLQRPFIDLLDRVAIRAADDPLAYSRVHVHVERLRQWFASRPGWRVILRREFALLVKVPAAASLGYGQTWAQMPLDYELFAWALWYAERYPEGPFLLSHLVQEIEARAKVLIGPGHVDWNLYPHRLSLQRSLKALEAMGALTRLDSTDDWVQTGQGDTLYEFTPVAPYLEVHETIGSASELPGSAAPSEGPGGEAGSHLAPLPHVTDPRVRLYRTLLLSPAIYRCADPEAFTLLENRSRREEIASDLLETFGWDLEWTPSYAALLRPSASEVSEQMLFPFRGALAHILLLLFGEVRALVRRGELDADETDRVRLSPRRLSSLLAALRERHGEQWGLTIQREGLGSLLERVIDTLRAWELLDGPDRDGNLHLLPLAARFRGVYEGEEAEYGDFEDDPGMESEVQR

SEQ ID NO: 40378 - protein, 1547 aa, Limnochorda pilosa
MERDDLVVDGWDRALEAVNAALGGGPRRWRPSRLILQQYWHFEYQEFHFAQGRLVLRGANTTGKSTVLVSAITLALDGEKRRERMDTFGGQGRGVAYYLVGDADADETSDYYFPERTGYVALEFQRGDRPEYLTIGLGLYTSRTRPDLAVDSWGFVITDGRRIGRDLQLYTAQRLPLAARQLAETLGAGGRVFSRASDYQEEVNRQLFQFQNPDEYRFLLDLLIQIRSPKLNKDMKPSAICDLLSRSLPPLPEGILNRVTRIMDDIDSYLDLLKDLESRLQAVAAIDQAEAACANQMAQLAAVDYTEALRQAREVRGRLRTAEEELARTGADLEDVRAHLDRLAEERRSLVGRQTVLTQGDAYREVQQIELLRRDAEAARRALARLEEGRASSEAALERLEGRLLERRQEWARLRRELGEAAEQLQEGAPSSQWPLAVEEAGRQAGAARSLPDEPPKTAPGLRVPLTLLQGAAAERRRLLEEARRALLEVEARERTYRALGERAEERRRELEAADVRVREALGELEAAREQVRAGLEVWRGRLRVLSVQATPWQEVLAGVDSFGPDRRPGWGEMVRPVTEAAGSQRLGLEAARREEQRKLDALQAEFQPLEEELAEWKAGREVVPPRRPDQEAARRLLAELGVPAAPLYRVARFRAGIPEADRPLLEATLEASGLLDALVVDPGSGSRVAERLREAGLGDLWIDPSRGTPAGPTLLDLLEPDPDRAEALPDTALPGTALPGTAPPGRALSDEAVRAALGSIGLRRDGVEDGALVAVGPSEVVASAAPDSWVAPGIWRHGRLAGTGLARPEAGVFYLGRQAREAARLRRIASLEARLKELKEAIWHQEEALDQRRRALQVMEAEVEELRMLEVQELLPGRLLAVEQAEGWSRDRRRLLDEAEQAAAKALEALQSARTVYHRSLDPVPEARGRDGDGLRSLAEATDAVLQRFQLFGVLLERLDPWAGEWARLLQDVAQSRERLEKDRAAVREAAERLEEYEGRRRAAQEKLHEMGLSAEELLDELSRIEARLEEVGGEEKEGSTLLGALGERQKKQAGEVERLQAESRVALDELARHRSTFRGRLAAHPALAALLSRFEQRPAAPTEAETAEESAEAPGGAPEWEDGPEGVAEELLRLRRSAPGRLRESVERSVRDALQELTIVFSNHRPALAEYGPELQEERVAFRHRGTPVEAHRLRAGLESERDLQKRYLEQKERELYEQVILHEVAGEIRQRIRLAEGWRDEINRLLEAQRLSNGEVLSIAWLPRASQEAEALSYRRVIELLLRDADTLAHAEMEELIDHFRQRVNRVREGYRTGSLGEGVTFAEALHRVLDYREWFVFSLHSRLPNEPRRPLTDLRFASRSGAEKSLAMFVPLLAALHARYRAAAPDAPRLVGLDEAFAGVDETNIQEMYRFLVSLEFSWVMTSEKLWGRGTAVPACSTYELLRRGTVVTALWFLWDGRRMVLTGVPGSAGGAAAAGPAYAAGNGAVTELGRAGGTGAGGNGSAATRTDAEGTGSPERRTRAGDNGAALRREDEGEDGDGAGDR

SEQ ID NO: 40379 - protein, 513 aa, Limnochorda pilosa
MGPETGNPQAGRGAPGAGGRAPRGEGSGPNPAGAQEALGLLRARGLSPLLEAVAERYRKRGRLTGLLPLGSTGLDAPAREALEALMGGRLSRRRDRLYVNLDHLEQALRRSRFETTLDAVLHAAYGGMRTRAEERELRDRTWAVLLDRLQAGAPGERSRAFWVRVMKGGPSRTLQRARRAFLEGWRRHASEVDAGRALGGSEPAWLQDLQAMLRTLSTVIEGLPRWRGSRERLPLFSTRVSGDAHALDADRPLGQILLHSLADLAGGEAPDPDEVGPTFHRDWLLDWAGLGRDDLSPTVLVVGADEGLGLPLALPLYTVQRLPELLPAQTGMAHVVENPSVFGAILDRILDRLEGARRDLGRAEPGCGPSIRPALICTSGQLNLAGFHLLDRLARQGATLHYSGDFDVGGLHIAALALRRWPRSVRLWRMDPQSYGVALGRSGGGHPFSETERLQLERLAGSSRGPDAPVAELAGALLRRGVRAFQEALVDELAGDVEAAGGWRGSGGRTAPG

SEQ ID NO: 40380 - protein, 506 aa, Paraburkholderia sordidicola
MQSVVDNAALFRHVTADKALLYRNILDLFAAAKRQYRLQLRPDEVLFEAAWASSVPRIEDVNAALVQLTEWGNLQSQPDTARVSSLSDFYRARFLYRLSAGGEAIETALVAFSNSLRRRAELQSVALEDIASRLGMLKALLDTHGDIDVPKVHEVLRDLVQVFEKLADNAQAFMAGVARTLELQQAEAAAVAAYKRRLIDYLERFLGDLVRRSDGISSLILQIAPRINAALQHVAEREAKDAAPGDELEASQERVRRWREWLDRWKGLRGWFLPGEHTRPQVELLRDKARTAIPQLLQAIAAINDRRSGRSDRSADFRVLAGWFAACEIEDDAHRMARATFALNPARHFVKNPNLDADLPANTPWAEAPPVEINPRLREYGEMTPRGPLPKIRSRAAERETLSSLFAEEFRQVEAARQRLATGRPMRLSELGELDPAAFGLFLGLLGEALGEQKNPEVPVERLTGDGLLLVRLEPLASDSRAEVRTPDGVFSGRDHLLTITEVGLQ

SEQ ID NO: 40381 - protein, 427 aa, Paraburkholderia sordidicola
MTTSPRETRSASDSRQIGELQARQQREDFQNGLRAILMRPLLSSTHPGFASVRRQADKLREWFSRETGWSLVVEREGARLYKRPSDTNDPTRGLPDFDRRRYVLLCLACAVLERTDSQTTLRELGERVMELAADTTITGRGFSFALASASERRELVAVCRLLLDLGVLTRVAGDEDDFVRSQAGSEADALYDVQPRALSGMLAAARGPSTWTAGQAPVSLDERLHALVTEHVPENEDGRRTAIRHALSRRLLDDPVVYLDSLRAEELNYFVNQRGPMASRLCDATGLVAEQRAEGLALTDDGTLTDIAMPAEGTEGHVTLLIAEYLATRSREGQTAGITTVAAVTAFVREATDLHGRYWRKSAREPGAEAELTAIALGRLSCLHLVECVDGAVRPLPAILRFAIGETDVRQSRRNSEPPQIGAVENE

SEQ ID NO: 40382 - protein, 1394 aa, Paraburkholderia sordidicola
MSEDDLFQKSVPAIRAELPEPVLERWQPLRLGVVELFHYDMEEFWFHDGRLLFRGNNGTGKSKVLSLTLPFLFDANLRSSRVEPDGDSGKKMPWNLLVGGYKRRIGYTWIEFGRRDREGRFHYVTLGAGLSAVEGKPNVEAWFFILANGENNGSRISQDFQLVSQQGNTLTRERLRESIEGHGKLFDNATLYRRAVDEKLFSLGEKRYDALMDTLIQLRQPQLSRKPDEAGLSHALTEALPPMPADMLTDIADSLNQLEEDRQQLDDIKALHKAVDSFNTDYERYACIQSRRQARVLRQAQTEFDNASASRNAEQAALDTAIEVEAGAAKAFEDAQSQVNTERARQETLRSNPTMQDANRLQNAKEDYERRLRALASEEKASEANQRRLRDETARTQDYVAKVRSIERMFTDARNDCVPYALKAGVASEFTDNLLTKGTPEKVGSLADGEFDAAALDIRNATAARREAIATLRQRGRAAEQADMRLKEIQRAVNEAKEEMVEAAARRAEADMEAEQVGQTLIDAWTAHSEKLVQLAWDAHPHILALTEWVAKTDAQNPAKAGLELAHRQRQSQFAADEASLIEQRKVYERQATELRVERDELSAGRDAMPPAPYMRGEQTRAESEGAAFYRLVDFRKHVDDAQRAGIEAALEVSGLLDAWVTADGVVQAKDGQPWLDTHWASRPAVVRSLADWLQPDCPVDGPIPCDVIHRLLSGVACAKDETTIDAESETWVSPSGKFRLGSLSGRGSKAQAVYIGQRARAEARSRRLEAIRAELQRLDVCLQNVLVAFETLAADRRQADLELSTAPAETELFNALQAVSVATQTLQAARARLDRAEVQCRDAEQTWHAAMDRLQRDAADLRLPTDELALASVEEALVYCIDKHHDIVSLARDYRRAQPDLEVQETRERDARLQHSESLERWGEARAEAQEAAVRFETLRDTVGTEVANLLIKLDAAKESVAAAECALTTANDARRTAGERRATAAERAKSAQIVLDDQIGARTRAVVQLQHFAASSLLSSALPRLGLPDVSMAWTIEAALTVARRIEQELVDVADDENSWTRVQKRVSEDLMDLQRTLGSLGHQAVAETSDWGLIVYVIFHGKQDRPDQLAARLADEIAQRGELLSAHERAVLENHLQAEIATEIQRMLRAAETHVNAVNKELEKRPTSTGVRYRLRWQPLSELEGAPVGLDVARERLLNTSTDLWSMEDRRVVGNMLHLQIKAERDRADFAVLPGESDNAGSLFDQLSRALDYRRWHRFRVERLQAGQWKKLSGPASSGERALGLTVPLFAAIASFYGQSTNPHAPRLMLLDEAFAGIDDPARAHCMGLIREFDLDFVITSEREWACYATLPGVAICHLQRREGVDAVFVSRWIWDGKARRRGPEPERLIG

SEQ ID NO: 40383 - protein, 446 aa, Paraburkholderia sordidicola
MVRPDAVGPSQKDLLGNDGSMDLTAMNDNEDMRLQNLLGGEALIRLRQRMRARYARLSLERSPSIVKLTGLQPHEYEALALLSGKAVSNSRSITLDVVAVDTTLRSSGVAASLREALERLDGPILSALVQAESEARWIELQKAADDSRIVEFLTSPSSLGLLKRLSRRDLQVARRLLQRAFAVLSRLPASGIPRAQLAAEVLGDAHSLDNGQAVATLVLSICRRRQKAVESDDGDSPFNTADAGQSDESSREIWAQQGVFVNELARPALFLNVPVRAVRQPGRFGEPSYMSLRSLVRSPPAWAVKDRMVYVCENPEVVTIAADRLGRACAPLICTDGMPAAAQRVLLNQLVGAGAQLVYHGDFDWAGLSIANFVRRKWVASSWHFNAEDYELAASRRSEDDVRDLSGAPVIASWDPVLTEAMSCRGFSIAEEAVVETLLQDLCRAR

SEQ ID NO: 40384 - protein, 496 aa, Bacillus coagulans; identical to SEQ ID NO: 39661

SEQ ID NO: 40385 - protein, 387 aa, Bacillus coagulans; identical to SEQ ID NO: 39708

SEQ ID NO: 40386 - protein, 1371 aa, Bacillus coagulans
MTEGKWVMNRAGLLNFWYYDDEVFEFADGKLLLRGTNGSGKSVTMQSILPVLLDGKKTPDRLDPFGSKARKMEDYLLGEKEVSGHDERTGYLFLEYRKQGTKQYITTGIGMQAKRHKTLKSWYFVLTDNRRIGYNFELAHTRQSERIPLSAKELENRIGSGGHLVHSQKEYMELVNKYIFGFQSMEAFEDLIKLLIQLRSPKLSKDFKPTVIYEILESALPPLTDDELRHLSDTIESMDETEQQLEQLEREHESAKKLVRQYDLYNQYILAERAQKWQEAESRLQEAKQEAGTLAVRCESLRGVIENLTEDQKQNEQKRDVLKAEQERLQHHEVWRLEKEKGEQQARAEKLKSEAADLEKKWELKKSQLLNIRLEQDRLETENSKDGASMQETLDELALDAGEAAFPQHEINAGDFSRHEGEAFDFSVWKQEIKQHSGLLQKLQQLAGEAERLHEMHMKLQRQSSAKKQEIDELRKQLDHLENWFTEQKQELEDAVFLWIEQHPALPFTDERLRRIAGALDGLYEENRYEAVREEIVKAANDYILQVQKEISRAEQAQKAKEQELAEAEETLMYWKNLKLANPERPQDTEAFRAGLDGAGKRYLPFYAAVEFQDHVTEAQKARIEAALRQTGILDSLITEEPVTPVHDRVIRPNPHILGYTLADYLKPDPDNDSPVSAARIDEVLRSIPLEPSDSGFHIDADGSFSVGCLVGHAPDEGPSKFIGRTSRKRYQQEKIKETEQTIAEIRLALLQIENRLSEWARKVQEAEDWKAGIPDDKDLRDLEEQIEKTARSLKQEQEFLTEIDRDWKQVYQHLQNIRLQLHEQGAGLNLVLQSGPLDEALAAAKSYEEHLHSLELIFQRLFSGRKMLARLAADILEKEQELDEIRGEENIRRSEWEKTVANIEAIEQQLKLQGIDEVRARIQAVQHEYTSTEEKIREIYEEKPKKEAELEKCTTNLSLAKTRTTFWTNMAAEWEKLVKAELSLGFVESEHTEPESILTAFSGVLEKYDRAKLNENLTKVFFNEQSNLTEYRMSEFTKEADPPDWFAEKLDDYYETFKKEWEGLRGRRLIQMEYRGRRVSPYTVLESLEKELLNLQSYLDEQDRRLYEDIIVNTVGVILRNRIQRAAKWVKEMDAIMRNRDNSSGLTFSIAWKEKTAESEDELDTKDLVALLQRNSKFLNEDDLNRITKHFRSRIAAAKELIEIRNEGSTLHQVLKEVLDYRKWFQFVLSYKRAGEPKRELSNTAFFKFSGGEKAMAMYIPLFTAAYSRYLEAGSMAPYIISLDEAFAGVDENNIRDMFEVVEQLGFNYIMNSQALWGDYDTISSLAICDLVRPKNANYVTVIRYRWDGHKRSIVEKPKESLAGATPDLL

SEQ ID NO: 40387 - protein, 432 aa, Bacillus coagulans; identical to SEQ ID NO: 38823

SEQ ID NO: 40388 - protein, 498 aa, Blastochloris viridis
MSAEKSAFYRCIMDVFAAAKRQYRLQLRPDEVLAEARWPDGQTPRIEDVNAALSQLSAWGNLESHHDTARVSSLNDFYRARLLYRLSQGGEAVESALALFVQTLQRRAELQTVALEDIASRLQAMKALADETEPDAAKIHATLRDLVRVFESLADNAQAFMAGVARSIELQQAEENAVANYKRRLIDYLERFIGDLVRRSDMIAGLILALEPSIDAMLQQVAAREARDAAPGDAQERIDSQTRSWNAWRERWKGLRGWFFRTGHEPSQAELLRARARSAIPQLLGAIAALNERRSGRSDRSADFRMLSLWFAGCADDGETHRLARAAFALNPARHFSLNPDADAELPASTRWADAPALRIHPRLREYGEAAPRGPLARVRDRADARAQLARELAEESQQVEAARRRLATGHPTRLSDLGELDRHAFGLFLGLLGEALTEQAGPDATAERQTGDGLLHISLTPLAPDSRARIDTPLGVFSGRDHLITITPTRDADEAQL

SEQ ID NO: 40389 - protein, 406 aa, Blastochloris viridis
MRALLMTPLMSPEHEDFPAIRRQADALRDWFARETGWPLQIEHEGARLSKRPADLGSTMRGLPGYDRRRYVLLCLACAVLERADPQITLRLLGERLLQLAADPALAASDFRFTLGAPHERRELVAVCRTLLELGVLARVAGDEEAFVQAGGDQADALYDVQRRALAGMLAAVRGPSTFRPEDAPVTLDQRLHALVDEHVADSDEGRRTALRHHLARRLLDDPVVYLDTLDPDARGYFVNQRGTMAARLCDAAGLVAEQRAEGLALVDETGVLTDVAMPAEGTDAHATLLVAEYLARSYRSRLADATTAAPAAAAFTPAHDIIAFLRDAKTKFGRYWRKSAREPGAERELAAIAIERLEKLHLIVRDADTVQPLPALARFALGDAEIRDAREPRDGAVAAKHRFGSP

SEQ ID NO: 40390 - protein, 1392 aa, Blastochloris viridis; identical to SEQ ID NO: 40127

SEQ ID NO: 40391 - protein, 427 aa, Blastochloris viridis; identical to SEQ ID NO: 40128

SEQ ID NO: 40392 - protein, 483 aa, Rhodococcus sp. SC4
MKLFAFTTAEKRAEYLWVLRAFDHARANYVVLLHAADVARILDGLAGDDPAGQLGAGDVTPLLEQLHVWEVLERSYDGTRAATLAEYRNRHFVYQFSQAGYQVFRAVEDALAARLDDASLSRLALPDLLADMNDLAAANRAADNDLVYRKLNRLDATLSDMAGRAAQFYLTLGDLVRTTEITPETFMSHKDALLTHMREFSSDLSRYAPKLAAAIALVEDTGVETMVARAAASDERVFLSIEEREADWRARWAGLTHWFVGSEAGLSESERLREGTMSAIAAVLSLLRRVTETRKGGVSRESQLRHLAGWFAATPTEDAAHALFRAVFDLGRPRHLSMVHPDADIIPDTRSWWEAQPVEISRTLAETGRPPSPGLPARVQRNEGSVRRLREEQLTAQRLRAAAAQSLARGGVYERELDEAETDVLLSLLNAALTARVPVSGRVKSSTGSENGVKLTLSPHSESTVVRTARGRLHLDGLQVSVR

SEQ ID NO: 40393 - protein, 464 aa, Rhodococcus sp. SC4
MKAREISPLALDSYQRAARVILSNHLVTQTYPDRIALPLLRRWATELRDDLMTLFGYRLDVTETTARLFTVSDRLDAGTPAKTATDRTFDRYRYAYLALALAALGRAGNQITLSELADHVAADAAQVDGVDLSTERASDRDAFVDAVGWLAARGAIALADGDAGGWAANPDAGEALYDIDRSVVIALFRPPRALQHLRSIRGLLAGADSVTEDDTSEFGTARPVDVKETARRVRRALVERPVVYAADLDDDELVQLALPRTAADVELLTGLVAERREEGVAMIDSSGRLSDVRFPGTGTVAQVALLLAGEIADRVLDPDAPETARMPLPRGRFDDLIEQVDSAIPQSGIFDSLAGHDGFEPEDPAPADRLFPVVEDEWIAGTVRTLTERFGRTFAAGWQADPDGLGRAALALLERLRLTAVVPGGVLALPALARYRGVVVTIRDRTPEIDLFQSSANDSEEVTA

SEQ ID NO: 40394 - protein, 1385 aa, Rhodococcus sp. SC4
MTSARFRPTRAGIINLWDYRDQEFSFADGRLVLRGPNGSGKTKALEVLFPFVFDGRIEPRRLNPFAGEERTMKSNLLYRGQESAYSYVWMEFCRGAKDDPEAVTVGIGMRATRTNDKVTRWYFVADGRVGVDFSLLGSDDRPLTKKQLGEQIGTDSITDRPLDYRAAIDARMFGLGVQRYDQLINLILTLRRPQLAKNLDPKGLSQALTDGLRPLDEQLVLEAARSFSDMEEVGRALEGLAAADQAAQSFVGVYAKYLRQQARTDVDHLATRLEAVRSGIAALHGAAADRARSQESRAAAEERFTAAERALDQANATLDALKRSTAYEGRTQLDDLAQAVSTLEKSTELQAEKARKAKATLEQRAEEHDKAGDAVARAVEALTHAEDELHLAAEDAGITWTALPENARTDQLTAALRGHTEERDGDIRAVRAALATVERAATERTRADEAARRGQEQLDTAKVAVLEAETAVESARSRCATELRSWWTEQSSLYAEIDTPASLFEALDTALGLIGDDDAATLSETLTEQTTDAVDALRLRRQQYDRDVAAAEEAIAEHESARAAIESEHDDAPPLSAARQDARSRLTGAPLWRLVRFTDSVDAAAAAGIEAALQAANLLDGWVPVDDALPDVESEQFLVALPAADRPTGKTLADVLEVEQDTGVPDDRVRGILESIALESLDLPEGPVGVAEDGAYRQGIQRGRHTKSDAEYIGTTARARRRATRIAELDRILEETRATLDETRAAADAAAALLSRTTAAAQALPRTGSILTALKKVTESAGALRSRSDTATAVGRELDQAIADLSAKEKQLRATASTHRTPHVAREIDSLAASVRHFEKQGEMVQRCRREHAKEVEHTRESEDRLHEARGSAEEFAEEAAIAEEVLAQQVQRLETLRDTLGAGAEQLDRQLEEAHTRIEACKKEQRDARKADKDAGEAIGKAEGAYNTAVQTLRLALTETHADAARLAPYARRDLLELLGVDGGHTWPASSAAWMSAEQLVYRIQNAEGDTPILPPEVDALFHALDGATESVRVSDSARKSTRTALTTALQDFDAQLAAAGQDYRLQWDAPDGVTVVQVQDDEGYSSIGEFAARIASARSDQELLLTESERRILEDALLTGLAQQIHERTVDARELIARMGTEMRERRMSSGNTIGVHWVLADNLDDSAKAISKLLERDTSALGPDELATMRAHFAHQIRTARAAHPERSYPEILASALDYRRWRVFSFTLISGNGNEDRLTVARHSALSGGEQSVSLHLPLFAAAHVMLDSADPHAPRLLALDEAFAGVDDNGRAELLGLSVQFDLDLFMTGFDLWITYGGVPGCAHYDLAHSTAEQSVSATLLVWSDGELLAEHDGTDLAQALGSPLRRRVPTPAEGAFEFA

SEQ ID NO: 40395 - protein, 503 aa, Tepidibacillus sp. Z9
MNDQMLRAISEVTYLTTDNAWRYRSILRYFYQQHERLRHYLFPEEIYEYLKQNFHFQEYTEEQLQNDLNQLVQWKNIIPRQETGRVNSIEDFKKKKFRYQATPYTIEIERMVQGLEKLGDSFGGSLEKTLFDRLLESLYQLTAYHENPFHKGKREYDVDKLDNEALYRLWEDMFDQFRKMAENATDYIAYLKSEKVEEVMMTETFLAFKDALTEYLRNFMSALQRSSFKIESVLHDTKTDFIEHVANRIATYQLSIPRLINLPNEQDLIQQSIDQWQSLQKWFLGENGRESELSFLQNETNETIRRMTRFAQRIGERSQNFRSRRKDYLHLAKWFAEMQDIQEAHKLSSVVFGVFHTRHFQTDGIETEDIYSEVWDQPPTIFTLKPRIKQYKEKTRPGIIVNKEREKKETLQQYLLEKEAEQKMMEQIMNQDRIVLSQLTIVDPYVRKTLLNWIAKAMGNKEQIGKTETGRRFKLLQLNDSMIQLESEDGWLRMPNYVFYFID

SEQ ID NO: 40396 - protein, 398 aa, Tepidibacillus sp. Z9
MEKQNLIFDEVAQEVLEDLFEQFWILREKDPEKYQMIREREHALRDYFQEKFGYRFIVHRHFAKLEKIPVDPEPWMGIQMFIHPRDYALFACVLAFLEGKAVDEQFLLMEIVEDLLSIYPREEGIDWTNYEHRKSLVRVLKFSEEIGIVKAVDGDIEGFSQTENHEVLYEVPLISRYFMRSYPKDLFQFESMEEILKVEWMGEEANTGAMRRYRIYRKLFLSPVLYSEGVQDPDFQYLRNYRNRLREDIESHTPFQLELYKNTAMLTLPERKARFHLYPDNKGIMDVALQFSSIVREQQVEDEIPIQWDGSLLLTWLDFERWVGFCKEKYGIGWSKEHREASIQETTIKLFQLLEDWKLARRELDTGAVILLPALVRMIGRYPDDFNGNEEVGESEGE

SEQ ID NO: 40397 - protein, 1388 aa, Tepidibacillus sp. Z9
MKGNKWQLHRAGLLNFWYYDEEEFQFSGGRLLLRGSNGSGKSVTMQSLLPVLLDGKKSPDRLDPFGSKARKMEDYLLGEKGIVDRDERTGYLYLEYKRQDTEQYLTTGIGLRAKRQSNMEFWGFVIYDNRRIGQDILLYKLEAGEKIPLTRRELENRLENGGKVVRTQREYMELVNKYIFGFETLDAYDELIKLLIQLRSPKLSKEFKPTVIYDILNESLPALSDEELRPLSDTIENMDQTKQQLDQLIRDQRSLKRLCKEYDQYNQFVLVEKANGVLVAHREQENVRKKKAELQRRMSELKAELDLQSRNLEQLEREEEVLKDEEKQLRDHDVFKAEEKKQELLIAEKQIEFKRKQKEQTLEEKKRKERELKDKIRIEAEKEEKADRLIQESLEELEFLAEEAAFFNHQIAAPEFKRNYQGVYQFDLWKKEVHDYQGKLDEILKILREHSIIKKRYQELEKELGEVNKDLDDQRSNERKWEQYFEEERERYLEAFHIWQQQNKQLDLSDKDVQMVASRIGQIYDEYPLEEIKAPIEKRYREVYQVLQKESIQLQQRIETKQKEIEQKKIELKEWKEKKDPEPERHYETVEARQQLMKQNIPHLPFYSAVEFHDEVSITQRERIEAAITEMGLLDALIIPESYSVELVHDRIIRPNPQFFGYTLADLLYPTPVEGIEVTGKDIDHVLRSIVIDEKADSLISINEEGRYQIGLIEGHAPDQSQAIYIGKEARKQYRLQVIQRIEEKISALEEEKIRMIQESQRWEMKLATLEREFLDFPEDKDVKHVYEELVETRQKIKLLAEEAKRKNDRVKQELEQLQRIKNQLRELTEEISLPIQEEAYETARTSILNYQQELRDLESNYKDYQHSKQSILLYQQNLEEIQFDIDELKGELNQIEGEIKKYHLQLQQIEERLAELGAEEIRQLIENIVQRLKQIPIQIKELIANIQDIRNQINHTEAEINKKESEVLFAEQLFQKWLTIFTEDDRLQLVNVIEDSSIRLEEEHIVSRAKQVLNQYGTLLQNLDREKVNQRLTNVYYQEQSVLVEYRLTQDTIFEINEEISIDDENIIMKWDQLKQKARRIQLLMEYNGNRVSPYYVLTQIDKDIELQKVILSEKDRELYEEIILNSVGRIIRARINRAEQWVEKINRLMSERDTSSGLTFSIRWKPKTADIEEELDTKDLVDLLRLDSRLLKAEDMNRITTHFQSKITRAKEVLEEKGYGETLHQMIKEMLDYRKWFSFTLYYKREGEPKRELTNNVFYTFSGGEKAMAMYIPLFSAAYSRYLEARDDAPYIISLDEAFAGVDENNIRDMFDLVEKLGFNYIFNSQALWGDYDTVSQLSICELVRPKNASYVTVVRYHWDGRRLQLLKSEGIEENRLDQEKIKYMV

SEQ ID NO: 40398 - protein, 456 aa, Tepidibacillus sp. Z9
MDKLNHLTSEAVKYFKQEKGFQTLFQLLINKYKSLGRIGGKVTIVNVNEQEKEVLSSFFRKDFSKEKSITIAFSQFEKALERTKFAGVDVKDLLDGYIGHPIISQAEEKERYERLKANFFEEFKQRYNDPLALGFLQHIQEKGNGVRGFHLAYDKDRDLFKSQLEQVIKAISILTFRLETDTRTKDYIRLPIFAYQVTQDPHGFDLDTDQGRFLIVALQWIRQLEDQDYEMVSSLTAEDVSELMQYFRIIRDDILNFVTCTGILGFCDDGTPESLWWEAFKGNHVMNVALRELIKLHFFIPGVTYHSRKANVVFVVENSGVFSAIIDQLQLQESPPIICTHGQFKLATLILLDYLVQNDAIIYYSGDYDPEGLQMAERLKNRYPEHVQLWHYEVDEYMKAKSTVELSDTRLKKLETITLSELLPLKEQIKIERKAGYQEKLIPKLIEDIEKMMEEC

SEQ ID NO: 40399 - protein, 491 aa, Thermotalea metallivorans
MEIHSKMIKPIQEVKYLSADNAWRYRTILRFFYIQYEKIKYWMYKEEVWEELKKHSLFRDYTMEQCKQDLDVLVEWGNLIPIQDTSKVSTVEEFKNKQFRYQLSEYTVEIERMAIRLENIFVEGASLEPTLLERIKSHLEKFHAIVEEDIKSVGIWWRDLNTDFKRLNQNYQDYIRELHSIKAEEMMKTREFLVFKDKFIEYLRDFIKELQKNTYGIEGLLREIDEGKAKKLMEKVFAYEQSIPRIDMEVRGEDIFENIRGRWRNLQEWFLGSPAQKSEREKLFEITNEIIRKITRFAAQIAESRNSAANRKEEYKKLCEMFLACEKMEDAHKLSSLAFGIFHTKHIRGSFYRKTESINSGVFDEDPFVIEIKPRIRAYREKSMRTPIENHRVQKQNMLQQYIQMRQQEKNIIESYICDQRIDFSALPRIESHVRATLLRWLSKGMNSPNKRAKTEDGHTFRVVLPDPPKRCILRCDDGDLEMPAFIIQFD

SEQ ID NO: 40400 - protein, 382 aa, Thermotalea metallivorans
MKELEILLERFWIIKEQDKELYYQIKDASPKLKNFLEDKLGYKLIINPYIIKLEKLPGKPENWMGIEDFEDRMEYGFLCLLLMFLEDKGPEEQFVLSQITEFVQGTYPGQEKVDWTLYKHRRHLIKVLRFAAEIGLMKVNDGDEQYFANAVDTEVLYENTGLSKYFMRNFTGNLLYYRHWQDIENEEWVDIDKDRGRIRRNRVYRRLVMSPAVYSEGIEDADYLYIKNYRNMLQKDIEEMLESQLHVHKNGAFVILDEGKNFCDTFPNNKNISDIVLQMNGLIVEEVKKGSFLKREDDTIHISMARFEAMIEECLKRYMEGWSKEYREMKLEKLYNEVIKYMQDFQMIQVNEGTKEVIIMPLAGKVIGCYSKDFTERTEADE

SEQ ID NO: 40401 - protein, 1373 aa, Thermotalea metallivorans
MNNRWIINRFGLINFWYYDEEEFHFSNGRLLLRGANGSGKSVTMQSFIPLLLDGNKSPERLDPFGSRARKLENYLLGEDEQGQEERTGYLYMEFVKENTEKYLTIGMGLKARRGKPMEFWGFSVKDGRRIGKDLFLYKDIGEKIPLSKIELKNRIGEGGEVHESQRDYMEMVNKLLFGFDTTEEYDELIKLLIQLRTPKLSKDFKPTVIYDIMNDSLQPLSDDDLRPMSEAIENMDNIKSQLEVLKNSKKAGEKLKNEYDKYNRFILLEKAKDFIKAKEELDEKKKQQKELEMEREQYERQFQEAAENLEDFKLQQKLINEKKRQLEGHDGFKAKQEVDRLERQLIELEQQKKTKEENREKKESKERELAAILRAGEDLEQQQKREIKSKLDEMAEIAENICFHEQFFMEEELSKKIDETYDFTYIKQQMDRYVHQIIQIRRALEQEKNQLVAYDNALEQLENAKKYRDHQYREMEKAERLLLETKEEFIERVHTWAKKNEELKISKETLVEVTRKVHQYGESTTYDDILEELRKTYHDDENRFNKEKLNLEVLRDGQNELLKQKEEELRQWQSQKDPEPERKEQVLRNRERLSREGIPFIPLYQAIDFQNNVPEAFRGILEEALLDMGLLDALIIPKEYREKVFAMDVSMADRYIFSDPKFFQHELSSFLRPEKSDISGVSREEVDNVLKSILLDAEKEGPYINEKGEYGIGLLKGKVTRDYKPKYIGVEARKRFREEMIEKLIGEQGIIQKNIWEIEQKIKTIEERKKVLHNEWIAFPKKEDLETALHYVQGVRLSYESSQKEVARNEGIVEKTYEALKEIRQKIRVLTQKMEIPLNLEAYEEAEKEADLYKNALRELETQHIKLLQQIHKNDLMHRQREDVLEDLDAILYDLGRIERDIKSHEQQLKNCQEQLKLSNYEEIKKEIEECIQILNELPGKIEKEIEKKKQGEVERNHRITRLAEAWEEIQWIEKLYHIFQEGFRQEMALGYVFPYNKDEDIFKAAKQVYQELKGEEKAGKQKEDYTAALQEKYHENVQYLVEYNLFLEHIFHGESEEKDEKIREALRKQRRIEIKGKTQGKDVNFYGLMTFIEEAMKENENLLRESDRQLFEDILTNTISQKIRAKIYHSEQWVKQMNALMESMNTSSGLSFSLVWKSKIKETEEQLDTKELVDLLKLDPRLLSQEDLKKLSRHFRSKILEARKQLEDSGKTQTFHSIMKEILDYRKWFEFRLFFKKTGENRKELTNNAFDRLSGGEKAMAMYVPLFSAVYARYEGARKDCPRIISLDEAFAGVDENNIRDMFRLLEELRLNFVINSQILWGDYDTVPSLSICELVRPNNANFVTVIRYRWNGKVKELLVEEGDLDGKSETA

SEQ ID NO: 40402 - protein, 440 aa, Thermotalea metallivorans
MEKVKLLNQSVDYFKNNEGFHRLFVKIKEKYKSLGNIGGTIVFDHLTEEERKAFTGFFRKDFRKRKSAVIKLEQIQHALDMTKFRGIALLDILEQYFEEELIPKKEEKMNHDREKESFFREIIDRFAGTKAGEWLAFVLEQKGKGYRILVQRYNMDKEKLREDLSIVCNAVNGLPFYREKKQRLAVFSSAVSKNPHTFDEGTPCGQLLLHALGYLFHCEMPKNAEERTELLYQAGILKDEVSNYTLCSGLIAYREGKIHGGWEGFYRYGESMQVSLENLSYLDRIISPRGKVFVFENPTVFSEARERMIEKLPPLVCTYGQVKLSSLILLDMLAKEGTQIYYSGDFDPEGLLIADKLKKRYGHQLILWRYARDDYGRAVSSNPIEKKRMRQLKSLQDAKLKKLGQYMEEVGYAGYQELLTDLLVQDISDAFPEGDCLLFL

SEQ ID NO: 40403 - protein, 514 aa, Paenibacillus amylolyticus
MDLSLTRAIQEASYLSTQKTHRYRPILRYMYEQHRIFNNEVLPIEIFTHLKQFPEFGDYTLEEQDADLSVLVGNNNLVLNQDNTDAVTLEELIRNRKTYSLTEYTIEFEKMLIFMEKKLHRIRGGSLDKKLTEHLHNALVKLNGFSMQTELDSSSLVQLYEAWEELFERFTKLDNDASDYLNHISGDKLDSKMETDAFIVFKNQFCSYLTDFMVELNRNSPAIINIITHISEKKIQNIVMQLVRHKKNMPTTSVVSDKEYSDTFFDVWTGIRNWFLASDTKSSKAFQLEVRTRDAISKMSKLAHFYAERQFVKKSRVTEFLRLADMMHKSGNMEEAHQVFSYLFGFEGIQHFKIARKPSEKNDGTVWDFDPDELEVTYRIRPPSERTIKQNLKVSKVSQEALEQQRLLAERLTYEETVLKAIVEQPCLILKDLETRIEPFVRKALLDWISAALLNPVGYGIYEGTTELGVNFKLHKVSNDIIELHCLDGILFLPDFQMTFTEVKTREKVVSGVS

SEQ ID NO: 40404 - protein, 397 aa, Paenibacillus amylolyticus
MKKLSQESLNCIHQLLDNFWVVRKENPELFYEIKQNEGFLRDYFKDYFRFKLVVGTNFAKVEKFQVTPQPSTGILDFKEVKDYIIFYCVLAFLDGKASKQFTLSDVCQAVVSYYPRSSKRSVNESLLPLTWKGNEGYRNRLSLVRVLKEAVQRCLIEVIDKNIEDFQERETNDALLRSTGLVKYFMRNIGFNIEGELTLNDIMLIQETQEQELGLERKHLLYRKLFLEPALYRHEVSASDFDYLKQYSRHLNEHAEKYYDMNLDVYGSSAFLVKENVSTFRRFFPASNAESNLLVQFATLLRLKIIDDNDSLVEQKDGTVLLTNIDLDIMCRQLIDENSHGWTTGLKSMSITEIKNKIKNMLFEWKLAETTHEGDLKLYDVIGRFFEKPKEENNKGV

SEQ ID NO: 40405 - protein, 475 aa, Paenibacillus amylolyticus
MTNHTQRWKPHRFILFNYWYFNYEEYYFKNGRLLLRGHNGAGKSIAMNTLFTFMLDGNKDPKRLDPFESSDRKFYDILLGEESLNKDIIERIGYVVIEYKLTNTEQYITTGFGLHSKRKNRRLEDAWGFVIHDRHRRIGRGPNPIPLYKVEVLDDSPEQIPLDRKQITTEIGESGTVVDSKDYAELINKQLFKFPDVTGLKLFTDVLVRLKSPKLTKGGGPDDLKETLNESLPPLSDHELSALTTTVEAQDQTQREILKTQNDLGFATKLDKGFDDYVSYVFAEKAKYYLESKNAWDTIALEHQRVQRDIETKSVDFDVTEQKLRNLESEIEGLKQSRQELGHEKIVDLDDALQSARKELARILNEKSAKKNRYELNEKSLMDANNERRNIENELWAIDKELKVALESLEELGIDSAFEDIYLAFSDHFKRNEKNGDYLFLNWDSEIRIRLQRLGGLLKQIKELDQKKRDLDGMR

SEQ ID NO: 40406 - protein, 496 aa, Bacillus coagulans; identical to SEQ ID NO: 39661

SEQ ID NO: 40407 - protein, 387 aa, Bacillus coagulans; identical to SEQ ID NO: 38821

SEQ ID NO: 40408 - protein, 1364 aa, Bacillus coagulans; identical to SEQ ID NO: 39663

SEQ ID NO: 40409 - protein, 431 aa, Bacillus coagulans; identical to SEQ ID NO: 39664

SEQ ID NO: 40410 - protein, 507 aa, Steroidobacter denitrificans
MTTITATSTDLFRHVTADKAALYRAIMDVFAAAKRQYRLQLRPDEVLAGATWSGTPPAQEEVALALEQLAAWGNLESQPDMARVATLSDYYRARFLYRLSRGGEAVEIGLAAFEQTLRHRAELQTVALEDIDSRLRALHRLLGEDIVDVAKAHEVLRDLVRVLEDLAANAQTFMAGVARSLELQQADATTVAAYKRRLIEYLERFMGDLIRRSDTIARTLHELSTSIDTVLQLVAEREARDAAPGDADERVNEARRRHDAWRERWRGLRGWFLTNGGEPPQAELLRARARAAIPQLLGAISAVNERRSGRSDRSADFRMLAQWFAGCDSDDDAHRLARAAFALNPARHFSLDIQTDEDVPANVSWLDAPPLAINPRLREYGEAAPRGPLPRVRERNRERELMAQQLAEESSQVEAARRRLATGHPLRLSEIGELNAREFALFLGLLGEALAEQQNPDQTVERYTGDGLLHIRLEPMSWDSRAQLHTPAGVFSGRDHVLTICTTQEGA

SEQ ID NO: 40411 - protein, 418 aa, Steroidobacter denitrificans
MNARASRSTARHVGELQRLQQQDEFRRALRALLLHPLMSSQHTEFFAVRRQAERLREWFAREAGWPLHVDREGARLFKRPTDLLDATRGLPDYDRRRYVLLCLACAVLERADPQITLQLLGERIMAEVADPALAALGYTFTLRSASERRELVTVCRTLLDHGVLERVAGDEQSFVHDSGWQQSDALYDVQRRLLAGLLAAVRGPSTWPTGEAPGNTEARLHALVTAHTADSEQGRRDALRHALARRLLDDPVLYTDTLTPDAQAYFFNQRGTMAARLCEATGLVAEQRAEGLALADASGQLTDVAMPAEGTDAHATLLVAEYLAQALRQTRAPLHVAEEEIAAFLRKAVDRYGRYWRKSARVPGAERELAQIVLERLQRLALIAREIDGVRPLPAIARFSLGEAEMRTTGISSQAALL

SEQ ID NO: 40412 - protein, 1390 aa, Steroidobacter denitrificans
MPQTDNLSVADIRPPLPEPQRERWQPLRIGLIELFHYDSEEFWFHDGHLLLRGNNGTGKSKVLSLTLPLLFDAQLRPARVEPDGDSGKKMAWNLLMGSYPRRIGYSWIEFGRRDAEGVAHYLTLGAGLSAVAGRAHVDSWFFLLEGSPDASGPRLGRDLWLTTAQRQIFTRERLREAITGRGQLFESGQAYRRAVDERLFHLGQRRYDALMDTLVQLRQPQLSKKPDEAGLSSALSESLPPLPNELLGDVAEALNQLEEDRNRLEETRQLQQAVAQFEQRYCIYTGMLARRQARELRQAQTGFDNASAARNQAQAALEQAQEVEAAAITARDNTRRASLAARERVDTLQADPANRDATQLALAEGDMQRRRNAAGRAAEQFAEALERLHGEAERSEQRVRQAQDACGAVEAARAELRHAATALGIDASVDANPLLALDADALADSPSELQAGTQALQTAVSRRRQDLVLLRQRHAEVDQRLALRAQAATHRSDADTEHDEALEQRRQADLEAEREGSALTESWSRYGADLVQLKFDANGPLQQLAAWAAHPEGNNPALMALTGAWQATLARHAARQAELNGLRTAQQQQRAALTLEQAQLLGGEDTVPLEPFTRTPGIRGARPGAPLWRLLDFHPRLTAAERAGLEAALEASGLLDAWLSPDGNLADATGQPLLDTHWAHRLPVAGPCLNDALVPSLPEDSPVPASLLITLLAGVAWGMEDRQDAESWISADGRFRLGALSGAWRKSEARYIGHTARERARQQRLQEIDTAIAALDVADADLAQQFDTLQTARNLAAQEYRCAPSDQALQTAIVAAINAGQQATRARLRLEQANARLREAEQALQDVQQTLQHDAADLRLPAEADQLPAIEQMLEQFDHTRFGLSQAAQAWQRDRAALLEQQQREQDARTLHDQVEATLRHAREDADQATVRFTTLQRSVGAKVDALLQALRAAREASQRIETALQKAEDDLRAASERRAVAQTESTQKEQTLSTRSAERMHAAERVQRFAASGLLAAALPELAMPEIWSIDPALNLARRIEQDLRHLADGEQAWSRVTKQVAEDLNELQRALTALGHQAVSEPNDWGFTVHIQYQNRAERPDTLTALLAEDIAQRSELLSAREREVLENHLQAEIAAEIQRLMRAADERVSAINEELRKRPTSTGVRYRLKWEPLSAEEGAPAGLDVARERLLNTSADLWSAEDRRAIGSLLQQRIAAERARADAEVSGGSLAEQLARALDYRYWHRFAVQRLQDGQWRKLSGPASSGERALGLTVPLFAAIASFYGHGASRLAPRLMLLDEAFAGIDDAARAHCMGLIREFDLDFVITSEREWACYAELPGVAICQLQRREGVDAVFVSRWIWDGRARRVKNDPDRRFPPVNGICCDD

SEQ ID NO: 40413 - protein, 417 aa, Steroidobacter denitrificans
MTDASDHRLRRLLGSTALASVRQRLRRHYERTEPGSRTTRLRLAGLDPAAYAALCQLIGSPSRNARSMTLDISELDARLRAGGLADSLRDALEQLEGPIAPRSHLRRALQARWSALAATRIGDVRRLAWLRTPAALTLLKRLGRDPDRAACLLADADRVLRHLPAGGLTRSQLAAETLGDAHALDAGRPVATLVLKVLGHRQHAHADRSAAGESSDRSGKERARDIWAQAGVLVNELARPALVLNLPPAADVTGIGIPGEPTWLSLRQLLRSPPIWRLTGCRIFVCENPNIVAIAADTLGAGCAPLVCTDGMPAAAQQTLLDQLVAAGAQLHYHGDFDWPGIGIGNLVIRRWNAVPWRFGATDYLLAIERCSAVQQPNLDTVTLEASWDPQLVRVMCEHGLAIAEEAVAQELLEDLR

SEQ ID NO: 40414 - protein, 510 aa, Bacillus cereus
MFDIPIVQTHIKEATYLNTEKTRVYRPIIKYCYTRYLQANRFVYPHEVLEFLQSIGEFSSYTLDEVKRDLESLENWGNLVARQDVRGPEKLEDVLKKRYQYSVSEITVGFEQFLERFDSKRSKITGSTDSSLVSRLLETLYALKDYAIPRNRDMKENQEVYELWSDIFYRFEKLQFDSVSYLSHIDYQKIQAEVAKGELAFLHYKDDFITYLQDFVLSLHRTVDLIISVFKEIEITKLEEVIFAAAEHKCYRDRFIFENVSVEEQIQEFQNSWRYMMQWFSSDSFKHNGGYESLLRQTQETIDQIVKFIRQIGEKYRQVKNRQHEYLHAAVLFEKMNKLDMDECHEMFAYLFGVQNTKHIRAHSISTDQQNNDLWEIEGEKLTLLSKYRERKERKKRKAIQENLEERDRLLKEYEREREIKQQHIVRYLSSKVVRVRDLGPVPACIREEILEWLSRSSFEVSEKGILRYGFTDDGRTFEAIAVTKNRIKLVCNDGTLEMEDLEFRFKEVR

SEQ ID NO: 40415 - protein, 400 aa, Bacillus cereus
MEGKYIITDHMKELVEYLFEYMFIDRKKHRDIYYEIRRLQKELTYYVSENFKYNLLVHPDFIKLEKVTTSPKPWMGIERFKEPRDYVIMCCFMAFLEQQITNEFITEDLTTAIKNYFPGEVGIQWEGNGGYQNRLSLIRVVRALEELGIIVILDQNIDDFKDDDKKQVLFQKQAPSHYFMRNLPFDITTCQSSRSLKLKRQLEKEITGILPKFELNRRLFIEPIIRKQDLDEGLYDYLKRNIEQMESIVEETSSYQLELYKTGAMLTRTESYKPLTTFPNLKMESHLTMQLSFYVRELIMEKKIHKEFDGEIHMTRSEFLQLIDALKERNGDEWTASYRQMSAKQICKEFIPFLKSWGFCNELEDRESFILYDSLGRVSGAYNIELKQTEWESGGVEKTS

SEQ ID NO: 40416 - protein, 1400 aa, Bacillus cereus
MTIETRWRPNQAGFFNFWFFKDDLFEFINGKLHLMGENMSGKSVTTQSLITILLDGKKDATRMDTFGSRSRTLRDTFLGSTGDKDQQERNNQDKLGYTYLEYKRGIYDEYITTGMGLQAKAGHQDLDYWFFIILDNSRIGKRSQDIKLYKEERIDGEVKKIPLSKEELREQLGEGGKIYTTNAEYMKAVNDHLFQFREIQIFEHLIKLLIALRSNKLGGGQKPKMVYEILTDSLPSLSLEELSPLSNTIESIDTIERELTELQFAYDYIEVITSVYEAYHEVYLAEIANGYLKAENRLQNLYERQRYNSNQLSSTRSNVVKLTGDISYLEAKEKTLNERIEALRSKEAKDLSIQKGRLENQKVDITRLIKPKQEQKKSKEIKIKEMAQLSETTSSNSLKWINHMKDELSEMEHCALDSSFKQHSRHKGHFMTHYEYFDYDFSLWNQDIQSYQTFIHDLQKQIFDLEKLGQKKTMLIDEKNGATVLLNQKQDELHTIRKKLDELKKTLGNEMDEWLEDNEILVMSEEEKEQLLKRLYHFPNSVTERELTGMIEQQYSDVKRKINDEFHQVGRLEEELVQKQSSIEEELNEWIAGKMPIPFLSKEKEAVLESIKEWNIPHILFYDAVEFQEGLSEREMAAIESALEDTRLLTTVIADPKWDKQLSQYTTVPNKQGTPYMCNLTQYLKPSKKSGKLAVWVEELLSYVGISKEEECFILSNGNFKNGMIKGQSLLKDSPQYLGEKIQVHYKKQIMSSLENKLNEIAHELEKLQQEKNDLFLQLDLLDDEYHNLPDRNGILELYQALNRNEQSIKDIFQTKLDSVREKLTTLQNEMDTMTRRIQAEADFTEIPLTSEAFSQVRDEMHHYDRHLNQMKLAYTELKSIQQSMDSYNIQKQSLLEDVDNLSVEISSHENELQNIEVQINVIIEEMERSGLLDNERQIQEYMKELHSIPDKKDNLRKELVKEEGKNLQLDEKINFMIKEQGVREVIRDAWEIYFSSLVKLGENDTLRRIAEEYLELARDYLVGKEDLKNLRTRSEKELLNEFYKSRQAIAQYSPILDECTSNIEDNLVIPSELEELNLDTEWGNLISLRKYKLALEIQVNGIVKRREPRYVLSVLKERMDLQRANLNERDKRMYEEILLGSIGRTIKRKIVQTKDWVKNLNEIMMNINTGGGLQFGIKWMPLKATTEEELNTREIVRLLDIDAPLLKPEDREKLIDHFRSKIETRKLEQGLGQYTGLDLKETFKEILDYRKWFKFQLVSKYVNEGEFTLVDQDKFGKFSGGGRALALYIPILAAISSCYGEAHYDSPRIISMDEVWAGIDNKNINEMYKLLEELELDFISNSQFVSGCSPALKGLSIYELIRPKNSKEINFGRYIWNGRYKEYVKNNLLSEDYPGSANM

SEQ ID NO: 40417 - protein, 444 aa, Bacillus cereus
MYSQVQEAVNYFRLKGGYDRLFYLFREEIIRYNKARGVVILKNATDKEKECLDGIMPNINFNDTDIKVRLLTFEKRLQEKTVYDSVNLHNLLECYFSQKIVSNKEVGEHKRSKKVQFIEEVSKYTSHPYYHYYMDSIKGQRRGYKRFMNLYKESSFTLRKYLSHLSRSIQLLPLSNMTHVAMFATRMTKDPHAYDLQTSLGDLLFDMLTTTYEREVMNRKLPSKLSIEEINDILNHYNLIRDDVSSDVTFTGLYARDKRDLPIEYIDIATKHDTVLKLPLCELIKVEKFYPIGSFQVIYVFENPILYKVFIEMVKEKVGCYPPSVCTSGHFAYALWKFFDKFIPYNPTVSIKTNFDMDPEGLKMNDKLYNRYGEMIQPIAYSKELFKEKQSDNQIHRNRLKQLDNLTHGVLKEMGELLKETPQASYQENFIEVCVEDAISQFIG

SEQ ID NO: 40418 - protein, 514 aa, Ralstonia solanacearum
MKLQSEAQADLFRHISVEKATLYRCVMDCFAAAKRQFRLHLRPDEVLNEANWNRMPEHAPPRIEEVQAALAQLTEWGNLESQPDTTRVASISDFYRARFLYRLSQGGEAVEAALTTFERTLRRRAELQTVALEDISNRLQTLLSLADSATPDTAKIHETLRDLVRVFESLADNAQAFMAGIGRSIELQQAEVTTVLAYKKRLIDYLERFIGGLVGRSGGIAQHLVALSPRIDSLLWLAAQREARDSAPDDDPEQLDAVARGWQAWRERWKGLRSWFVTTGHEPPQAELLRSKARAAIPQLLIAVSALNERRSGRSDRSADFRMLAGWFAACEDDSQAHRLARAAFALNPARHFSLNPAPAPGIQDLPASTPWAEAPPLHIHPRLREYGEAAPRGALPRVQSRDEQRRLLAAQLEEEHAQIEAARLRLATGRATLLSELGALGTHDFALFLKLLGEALTAQMSPDVPVETQSGDGLLHIRLQPLTGSPRAMITTPAGVFSGRDHTVIITRMEDLP

SEQ ID NO: 40419 - protein, 416 aa, Ralstonia solanacearum; identical to SEQ ID NO: 38938

SEQ ID NO: 40420 - protein, 1376 aa, Ralstonia solanacearum; identical to SEQ ID NO: 38939

SEQ ID NO: 40421 - protein, 514 aa, Ralstonia solanacearum; identical to SEQ ID NO: 40418

SEQ ID NO: 40422 - protein, 416 aa, Ralstonia solanacearum; identical to SEQ ID NO: 38938

SEQ ID NO: 40423 - protein, 1376 aa, Ralstonia solanacearum
MTDTQSPALPIPTLARWQPLRLGLVELFHYDSEEFWFRDGRLLLRGNNGTGKSKVLSLTLPFLFDAYLKPSRIEPDGDASKKMAWNLLLGRHERRMGYAWVEFGRVGEDGRHRYLTLGSGLSAAAARAQVDTWFFLLDEQRINQDFWLMSPTRVVLTRDRLREALQDCGQFFDTAAPYRRAVDERLFRLGSTRYAALIDTLIQLRQPQLSKKPDEASLSKALTEALPPISTDLLADVADALNQLEEYRRELEEYEALERAVGQFNQRYQRYAATQARRQARNLRTAQTGFDNASRELNSARDALETAQAEEKRADQAWQQADAMLAANRTRLEELQNDPAMADAKTLEKADADFRQRDKEANAAQQTRHDMQTRLERERQATRTRAQRAEHAGRALAESREDAVQAAERAGLSHAYSANPLASANARLLQPLALDTARQDLRRAGVERRAEVALLLRHCDEADHAAQAHTYARTQRDERADEAEAAAAQREEADAAVDRQGRTLLDAWQRHLDGLRQFQCPDGANALEALAAWTVSLQGDNPARTALHRAQQTASLRLAQRQAALQNDRHALEQEHDTLQDERTRLEQGEDAVPQPPHWRAPDVRVGRAGAPLWQLVDFHPGTSAADCAGLEAALQASGLLDAWVTPNGTLLDSDGGDALLLHDAQWLTRERQPQSLAAWLRPAEAANGASPRVDPAVVQHLLEGVACCAEDNLAAEAWIAPTGRFRLGALAGAWHKPGAEFIGYAARAAARERRQHEIGARLDAIDAALASLARDFVQLDADQREAAHEWQFAPSDDSLRAAHIAAVLHAREFDMARQRLEHADRQLRAAAQQWEQAREILARDAEDLALPPARDALRAIDQALQTFGDCLHTLAVDARELRDALAEHAEQLQREQQAESDTLHAVEQFAEREALAEEAHIRLETLRTSVGARVEELQQRLSDVRSAVTSGETELRQQNGTRRQAGEARARAEQKVEAAEATLAERIAARQYAVGQMQGFSATGLLVTALPDAELPSMHAPWTIEPALALARRTEQALLNVKDDDEAWTRVQSQVSQDYTELGRALAALSHQAQAETNDFGLVVSIIYQNRPERPDQLGARLAGEIAQRRELLTAGERQVLENHLQAEIASAVQKLLRDAERQVKAINDELDKRPTSTGVRFRLQWETLPEGADGAPVGLEAARRRLLNTSTDLWTAEDRRVVGEMLQQRVAAERSRADADQGGSLLDQLARALDYRRWHRFRVQRWDGQWRPLSGPASSGERALGLTVPLFAAVSSYYTQESYAHAPRLVLLDEVFAGIDDAARAHCWALIREFDLDFVVTSEREWACPAELPGVAIAQLQRHEGIDAVHVSRWTWDGRTRRREDDPNRRFPDA

SEQ ID NO: 40424 - protein, 496 aa, Bacillus coagulans
MDQIMKKVVEASYLTADSAAQYRVILRFFYRQHERMRDFISPEEVLEYLRSLPAFHDYEEEQLHQQLAQLVKWNNLVARQDMTNAKTIEEYKKKRFRYQCTPYTVEIERMLIQLEKLGDQFQGSLERSQFDRLLASLAKLEEELKQPLDKPAAHYMHIWDDIFHFFGTIRTNTADYIAYINSEKTSQRMQTEAFLVYKNQFTAYLRDFIVSLQKTSLQIRERLRELDTHILAPLFEKLVEHRRQIPRLEDTAASGQEWLEEFREYWESLRRWFLGASSSQSELEMLQMQTNEMIRRMARYVQRISERQQHFRSRKKDYLHLSKWFAGCRNLEEAHQLSSVVFGTVTVRHLHLEEATTDNLHAETWEEQPEMREIKPRTNRYREKTKPGAFRSNHEQKEKQRLAYLKEREQEKQLIEKYMKNGEIRLAEIGIVEPFVRKVLLGWIGKSMAAKNHEVKTDYGMSVKVVIDPDRIITLDAEDGKLIMPDAVFELSGGER

SEQ ID NO: 40425 - protein, 387 aa, Bacillus coagulans; identical to SEQ ID NO: 38942

SEQ ID NO: 40426 - protein, 1370 aa, Bacillus coagulans
MTEGKWVMNRAGLLNFWYYDDEIFEFADGKLLLRGTNGSGKSVTMQSILPVLLDGKKTPDRLDPFGSKARKMEDYLLGEKEVSGHDERTGYLFLEYQKQGTKQYITTGIGMQAKRHKTLKSWYFVLTDNRRIGYDFELAHTRQSERIPLSAKELENRIGSGGYLVHSQKEYMELVNKYIFGFQSMEAFEDLIKLLIQLRSPKLSKDFKPTVIYEILESALPPLTDDELRHLSDTIESMDETEQQLEQLEREHESAKKLVRQYDLYNQYILAERAQKWREAESRLQDAKQDASTLETRSESLRGVIENLEEEKKHYEQKRDVLKAEQERLQHHEVWRLEKEKGEKQARAEKLKSEAADLEKKWEAKKSQLLDIRLEQDRLETENSKDESSMQEILDELALDAGDAAFTGHGINAGDFSRHEGEAFDFSVWKRETKQHSGLLQKLRQLAGEVERLHEAHLKLQRQSSAKKQEIDELRKQLDHLENWFTEQKQELEDAVFLWIEQHPALSFTDERLRRIAGALDGLYEENRYEAVREEIVDAANDYILQVRTEISRAEQEQKAKEQELAEAEETLVYWQNLKLANPERPADTEAFRARLHESGKRYLPFYAAVEFRDHVTDAQKARIEAALRQTGILDSLITEEPVTPVHDRVIRPNPHILGYTLADYLKPDPDDDSPVSAARIDEVLRSIPLEPSESGFHIDADGSFSIGCLVGHAPDEGPSKFIGRTSRKRYQQEKIKETEQKIAEIRLALLQMENSLLDWAGKVQEAEDWKAGIPDDKDLRDIEEQMEKTARSLKQEQEFLSDIDREWKQVYQDLQNIRLQLHEQGAGLNLALQSGPLDEALAAAKSYEEHLHNLELTFQRLFSRRKMLARLAADILEKEQELDEIRGEENIRRSEWEKTAADIEAIEQQLKLRGIEEVRARIQAVQHEYASTDEKIRDIYETKPKKEAELEKCIADLSLAKTRATFWANMAAEWEKLVKEELSLGFVESGDTEPESILAAFSGVLEKYDRAKLNENLTKIFFNEQSNLTEYRMSEFTKEADPPEWFTEKLDDYYETFKKEWEGLRGRRLIQMEYRGRRVSPYTVLESLEKELLNLQSYLDEQDRRLYEDIIVNTVGVILRNRIQRAAKWVKEMDAIMRNRDNSSGLTFSIAWKEKTAESEDELDTKDLVALLQRNSKFLNEDDLNRITKHFRSRIAAAKELIEIRNEGSTLHQVLKEVLDYRKWFQFVLSYRRAGEPKRELSNTAFFKFSGGEKAMAMYIPLFTAAYSRYLEAGSMAPYIISLDEAFAGVDENNIRDMFEVVEQLGFNYIMNSQALWGDYDTISSLAICELVRPKNANFVTVIRYRWDGHKRSIVEKPEEALAGAPDRL

SEQ ID NO: 40427 - protein, 431 aa, Bacillus coagulans
MNDAIDLLRKEPGMMKLFRLFKEKYRSLGHIGGTVSLAGFTRTELEAIAGLAGTSPDLLREKNKISLRAFEKALAPTVFGKYTLVELLEAVLREKIFSKAEEGEIEKKKEEQFLARLAETMPGGNWWWRRIAGKTADTRFIWHAYKQDPDTLSAQLTTVLKASTMLPEEGKYERIPFFSQRVTGNPHFFDQNRFEGRLFVHCLFTSQLLKGLIEEMPKTTEELNELYANAGLMRDDLWSFVTCRAFLAETENGLHPVWREAAALGTVMNVPVKELLQLTNIWPRVGKKVWIIENSGVASAVLDEVPDAPVICTHGQFRTAAWIMLQRLAENGCTFYYSGDLDPEGVVMAERLSNRFPGQTVFWRMDPDAYWRVLSEEDISARLSKLDAVQSPELLLVADEMRLKKKAGYQEGLADLLVEDLKKRWAGGKEI

SEQ ID NO: 40428 - protein, 308 aa, Bacillus coagulans
MQTEAFLVYKNQFTAYLRDFIVSLQKTSLQIRERLRELDTHILAPLFEKLVEHRRQIPRLEDTAASGQEWLEEFREYWESLRRWFLGASSSQSELEMLQMQTNEMIRRMARYVQRISERQQHFRSRKKDYLHLSKWFAGCHSLEEAHQLSSVVFGTMTVRHLHLEEATTDNLHAETWEEQPEMREIKPRTNRYREKTKPGAFRSNHEQKEKQRLAYLKEREQEKQLIEKYMKNGEIRLAEIGIVEPFVRKVLLGWIGKSMAAKNHEVKTDYGMSVKVVIDPDRIITLDAEDGKLVMPDAVFELSGGER

SEQ ID NO: 40429 - protein, 387 aa, Bacillus coagulans
MDPLQVFDEKAVQGMDLLFHHYWILRSEHPDWYQLIREREKVLRRYISEKFGLRLIIHQHFIKLEKIPVEPESWMGIPHFQEPMDYAIFCCALSFLEGKAVDEQFLLSEMCQEIQNDYPVEDGLDWTLYLHRKSLIRAVRALMEFHLIRTIDGDISRFDTYEDQEVLYEATVYSRYFLRSFPDDFTSYADWTGLLEEDWKQNQEDERRKRVYRKLFFSPGLHRKDTQDPDFLYIRNFRNRLFEDIEEHSRYKLHVFKNTAFLSAAEPRSYHHVYPNAKGSTDLMLQLSKTLHDHPEKYVPNEAGEILLTEGEFEAVIDEMRSRLERGWPKHFRDAGTKAVCAELVETMKEWMMAETDEAAGLIRIKPLLGVLAGKYPADFEKGDEQP

SEQ ID NO: 40430 - protein, 1370 aa, Bacillus coagulans
MTEGKWVMNRAGLLNFWYYDDEIFEFADGKLLLRGTNGSGKSVTMQSILPVLLDGKKTPDRLDPFGSKARKMEDYLLGEKEVSGHDERTGYLFLEYQKQGTKQYITTGIGMQAKRHKTLKSWYFVLTDNRRIGYDFELAHTRQSERIPLSAKELENRIGSGGYLVHSQKEYMELVNKYIFGFQSMEAFEDLIKLLIQLRSPKLSKDFKPTVIYEILESALPPLTDDELRHLSDTIESMDETEQQLEQLEREHESAKKLVRQYDLYNQYILAERAQKWREAESRLQDAKQDAGTLETRSESLRGMIENLEEEKKHYEQKRDVLKAEQERLQHHEVWRLEKEKGEKQARAEKLKSEAADLEKKWEAKKSQLLDIRLEQDRLETENSKDESSMQETLDELALDAGDAAFTGHGINAGDFSRHEGEAFDFSVWKRETKQHSGLLQKLRQLAGEAERLHEAHLKLQRQSSAKKQEIDELRKQLDHLENWFTEQKQELEDAVFLWIEQHPALSFTDERLRRIAGALDGLYEENRYEAVREEIVDAANDYILQVRTEISRAEQEQKAKEQELAEAEETLVYWQNLKLANPERPADTEAFRARLHESGKRYLPFYAAVEFQDHVADAQKARIEAALRQTGILDSLITEEPVTPVHDRVIRPNPHILGYTLADYLKPDPDDDGPVSAARIDEVLRSIPLEPSDSGFHIDADGSFSIGCLVGHAPDEGPSKFIGRTSRKRYQQEKIKETEQKIAEIRLALLQMENSLLDWAGKVQEAEDWKAGIPDDKDLRDIEEQMEKTARSLKQEQEFLSDIDREWKQVYQDLQNIRLQLHEQGAGLNLALQSGPLDEALAAAKSYEEHLHNLELTFQHLFSGRKMLARLTADIFEKEQELDEIRGEENVRRSEWEKTAADIEAIEQQLKLQGIDEVRARIQAVQHEYASTDEKIRDIYETKPKKEAELEKCIADLSLAKTRATFWANMAAEWEKLVKEELSLGFVESGDTEPESILAAFSGVLEKYDRVKLNENLTKIFFNEQSNLTEYRMSEFTKEADPPEWFAEKLDDYYETFKKEWEGLRGRRLIQMEYRGRRVSPYTVLESLEKELLNLQSYLDEQDRRLYEDIIVNTVGVILRNRIQRAAKWVKEMDAIMRNRDNSSGLTFSIAWKEKTAESEDELDTKDLVALLQRNSKFLNEDDLNRITKHFRSRIAAAKELIEIRNEGSTLNQVLKEVLDYRKWFQFVLSYRRAGEPKRELSNTAFFKFSGGEKAMAMYIPLFTAAYSRYLEAGSMAPYIISLDEAFAGVDENNIRDMFEVVEQLGFNYIMNSQALWGDYDTISSLAICELVRPKNANYVTVIRYRWDGHKRSIVENRKEALAGAPDLL

SEQ ID NO: 40431 - protein, 431 aa, Bacillus coagulans
MNDAIDLLRKEPGMMKLFRLFKEKYRSLGHIGGTVSLAGFTRTELEAIAGLAGTSPDLLREKNKISLRAFEKALAPTVFGKYTLVELLEAVLREKIFSKAEEGEIEKKKEEQFLARLAETMPGGNWWWRRIAGKTADTRFIWHAYKQDPDTLSAQLTTVLKASTMLPEEGKYERIPFFSQRVTGNPHFFDQNRFEGRLFVHCLFTSQLLKGLIEEMPKTTEELNELYANAGLMRDDLWSFVTCRAFLAETENGLHPVWREAAAAGTVMNVPVKELLQLTNIWPRVGKKVWIIENSGVASAVLDEVPDAPVICTHGQFRTAAWIMLQRLAENGCTFYYSGDLDPEGVAMAERLSNRFPGQTVFWRMDPDAYLRVLSEEDISARLSKLDAVQSPKLLLVANEMRLKKKAGYQEGLADLLVEDLKKRWAGGKEI

SEQ ID NO: 40432 - protein, 496 aa, Bacillus coagulans
MDQIMKKVVEASYLTADSAAQYRVILRFFYRQHERMRDFISPEEVLEYLRSLPAFHDYEEEQLHQQLAQLVKWNNLVARQDMTNAKTIEEYKKKRFRYQCTPYTVEIERMLIQLEKLGDQFQGSLERSQFDRLLASLAKLEEELKQPLDKPAAHYMHIWDDIFHFFGTIRTNTADYIAYINSEKTSQRMQTEAFLVYKNQFTAYLRDFIVSLQKTSLQIRERLRELDTHILAPLFEKLVEHRRQIPRLEDTAASGQEWLEEFREYWESLRRWFLGASSSQSELEMLQMQTNEMIRRMARYVQRISERQQHFRSRKKDYLHLSKWFAGCHSLEEAHQLSSVVFGTMTVRHLHLEEATTDNLHAETWEEQPEMREIKPRTNRYREKTKPGAFRSNHEQKEKQRLAYLKEREQEKQLIEKYMKNGEIRLAEIGIVEPFVRKVLLGWIGKSMAAKNHEVKTDYGMSVKVVIDPDRIITLDAEDGKLIMPDAVFELSGGER

SEQ ID NO: 40433 - protein, 387 aa, Bacillus coagulans; identical to SEQ ID NO: 38942

SEQ ID NO: 40434 - protein, 1370 aa, Bacillus coagulans
MTEGKWVMNRAGLLNFWYYDDEIFEFADGKLLLRGTNGSGKSVTMQSILPVLLDGKKTPDRLDPFGSKARKMEDYLLGEKEVSGHDERTGYLFLEYQKQGTKQYITTGIGMQAKRHKTLKSWYFVLTDNRRIGYDFELAHTRQSERIPLSAKELENRIGSGGYLVHSQKEYMELVNKYIFGFQSMEAFEDLIKLLIQLRSPKLSKDFKPTVIYEILESALPPLTDDELRHLSDTIESMDETEQQLEQLEREHESAKKLVRQYDLYNQYILAERAQKWREAESRLQDAKQDAGTLETRSESLRGMIENLEEEKKHYEQKRDVLKAEQERLQHHEVWRLEKEKGEKQARAEKLKSEAADLEKKWEAKKSQLLDIRLEQDRLETENSKDESSMQETLDELALDAGDAAFTGHGINAGDFSRHEGEAFDFSVWKRETKQHSGLLQKLRQLAGEAERLHEAHLKLQRQSSAKKQEIDELRKQLDHLENWFTEQKQELEDAVFLWIEQHPALSFTDERLRRIAGALDGLYEENRYEAVREEIVDAANDYILQVRTEISRAEQEQKAKEQELAEAEETLVYWQNLKLANPERPADTEAFRARLHESGKRYLPFYAAVEFQDHVADAQKARIEAALRQTGILDSLITEEPVTPVHDRVIRPNPHILGYTLADYLKPDPGDDSPVSAARIDEVLRSIPLEPSESGFHIDADGSFSIGCLVGHAPDEGPSKFIGRTSRKRYQQEKIKETEQKIAEIRLALLQMENSLLDWAGKVQEAEDWKAGIPDDKDLRDIEEQMEKTARSLKQEQEFLSDIDREWKQVYQDLQNIRLQLHEQGAGLNLALQSGPLDEALAAAKSYEEHLHNLELTFQRLFSRRKMLARLAADILEKEQELDEIRGEENIRRSEWEKTAADIEAIEQQLKLRGIEEVRARIQAVQHEYASTDEKIREIYETKPKKEAELEKCIADLSLAKTRATFWANMAAEWEKLVKEELSLGFVESGDTEPESILAAFSGVLEKYDRAKLNENLTKIFFNEQSNLTEYRMSEFTKEADPPEWFAEKLDDYYETFKKEWEGLRGRRLIQMEYRGRRVSPYTVLESLEKELLNLQSYLDEQDRRLYEDIIVNTVGVILRNRIQRAAKWVKEMDAIMRNRDNSSGLTFSIAWKEKTAESEDELDTKDLVALLQRNSKFLNEDDLNRITKHFRSRIAAAKELIEIRNEGSTLHQVLKEVLDYRKWFQFVLSYKRAGEPKRELSNTAFFKFSGGEKAMAMYIPLFTAAYSRYLEAGSMAPYIISLDEAFAGVDENNIRDMFEVVEQLGFNYIMNSQALWGDYDTISSLAICELVRPKNANYVTVIRYRWDGHKRSIVENRKEALAGAPDLL

SEQ ID NO: 40435 - protein, 431 aa, Bacillus coagulans
MNDAIDLLRKEPGMMKLFRLFKEKYRSLGHIGGTVSLAGFTRTELEAIAGLTGTSPDLLREKNKISLRAFEKALAPTVFGKYTLVELLEAVLKEKIFSKAEEGEIEKKKEEQFLARLAETMPGGNWWWRRIAGKTADTRFIWHAYKQDPDTLSAQLTTVLKASTMLPEEGKYERIPFFSQRVTGNPHFFDQNRFEGRLFVHCLFTSQLLKGLIEEMPKTTEELNELYANAGLMRDDLWSFVTCRAFLAETENGLHPVWREAAALGTVMNVPVKELLQLTNIWPRVGKKVWIIENSGVASAVLDEVPDAPVICTHGQFRTAAWIMLQRLAENGCTFYYSGDLDPEGVAMAERLSNRFPGQTVFWRMDPDAYWRVLSEEDISARLSKLDAVQSPELLLVADEMRLKKKAGYQEGLADLLVEDLKKRWAGGKEI

SEQ ID NO: 40436 - protein, 496 aa, Bacillus coagulans; identical to SEQ ID NO: 39661

SEQ ID NO: 40437 - protein, 387 aa, Bacillus coagulans; identical to SEQ ID NO: 39708

SEQ ID NO: 40438 - protein, 1371 aa, Bacillus coagulans
MTEGKWVMNRAGLLNFWYYDDEVFEFADGKLLLRGTNGSGKSVTMQSILPVLLDGKKTPDRLDPFGSKARKMEDYLLGEKEVSGHDERTGYLFLEYRKQGTKQYITTGIGMQAKRHKTLKSWYFVLTDNRRIGYNFELTHTRQSERIPLSAKELENRIGSGGHLVHSQKEYMELVNKYIFGFQSMEAFEDLIKLLIQLRSPKLSKDFKPTVIYEILESALPPLTDDELRHLSDTIESMDETEQQLEQLEREHESAKKLVRQYDLYNQYILAERAQKWQEAESRLQEAKQEAGTLAVRCESLRGVIENLTEDQKQNEQKRDVLKAEQERLQHHEVWRLEKEKGEQQARAEKLKSEAADLEKKWELKKSQLLNIRLEQDRLETENSKDEASMQETLDELALDAGEAAFPQHEINAGDFSRHEGEAFDFSVWKQEIKQHSGLLQKLQQLAGEAERLHEMHMKLQRQSSAKKQEIDELRKQLDHLENWFTEQKQELEDAVFLWIEQHPALPFTDERLRRIAGALDGLYEENRYEAVREEIVKAANDYILQVQKEISRAEQAQKAKEQELAEAEETLMYWKNLKLANPERPQDTEAFRAGLDGAGKRYLPFYAAVEFQDHVTEAQKARIEAALRQTGILDSLITEEPVTPVHDRVIRPNPHILGYTLADYLKPDPDNGSPVSAARIDEVLRSIPLEPSDSGFHIDADGSFSVGCLVGHAPDEGPSKFIGRTSRKRYQQEKIKETEQTIAEIRLALLQIENRLSEWARKVQEAEDWKAGIPDDKDLRDLEEQIEKTARSLKQEQEFLTEIDRDWKQVYQHLQNIRLQLHEQGAGLNLVLQSGPLDEALAAAKSYEEHLHSLELIFQRLFSGRKMLARLAADILEKEQELDEIRGEENIRRSEWEKTVANIEAIEQQLKLQGIDEVRARIQAVQHEYTSTEEKIREIYEEKPKKEAELEKCTTNLSLAKTRTTFWTNMAAEWEKLVKAELSLGFVESEHTEPESILTAFSGVLEKYDRAKLNENLTKVFFNEQSNLTEYRMSEFTKEADPPDWFAEKLDDYYETFKKEWEGLRGRRLIQMEYRGRRVSPYTVLESLEKELLNLQSYLDEQDRRLYEDIIVNTVGVILRNRIQRAAKWVKEMDAIMRNRDNSSGLTFSIAWKEKTAESEDELDTKDLVALLQRNSKFLNEDDLNRITKHFRSRIAAAKELIEIRNEGSTLHQVLKEVLDYRKWFQFVLSYKRAGEPKRELSNTAFFKFSGGEKAMAMYIPLFTAAYSRYLEAGSMAPYIISLDEAFAGVDENNIRDMFEVVEQLGFNYIMNSQALWGDYDTISSLAICDLVRPKNANYVTVIRYRWDGHKRSIVEKPKESLAGATPDLL

SEQ ID NO: 40439 - protein, 432 aa, Bacillus coagulans
MMKDAIDLLRKEPGMLKLFHLFKEKYRSLGHIGGTVSLSGFTRTELEAIAGLAGTSPDLLREKNKISLRAFEKALAPTVFGKYTLVELLEAVLKERIFSKAEEEEIEKKKEEQFLARLTETMPDGNGWWRRIASKTADTRFIWHAYKQDPDTLSAQLKMVWKAFTMLPEEGKYERIPFYSQRITGNPHFFDQTRFVGKLFIHCLFTDQWLKGLIEEVPKTTEELNELYANAGLMRDDLWSFVTCRAFLAETENGLHPVWREAAATGTVMNVPVKELLQLTNIWPRAGKKVWIIENSGVASAVLDAVSDAPVICTHGQFRTAAWIMLQHLAKNGCTFYYSGDLDPEGVVMAERLSSRFPGQTVFWRMDPDAYFLTLSEEDISTRLSKLDAVQSPELLLVANEMRLKKKAGYQEGLADLLIEDLKKRWLSGKEA

SEQ ID NO: 40440 - protein, 496 aa, Geobacillus stearothermophilus; identical to SEQ ID NO: 39941

SEQ ID NO: 40441 - protein, 398 aa, Geobacillus stearothermophilus; identical to SEQ ID NO: 39942

SEQ ID NO: 40442 - protein, 1373 aa, Geobacillus stearothermophilus
MANPWVLHRAGLINFWYYDEQYFHFADGKLLLRGSNGAGKSVTMQSLIPVLLDGKKTPDRLDPFGSRARRMEDYLLGEKDVVNRDERTGYLFLEYKRKASDQYVTTGIGLRAKRQKSLDFWGFVMFDNRRIGYDLQLYKQEKTGEKIPLTKRELAALLGAGGTVVETQKEYMELVNKHVFRFESLEAFQELIELLIQLRSPKLSKDFKPTVIYEILESSLPPLTDDELRHLSETIENMDQAKQQLEQLERDERALKRLCDQYRLYNEYMIAEKAAEYVKAVKQAEQLAAEQQRLHDEEEKTRKALDELEESITRLGREEDVLRAREIDLAGHEVFQQAEKYEQLKAERQRLEERRERHEQTIAEKERQERQHRRRLDEAEARLDDLERKLEDELEQLRMDADEGSFSLHETNEDDFHRHRQKQQEFSFAAWKQEADRHIEQLEELARLWRRHDEVKRRYEEASSEAGERRREMDEWRHQQWKWEELFEEEKERFEQAVLAWVEQGGIDVSETDIQAFLQQMGALYEQYSLDDLKRPFVQAYYDAVGKKKDEKWRLEHDIRMLEEKRAEREAELRQWREQRDPEPERDEQTTAARLALEEKGIPFVPLYAAVEFVDDVPDDVRERIESALSHAGLLDALITAREIDVACDRVLIPKPVHMAHTLADYLRPDANAPVSMERIDEVLRSIVITDADQEGGMTIDETGRYSLGLVHGHAPRGSKAMFIGRAARERWRLENIAALEAEIAAVGQEIDRLRGAHQAVEAAIQALADWFASFPSDRDVRTAFDEAQEARRQAESKEREWKRQEEKAALLAREWKQIKQQLHDESAELDLAFTLDGCEQAQLAMKSYVRHVHELEVLYRETRHTEAMIAQQRERLAALETEIDEAKGERNRLRDETERLALRIAEMERTLAQMGADDIRAEIARIQERLAFLRQEIPRLVNERARTEQRLMRLVEEREKGAQREAFARELAAMWEKSFAREAALGLVDLDRSRSLLEQAKEAKQRYEAVLKETRSSLLARLNTVFFQESSNLTEYRASFEPLEEQTKPEWTAAAPDDEMAMKAADWREKQERHVIYLDYKGERATPFAVLAEVERDIVLQHEYMKEQDRELYEDVILKSVGRILRSRIQRAERWVNEMNKLMGGLDTSSGLVLSIQWKPKTAETEAELDTKELVRLLRLDPRLLREEDLQRVTNHFRSKIARARELLEERGQGSTLHQIIKEVLDYRKWFSFTLYYEKTNEPKRELTNHRFYQFSGGEKAMAMYIPLFAAAYSRYQEAGDDAPYIISLDEAFAGVDENNIRNLFGLVEQLGFNYIMNSQALWGDYDTVPALSICELVRPRNASFVTVIHYRWNGRVKQLMVDDKEWEMIET

SEQ ID NO: 40443 - protein, 406 aa, Geobacillus stearothermophilus; identical to SEQ ID NO: 40139

SEQ ID NO: 40444 - protein, 498 aa, Geobacillus toebii
MDASWLKPISEVKYLAVDNAYRYRAILRYFYTQHERMRQYLFPEEVYAFLKQHDEFRDYTEDDLQQDLDQLVKWKNLIARQETTHIRTIEEFKKKRFRYQCSPYTVEIERMIRTLEQLGDSFGGSLEKTRFDRLYTSLVRIETIIKNGFAEKRDEMNQVWEETFDYFKKIIQNSADYIAYLNSENMEEQMMSDAFLVYKEKFTAYLRDFILALQKTSMQIEKLLEDLQEEEVRQFVHHVVDYQMTIPRWEDLSLTREQMVEERMETWRSLKEWFLGRNGHDSELAFLQKQTNEAIRRITRVVQRLGERHHHFRSRKKDYLYLAQWFSKLDSLEDAHKLSSVVFGCFHTKHVVTDNDATEDMYRDIWEEAPSEWTVKPRVRHYQEKKKPQAIVDNENKKKQTMVEFLQQKQREEEELKQLVQDGKIILRELPVVAPHVRKTLLSWIAKAMAREDRVVKTEIGWKVKIVQKDDSFIELHAEDGTMIMPNYEIHFLEDRED

SEQ ID NO: 40445 - protein, 389 aa, Geobacillus toebii
MERDFDEKAKIALKVLLENFWITRERDPELFQLIRERENIVKRYVQEKFGYRLIVHRYFAKLEKIPAEPEAWMGIESFQEPLDYALFCCLMAYLEGKEVEEKFLLSDVCEEIKAMYPGEVPLDWTNYQQRRALIRVLKTAEELGVVKRVDGEIEGFAQREDHEALYEVPVLSRYFMRSYPKDLTQYKTMEELLEEEWKTAPQDYRRHRIYRQLFLSPVVYRQQKDDPDFYYLRNFRHRLREDIEAHSDFRYELYKNAALLTLPERENVYTLFPDQKGTSDIILHFASVVREHLLDYPPDEYGKIRMTQADFQRLLTICKERYGEGWGKTYRDMTPAQLTSVLLEELKQWKMADVEKETGMIMLYPLLGRIVGHYPPDFMKKGMDDDDDE

SEQ ID NO: 40446 - protein, 1376 aa, Geobacillus toebii
MTNKWVPHRAGLLNFWYYDEEYFHFADGRLFLRGSNGSGKSVTMQSLIPVLLDGKKTPDRLDPFGSRARRMEDYLLGEKELVDRDERTGYLFLEYKRKHSDHYITTGIGLRAKRQKGMDFWGFVIFDNRRIGKDIALYKKEKTGEKIPLTKRELITVLGDGGTVVDTQKEYMELVNKYIFRFESLEAFQELIELLIQLRSPKLSKDFKPTVIYEILESSLPALTDDELRHLSETIENMDQAKQQLEQLERDEASLRRLCQHYQQYNEYMIWEKANEWLKAAKQEEKLTEEREQCLRDEERYAARKEELATEIQSLQNEQAVLRKRELDLASHEVFRAEEKYRETKQRLANVQDQIMKEERYLDDKQQQERKLKQEIAKSEDVLYQSAQTIDEQLEELRYAALESAFASHELNEEDFQRHRNEPFDFTLWRKEAEAYEKRLEEILSLWTRHDDLKRRYEDAYHELGEQQRLLDNLHNDAKKWHELLEMEKSRLQEAVFAWKEAHPDIPIDEETIQSFLRYLNELYERYHFEDVKKPFADRYYEALDQKKAEKVRWEHEIELVKREIAETEEELCRWKEQKDPELEHDEQTAQARAALQARGVAYVPFYASVEFYDHVPESLRERIESSLYHAGLLDALVTETDVSIVHDRILKPNPVEMAHTLAEYLRPDVDEDLGVSAERIESVLRSILISDEAQEGRFAMDESGHYSFGLLQGHAPKREQAIFIGRNARKRWRLSQIAQIEEKLQQLDELLQQKKEQLAHVEATIASIHEAFQTFPSDRDVRAAFDEWDRTKRAITSKQQEVERKSEKLNSIARDWQQAKQRLREKAEGLDLEFTKERYEEARRWMKLYTGHLTELVLEHRSFLHQLQVSRYHQDQLETVQAEIDEAKGEINILASEQQRLLLEIQHMEQMLKQMGADDIRAEISRVRDRLEWVNKALPEKINEQAHIEQTIKSTHRQLEELERKLQFASTLAAVWKRSFIAEAEHGLVEVAENVDPHEQAKDVVRRYGSIGKEQTRSSVIAKLNSVFFQESANLVEYRLSQEPVALEEENPFAGIDLDEEMELKVSDWKEKRDRIILLLDYKGQRVTPFYLLKEMEKDILLQREYINEQDRELYEDIILKTVGRILRSRIQRAERWVKDMNALMQQRDASSGLLLSIQWKPKTAETEEEMDTKELVELLRMNSRLLKEEDLQRVTMHFRSKINRAREMLEEKGQGNTLHQVIKEVLDYRKWFTFTLYYQKTNEPKRELTNQRFYQFSGGEKAMAMYIPLFAAAYARYQEASEEAPYIISLDEAFAGVDENNIRDMFDLVESLGFNYIMNSQALWGDYDTVPALSICELVRPKNASHVTVIRYYWNGTMKRLVTDWDEQEMVVKQ

SEQ ID NO: 40447 - protein, 443 aa, Geobacillus toebii
MKSLPELAAEAAQFFRGEAGFHRLFCEMKKKYESLGRIGGTISLANFTKEEKEAIAAFFGKEMTRVSLQAFAKQLDKTRFAGVSLEELLVHYFGEPLVANKERREAEQQEKAAFFQRLIAAYPSGAEWLTAALEHPNEYRLLHQAYVQQRDELYASICTVCEALRQLPEKGTYERLPLFAQKVTGDPHAFDLHTFQGKLFLSALEFYSRKKYQLSSVEEVNELLQSFGILREDILNFVTCAGILAETKEGIHPVFSAACETNMALNVPLREIVALTRAYPAKGNAVFVVENAGVFSELLDEAMPLVSTNGQLNLATLLLLDLLVESGAHLYYSGDFDPEGLKMADRLAGRYGENLSLWHFTCEDYFASMPSVSLSEERLAKLQSVSSPKLQPVKQEIERCKKAGYQEAILPVLRKDIEKEKANLKMKIDIDIHDTKNALPSEE

SEQ ID NO: 40448 - protein, 503 aa, Geobacillus sp. B4113_201601; identical to SEQ ID NO: 39647

SEQ ID NO: 40449 - protein, 385 aa, Geobacillus sp. B4113_201601; identical to SEQ ID NO: 39648

SEQ ID NO: 40450 - protein, 1372 aa, Geobacillus sp. B4113_201601; identical to SEQ ID NO: 39649

SEQ ID NO: 40451 - protein, 412 aa, Geobacillus sp. B4113_201601
MGVDRDMNRAEEAAAFFRSELGFHRLFVEMKRKYESLGRVGGVVSLASFSENEREAIAAFFGRDVSRVSLPAFERQLERTRFAGVGLIELLEHYFGEPLVPKKEQRQAAEKERERFFGHLAHEHPWLEDICGQRFIQAAYEANREELAAAIRLVGAALRRLPLGSYERLPLFAQRIAGDPHAFDLSTLPGKVLLSALQATVLGEWDVTSVESVNELLQSVGLLREDILNFATCANLLAETKKGPHPVFTAAVEANSALNAPLRDVLSLIRAYPANGGIVYVVENAGVFSTLLDTRAPLVCANGQMNLATMRLLDLLAASGAKLHYSGDFDPEGLKMADRFLERYGSAAVPWRYSVDDYFAATPSVHLPPERLAKLASVASTPLQPVKEAIAKTEKAGYQEAIISRLLGDIKS

SEQ ID NO: 40452 - protein, 496 aa, Geobacillus stearothermophilus
MDATWLKPIVETKYLSTENAHRYRAILRYFYIQHERMRQYLFPEEVYAFLKQHEEFADYTEDDLQQDLDQLVKWNNLIARQETSHVRTIEEFKKKRFRYQCSPYTVEIERMIRTLEQLGDSFGGSLEKTRFDRLYASLSRIEAIIASGFQEQRDEMYQVWEETFDYFKKIIQNSADYMAYLHSENVEERMTSESFLVYKEQFTAYLRDFIVALQKTSMQIEQLLEDLPEEGVRQFIGHVVDYERSIPRFADAPPPRAVQIEEKWETWRSLCEWFLGRNGRESELSFLQYQTNEAIRRLTRVVQRLGERHHHFRSRKGDYLHLARWFSRLESIEEAHCLSAVVFGCFHTKHLVADAEATDNIYRDVWDEPPAEWVTKPRVRHYGEKKKPQAIEDKEREKEEARLRYLEEKEREEAALRQLVTDGKIVLADLPEVTPYVRKTLLGWIAKAMGREGQAMKTENGLVVKVVNKEGTICLRAEDGELVMPNYEIHVLSGGE

SEQ ID NO: 40453 - protein, 66 aa, Geobacillus stearothermophilus
MSAAELVREVLAALNEWRMADVEHDTGMIVLYPLLGRVSGRYPDDFDAKEGGEHGESMGASSCGAD

SEQ ID NO: 40454 - protein, 1368 aa, Geobacillus stearothermophilus
MLHRAGLINFWYYDEQYFHFADGKLLLRGSNGAGKSVTMQSLIPVLLDGKKTPDRLDPFGSRARRMEDYLLGEKDVVNRDERTGYLFLEYKRKASDQYVTTGIGLRAKRQKSLDFWGFVMFDNRRIGYDLQLYKQEKTGEKIPLTKRELAALLGAGGTVVETQKEYMELVNKHVFRFESLEAFQELIELLIQLRSPKLSKDFKPTVIYEILESSLPPLTDDELRHLSETIENMDQAKQQLEQLERDERALKRLCDQYRLYNEYMIAEKAAEYVKAVKQAEQLAAEQQRLHDEEEKTRKALDELEESITRLGREEDVLRAREIDLAGHEVFQQAEKYEQLKAERQRLEERRERHEQTIAEKERQERQHRRRLDEAEARLDDLERKLEDELEQLRMDADEGSFSLHETNEDDFHRHRQKQQEFSFAAWKQEADRHIEQLEELARLWRRHDEVKRRYEEASSEAGERRREMDEWRHQQWKWEELFEEEKERFEQAVLAWVDQGGIDVSETDIQAFLQQMGALYEQYSLDDLKRPFVQAYYDAVGKKKDEKWRLEHDIRLLEEKRAEREAELRQWREQRDPEPERDEQTTAARLALEEKGIPFVPLYAAVEFVDDVPDDVRERIESALSHAGLLDALITAREIDVACDRVLIPKPVHMAHTLADYLRPDANAPVSMERIDEVLRSIVITDADQEGGMTIDETGRYSLGLVRGHAPRRSKAMFIGRAARERWRLENIAALEAEIAAVGQEIDRLRGAHQAVEAAIQALADWLASFPSDRDVRTAFDEAQEARRQAESKEREWKRQEEKAALLAREWKQIKQQLHDESAELDLAFTLDGCEQAQLAMKSYVRHVHELEVLYRETCHTEAMIAQQRERLAALETEIDEAKGERNRLRDETERLALRIAEMERTLAQMGADDIRAEIARIQERLAFLRQEIPRLVNERARTEQRLMRLVEEREKGAQREAFARELAAMWEKSFAREAALGLVDLDRSRSLLEQAKEAKQRYEAVLKETRSSLLARLNTVFFQESSNLTEYRASFEPLGEQTKPEWTAAAPDDEMAMKAADWREKQERHVIYLDYKGERATPFAVLAEVERDIVLQHEYMKEQDRELYEDVILKSVGRILRSRIQRAERWVNEMNKLMGGLDTSSGLVLSIQWKPKTAETEAELDTKELVRLLRLDPRLLREEDLQRVTNHFRSKIARARELLEERSQGSTLHQIIKEVLDYRKWFSFTLYYEKTNEPKRELTNHRFYQFSGGEKAMAMYIPLFAAAYSRYQEAGDDAPYIISLDEAFAGVDENNIRNLFGLVEQLGFNYIMNSQALWGDYDTVPALSICELVRPRNASFVTVIHYRWNGRVKQLMVDDKEWEMIET

SEQ ID NO: 40455 - protein, 406 aa, Geobacillus stearothermophilus; identical to SEQ ID NO: 39944

SEQ ID NO: 40456 - protein, 546 aa, Caldibacillus debilis
MIPYKKQHSQISGFFRQKRITLSLTIFTYLFSGLKVSSVRMEPYKKVVEASYLTADKVWSYRAILHYFYKQHERMREFIFPEEVFAYLKDQPGFERYTFEELQQDLDQLVKWNNLIATQDPRKARTIEEFKRKRFRYQCTPYTVEFERMLEQMEKSGEGFGGSLEKKEFERLYQSLGLLHQILTKGDYPSDDECSQIWNDLFGYFRTIVKNTSDYMAYLNSVEVEERMQSESFLVYKDQFTAYLRDFIIGLQQTAQKIKAVLQEISLDRLTPFIQRVVAHQLQIPRFDGIQKEQKEKIDELKDKWLSLHSWFLGNAYGESVYEELENRTNEQIRRITRIIQRLGERHHLFRSRKRDYLHLAKWFDSLENLEEAHRLSAVVFGVFHTRHFYGDQIPTDNIHTDVWEEEPIRFETKPKIRNYREKTKAGAIESRKDLKEKMREAYLREKRLEQQAIEKYMRGNEIRLEEIPFIESHVRKMFLTWISKATARADRVIKTEHGRTVKVHIAKDRRILLRSDDGVLEMPAITFQFLDADREETVPAKSSLS

SEQ ID NO: 40457 - protein, 447 aa, Caldibacillus debilis
MAMIRKPFRKRRVRSRKAIARCPVGARQKSFSGFDQGIFCPIPISGKRPQGRVEKLEERKFDEKAETALRLLFENFWILREENPEQYQLIRERERILKRFIDEKFGYPLIVHRHFIKLEKTPVEPEAWMGILDFQSVRDYAMFCCALAFTESKQVDEQFLLSEICEDIKDMYPGEFPIDWTNYNDRKSLIRVIKFMERLSLLKRVEGDIEKFASHEKEEVLYEVTVYARYFMRTFPDDLSEYASAEEILRAEWERQSDVRRKRVYRKLFLSPAVCREGEDDADFLYMRNFRNRLRDDIESHTSFRLELFKNAAFLVADEKHPEFTLFPDQRAISDIVLHLGSLLREKISEFPPDEYGRIRMTKVQFSDLMKELKNKYGYGWSKQYREGTAASLESDVIELLKEWELLEAEEFTGSYLFKPAIGRLSGHYPKDFSGEAKEEVDGGETE

SEQ ID NO: 40458 - protein, 1402 aa, Caldibacillus debilis
MEKRNKWRLSRAGLLNFWYYDEEIFHFSNGKLLLRGANGSGKSVTMQSLIPVLLDGKKSPDRLDPFGSKARKMEDYLLGEKDVSQLDERTGYLFLEYVKEETNQYLTTGMGMQAKKDKGVQSWYFVITDNRRIGIDFFLYEKESHAGKEQKIPLSRTQLQNRIGGGGYVVQSQGDYMDLVNKYIFGFEDLEAFEDLVKLLIQLRSPKLSKEYRPSVIHEILEEALPPLSDEDLRHLSETVENMDQAKQQIEQLEREREALSKLIRRYDVYNRYRLAEKAHEYLQWQKRRSKEEKKLQEKEREKGALEGMIRQLTERERELRQQLAVLEQKQERLAGHRVWNLEKEKREEEERLRELTGEYNKKDGQRDEKRKAEWKQKETVGRLEKELADLKRRMEDHLQEMESLAEEASFRQHAANAGEFQRKWEREFDFSLWEKEAETHYQELENIGGLLRNYEQLKEKIQEYQKRIGEINREIDGLRREEEEWRKLFENDKQRKIEEIFSWAKDHPFLQVPEEVLRQAARWTDQLYEPYHYEAVRQLFFEVFQNYQLKMNEKIAKVNNHLQSLQENIRLKEAELEAWKGKRDPEPPGRSDATREARKWLAENHYPFIPFYEAVEFRDHVPKEVRNRLEAALLDAGILDALITERNTPIRHDRVLVPAPKMLAHTLADYLKPDVPEDSPVSRETVDEILLSILVDDRSEAAVPFAVREDGSYEIGLLKGHAVPVDSVRFIGKTARKRFREEQILRLTEEIAALQREIGDWEGTLKSYQEEIYAAKEAMAAFPGDADLQESFHQIKHIRADIEWREKERSRTDGQMQASLSEFQQIKREIDRAARDFNIEKSLAAYDEAKRSMRSYEQTLHQFRQAYTNYRVKSDHLAAAKEWHDTLIREIDELTGELYAIKDKMEICRTNVAEIEKQLRLAGVEEIRKQIREVQRDLAECKRELETVRDTLPRKQAESDRVASEIQEWKNKLDFTRHMIEAWKEAFSREWQYQFVPAPDELSDWDERAKWVMEQFGRLLQEKDNQSVDSQLSQIFNEQYTNLIEYRMTDIPAELPPFPWMDGDYPEEQQAVIKFWKEKSIRRIIQLDYFGKQVSPYYVKEMIENELERQKSIWNEQDEKLYKEILYGSIGNKLRVRIQRAQEWTKKMDHLMQSRDSSSGISFSIRWKPKTAETEEELDTEELVRLLQLDPRLLKETDFQKVVEHFRSKINRAKETAEGKGAGNTLLEELKGVLDYRRWFSFTLYYQRKGEPKKELKDRAFYKFSGGEKAMAMYIPLFSAIYSRYLEAAPDAPRIIALDEAFAGVDEENINLMFGIVEELGFDYIMNSQVLWGDYESVKELSIYELVRPKNQNFVTLIRYHWDGNHRRLITEDEEDLEDDSRSPAQGRPSGDEEEEVLEKA

SEQ ID NO: 40459 - protein, 428 aa, Caldibacillus debilis
MNEIRREAVNYFKSEKAYHSLFKKFREKYQSIGRIGGTVPVRFFSKEELAVFAKFFGVSVSELEKKGSLSLQKFEEQLEKTRFQGIGLKTLLDDFFGEVIYSKKEMERRKEEERIEKFSVLKKSYPVLAEWLDYVSEKHGDSRWILRLAEEDFGRFKAYADQLAKAVRSLPEKPERLPFFSQRITSNPHSFDVHTELGKMFLHLLAFLLDGTASRFPRTTEEVNDLLNEYGIYRDDLLNFATMSGFFAEGEDGALHPVWKAAAESQTVVHYPLRALVRLKRIYPRMGKKVWIVENSGVFSMLLDEAPEAPIICTNGQFKLATWFVLEKLAREGCTFYYSGDFDPEGLGMAERLMDRFPGRVRLWRLSLEDYRKSRPAEEISPTRLEKLKGIDHADLKPVAEEMEKTKRAGYQESLIEWLVKDLKNENG

SEQ ID NO: 40460 - protein, 495 aa, Clostridium tepidiprofundi DSM 19306
MKIDNKVMKQIDEVRYLATENTWRYRTIIRTMYNYYEKMKYWLYSEEIYEQLKKNERFSDYSEEQLKNDLDALVTWKNLIAVADTTKVRTVEEFRNRKFRYQLSTYTIEIERMLLSLENMTVENNASLEGTLVEKFCAILEEHREIIFKEDKEVYEWWKELNKRFKELNENYQDYISRFYSPKTEELMKTSEFLMFKENFIKYLRDFIKDLQLNSYTIKNLLTSIDSSEVDEIINKVLNHEKTIPSIGNTIKYDEFVDINRGRFQSIKEWFLSYKGNEPLVEQLIDNTNDMIRKITRFASQIADKRNNSANRKEEYRKIANMFYECSSIEEANKLSSLVFGVFSPKHIKANENRTTESINSSIYDEPPTEVITKPRVRGYREKLIKNPIVDKSYKKEQKLKEIMEKRKLESELMGKYIVNNEIDFANLPKISRKDRNILLRWLTKGRISRGSGSKTEFGRKFTIIKDKHTQTIELKCEDGIFVMPHYILKFEEEE

SEQ ID NO: 40461 - protein, 378 aa, Clostridium tepidiprofundi DSM 19306
MEELRVLLEKYFIFKDNDKDTYYSIKDNYKNFKTFIKDKLGYELLIRGDFIKLEKLPGKAEGWMGIDEFDDIREYIFLMLLITFLEDKTKGEQFLLSHITDFISSNAVGEKVDWTNYRTRRSLIKVLKFALQYNIIVINDGKEEDFIRDNSVEVLYESTGLSRYMVRNFPVDIMKCKNYKDIEDFNVTFLEEEKGFIVRNRVYRRLLISPIVYNEGADDSDYIYIKKHRGIIEEDFRKYLNWDLHVHRNGALIVLGEGSRLKKMFPSNSALSDIVLHLNSKIIKLLNEGKIQRNVDDVIVLSEEEFKDIISELKCERAFGWSKEYRECSILKLMNDIIEFMKSFAMITQDENINVYPLIGKLVGDYPKDYVGGDRNGK

SEQ ID NO: 40462 - protein, 1353 aa, Clostridium tepidiprofundi DSM 19306
MENRWIANKFGLINFWYYDIEEFPLEDGKLLFRGSNGSGKSVTMQSFVPLLLDGNKSPERLDPFGTKSRKMENYLLDENTDEKTAYLYIEFKRRKTDNYLTIGMGMKAVKNRPLNSWYFIITDGRRINKDLFLYRNAGNNIPLTKKQLQNEIGNGGVFTEYQREYMKKVNEYLFGFDDVDRYEELINLLIQLRSPKLSKDFKPTEIYKILTQSLRLISEEDLRPMSESMENMDGLQSSLEELKNALSATRNIKYHYDRYNKCCLYEKALNFKKKNDEVLQLTKEIEESKEKLENNINQIKNVKENIKRHKTQLHEAEIMYDKLRENDALRVKEELLKLEKEVRELKIDIEKKENELQNKKISEREKEYTIKKLEDEYDIIVQDIENILDELYEIADEFLFKDGFMLKEDMMNDLKGYDIKYIKICLNKYSEKIRKAIKVLKKYEYYKAKYDEVLENKESIEKEFEDAKNDIAKREEILLNTREDLKVNYVKWNDENTILKLTDEEKKELISAIDSTEDTFSLGDLNKVVKETYNNIKNKFNIAIEKKDSNITDIEKDIDNLKSEIEELKRAKEVEPPRCDGSINNRQELMKRGIPFTVFYKAIDFKKDVPEDIRIALESAFVDMGIIDAVIVDEKYKDEVMSFTEGAYDRYIFANGNIMKHNITNYFDVDKDGLNGVAFETVDNILQGIFLVEDSMAFVDEKGNYSIGIIKGKASTDYTLKYIGASSRKKHRERIINEKLNDIEKLLKDIKELELEKLEIENKIGILDDEMGKEPSSIDLREALKMIYECESKVKELHEKLIRENEALFNISEEFKECKKNVIEITDGMELDVSLEEYEEANERANDYRNLLTELTIKQGNIRGIHDRIESIRESLEDIREVIDSLYYDITSYKNKCDNKNEEINSLKDVLKNTDIEQIEAEIERCIEIKSEYPNIINNLSKNEGELEQAILNINKTIDDKNNKLLRENHICKIKKDIFMEEYSLGYVLPVEDSQNDAMKILKKVIAAYDLREDKDREVYSRAVIDSLSKNRSELREFYIKVDDIFVKNNMEDESLREIYKGVERIDINCKFRGKDISFYELPSMIEKDIEEMKILISNKERAIFEEILMNTISTKIKSKIYLSKVWVDKINDLMESMNTSSSLKLSLRWVPKKAESEGQLNIAELLEIMERGAAANDDDMKKLALHFGNKVKEAIRNCEQNGEARNYYTIIKEVLDYRKWYEFKLYFTKKGERKKELTNNAFFQFSGGEKAMSMYVPLFSAVYARYDNANKDCPKIISMDEAFAGVDENNIRDMFKLLKKLDLDYVLNSQILWGDYDTVDNLSICELIREENDDVVTVIRYRWNGIEKQCLV

SEQ ID NO: 40463 - protein, 427 aa, Clostridium tepidiprofundi DSM 19306
MDKVNEAVEFLKKNKAYNKILKEILIKYKKLGKLSGMICMENLTSEEAMILAPLNHNFFAEKKGKFSVKKFMDNFSKGRFEGVDFVEVLKVYFDDNLITNKEKRDLETEKREKYFKTILEQCEGTRFEIWLNRALCEKKYGYKIIMKKYCEDKKVLKEILMNIKKALCHMSFSSDNITPIALFSSNITKDSHYFDIGTVCGNLLMHAICCILDVAYPENAEKINEILYSVGIMRDELSNTTITYGLKAYTDCKEHFGFKSFYDYKEPLIVSLKNLNKIDTVKVNNNRVFVFENPTVLVGVMEKTKHIYPSLICTSGQINICSLVLLDKIVRGGAVIYYSGDFDPEGLKIADKLKRRYKDKLVLWRYSIEDYFNIKSSVSIKSRESKLSSIECEELFELRDILIDEGKGGYQELLIEEYVKDIIELTD

SEQ ID NO: 40464 - protein, 531 aa, Bacillus cereus ATCC 14579
MNTNIESMLEGFNERMKHVAMFSPILRLEQPTKFKELPIPTVALYILLYMLENKLAFNKNTTKEELQYVILEVVRRYWNKNFTKADADELEDWLVSKNLRNRGRAHTFTYYDFNKKDEKTYYFHLIEYGEGMNVFSDTEDRVDDFTLSSTGLELLFKTKEVFGELQITISQLFFKRQFEKGLFTDALRRVHEMHTLIEDEKKKIKKLQNTIIKDALGVSQRSELEVMIKRIDETLKSEHEQFDDLRKLVEEKIDEFYEGSLTEKEQEGIHIIQEIEGKLLQAISVHESLFTEKQKTQNIMSESLESSIIHAFSVHLDFENEILRELIETPATEEVLNAISKPFLPLRHYKTFNPLLALVPQKRYKKKQLKEEEIVEVDEEKMKLQDEEEARKKEEIENKEYRYITALLKHLVEKDKYLLSDIFQMIETQDERLYEDILYNPDPLLGLIAELHQSEYNRFEKVTSDVWKNLPDDKKINRMLIRLSNEFVTLQEIESFSLLETGRSHYIGTMKYKDMLITRGDFYGVDRRNRK

SEQ ID NO: 40465 - protein, 250 aa, Bacillus cereus ATCC 14579
MEWTEEIVSKGFALYVALSKKGFITSKEDEYFQWYEERGVQDFIRKVIEPTGKVMIFLDEQDGVIQMVPEVENETMSYTNDDLKKELGFKDNKEIHLFYFILFILIAELEQPYDTESADRMYLPMDELLDKMNGYIEQYERLGEEKLEELSDEYDVDVAGIVEAWGRMADFKEGATSHIRTKDNRRMYIEKTLKFLEKEKLIRIREHTNISVTNKMKNIISHYYHNVENKSKIHDLLLVTREGTVGEEEE

SEQ ID NO: 40466 - protein, 1213 aa, Bacillus cereus ATCC 14579
MDDFQRIKNCAEDMVKAVENFQVKKKSFAEAQKHVVTLKKSIELQIADKEEKIDILMDDIEKNEALMYEADWKIDSYKSHILKGQIEAKEIELVAAENELKIKTEQLKQAKALLQQLEAKKEYGDYLDIHKKVLQLNEDISSLTASKPELEKRRNESKTLLTEALNFLIEEQQFALDDINNNIKFMIEEVNLKDAERKRLEKEKQDLYGEYKDAENHLNNYQEGKQKLIDELGEEAGYDPSVTFKSLHEQQLQSSVTIAQKEEKSRLNKQDMDEKREFVTGQRIAIDNKNNEVTSLKAEHTTFEKEKYNLLSLLSDDGKNTINIFEDMQEFLRYYQYSKVEAEQKIDKLKQYIHDLAKKLSLWESHDFFVPDETLLKVQQHLEQKGVITMLGSEWLSELSSEEMKSQYLNSYPLLPYTLLVEEANLTEVKKSLNSLNKELLNVPLLFYVKSKLQIQTKSVDAKIDELFPLYDELYLYHQLDVQWFASRAKIQEIIDGLKMELSQYKEQLTFAQITLNNYNEILTALETFHTRYSSTFSESNMQAVQKLSEDIKEIHQQINDTNEHIKMLENENELISKFISDEKVKIEKRDSHIKRLQSFMDLYSNPEELVEKVKYLKDQHDQYGTKVNLCEEEVIEQRETLDRQKDKKRSVESVMDGLDKERKHHQLDKNLEPSDSYTSEEKNEYVARFTAVQKDYADKNQAKNSFEENLSDKKNELLKSEKRINDIGFTLEEVKVFYSQEINLEELITKQKETVNTLSISERDIEIEKGKVGENLKEKTKQLELAKKEIDEKYGREVFLYEWEHEEELNRFKQSKEQLGEANKALVTKKELLRNSIIDAEKAMVHLQIENLPLYNERFGLILEEEIISKSKTYQKYAQTHANEHVTKLQKFKEGKKGVYLSFETYLKKIQESNNPKTEQFANGLSKLKTSDQIFELEFILESFNRIFDTINAFEEDLKRKITECEKDKVKLVDLCFQRVEAIYKNVTEIPKSSKVKVFGYELQLIKMRWDRFDDETTHSNLHYHVQTILETLQRMKRENKLENELNEYLVQKLDTVVLLDKIAPIKKCFVSIYKPRKKSLMTTSPENWKPWDEVSKWSGGEEFSSYMSMFMILVTYLRKKVNARDDSWKVIIADNPFGKASSEHVVKPIMELARNSKIQLFCLTAHNNEDIRSHFECVMSNRYYNTVGIELLQVEHREKGVSLGMFAYEHD

SEQ ID NO: 40467 - protein, 358 aa, Bacillus cereus ATCC 14579
MRKWETFIIDYMNKSKKTFVKTIDIEHHLKTLLKQEYDDDGGYFKYSSTLKNMVEEEKIQPVKARGHNHQTPPVFNEYRLVKKERRTNPTHIKKLMTDYLLFNMTAFYDEAEFEKWKFYIDRVHAFLTQNSDTKNNILKANERSFELFRNEKFLLDKEGTKFLANLGLTLSDLNCRRTYEPFVEYQPNPSKKPKNILIIENRDTFDSIKELMIDGIDTWSRITFDMVIYGEGDKIQRSFYFLEEYELEDYEVYYFGDLDARGIHICSELIKIDNRVKPFIPFYIELLNRYGHEPSTRTIERKLKQTIIDDSLKLFSSFFEGDYIDELKRYTDIIQNVQIYIPQEGLNLVILRKLGERR

SEQ ID NO: 40468 - protein, 521 aa, Ralstonia eutropha H16
MSVTPPRDTLAMHSQSTSSNEFAPLESDILEQMSEQGGATVPDAIEMGALAPSSGLIDLSRQQRNLLLLRPLFQLELNKQRIGEDGTLFEGIDTHYLLLSSLDRMMEGTTVSTGCTSDEVLTHIADTVMAMKPSLSAVQSGKVADTVLAALDNKANGYKEFSFEYFHATHKSTRSIRFRLVAYEPDIEDVYRYKPTAEGYLVYLGMLDLSPEDAQELMEKMLELLVQRGRFDAALEIARRARTLSIEYRQLIRDRLYQAYRAPGTVNWKRDISAGLDRAREHVRQRQAEDQRMEESVLLALRQAEEPKARANLALLLKTLQGASMLRSQLVGDISRANDRFLEAQRTLFRARRATGLPDLETRLLPQFIELPVNILAEQAENALSAMYSPALPRVYDLNSLFSLLLEQRVEDGDPGEDDGEITPFVPPPLQFDEAVIRQVTDWLTERFSLGQSWRLDELLDQAEDMGFDRTIRRCLVLMLFRAYSHSETEFKNMRADALDEFIADVARGTNLRFTPKERHS

SEQ ID NO: 40469 - protein, 1472 aa, Ralstonia eutropha H16
MQKISRIYLGNCGYLMAWYDGLLFDLTDPETHQPTDTIINLENGGGKTSLLSLIFSCFDTGQDRFLKHLQSKNNHFSQYFSQDGLPGFILVEWEMPSRTAGGEPYRLVVGQVVSIKAGNDVPESDRMFFSFEATSGLMLEMIPAPKLGTAPVTSLAEFSRWVHEEQRKHPDVYVTRKQADWQRHLREERLIDLEMLQMQVNFSVQEGGFDTGFLNFSSEAAFLQKFFHLTLDAQRAAAVRDAVAAACDKLRRKPHYQAKLTELTKFRAVLRSFEETAHAYRLSLADQMSVLVNGARLALALHERANTRRSKQQAELTFERDQRAVAATAASDVLGYSSQAASMASLIHVRAVRAALERTKQAALSLTDLQNDIKYVRAARVLAEVDAADKRLQTLEAQADLAKEGLQPFRDQLETEGALLRTALFKHEQALRETQRKIEKESIDRNDTVTGHRTALAEDEKRRRTAVNEQAKLTELEKAWEREHTRMVTSGLLSDAGEVTQVAVARWGETEQQMRREEAAHKIAQSQHEQQQGHWSSEEVRLGSEAGRFEGEIQSTADFIGEGTAERERLSQLPAILLAVESDTASPDSPALPSVLERVAAASASEISLSDVRLAELHATMQAIHETGVAGSSPDVARVVARLREAGVRSARPFNEYLADALPDAERARGLVLSDPARFLGVSVAQSEMEKARGIEWHGQKLTRPVVVSPLALESAAAAPTRLVVPAASDAAYNRAAAETLAGTLSETIRLEENRRAGYYQRQTDALAAMQALQTYVLRFGEGKLAAANLRRNELQSQLRSTLERKEKAREKAAAEAAEAKISNEAAVKCDRLALEACSHLQVLQRFMAEYEANREERLLRLDELEVILEDLEVRRLATEDEIQRLEDITREQSKVAIKAENSADNLAGERSRIEFYDKTLAADEHLKANPRDLEMLRGTYSDALTVYKAKAQDQLGVLEVQMQEARRRRDEKKQEYTRDYPGVTRTHVAPFEGQDHCAMLVGLEAKRTLVNKEHLDAVSAKGAAEHASEDWHKNNRDVPPATPDIEALDAAALDARKDEAVRMSEEAGARQKNASDVADRARGTAMRLGEAAGQDDRLAELLKSTMKLEATPNPELLALEIASLTGQPPVLLEQLGELVLEEDASDQVTRAVKNHGAKSGLCDRARDNARTVFDAVKLAAGDPELQKVEPELAIAMLANEFTAACSDAARLLEGLEDRIHTTQDNLDKMQADFDACVEEMLALSRIALGLLNSAIDKRVPATAPYVAGKAVLKMRANFAAINVESRRQALTHYLDSLIQANVPPGKGSDLVAEAVLRMYGGRPLGLQVLRMVIDESQQYVPVEKISNSGGEGVVMALFLYVVITQLRAETQAKLHKLAGGPLILDNPFAKATSPTMWKAQRLLAQSMGVQLVFATAIQDYNALAEFSAFVRLRRAGQNSKTGRWHLESVRYRLNEEMANPELAAPSTIEAA

SEQ ID NO: 40470 - protein, 312 aa, Ralstonia eutropha H16
MQLKQLYFELYPEIQNHPERSRMLLQALQALAATGAIMLPARASWEKVGQPALPMWIKLVRTHNEAPKEDFSKIPWVPELGFWPELTSAQLAAAKCINEFLLQRRGNLQRIPIKERSLEIFGDEKRLDAMRQGNTLFSGRLSLDTLGAFTVPLPLPYRPAPVSGKPLLVVENHNSYWSFGEWNQRALRYSAVVYGAGEAFRSTGAALRQVLHEVKGTDVLYLGDLDPKGIGIPLDFNRSSASDEPKVAPAMEWYEWLLSHGFRRKKAVCTNAHPQSAIDWLGETLGEELAELWRGECWIPQEALGFEQLSAL

SEQ ID NO: 40471 - protein, 549 aa, Clostridium perfringens SM101
MDFDFLDVQHIRMKRIGAYALLFRNSIAKGTWKKYGFSEGYEQDNLIFAVLLYIMEEALKDDMCTIDNIGYFIDEINSIHFKKELSYEECKELAEFIVNTILCDEGKAMYFKAYNFKKVQYEDINISFIKNSMKYIDDVRRVVYSLTDDGYSFILSTLEVEENLKITIHEILLKMHLEKASYDKAVDDIKNIFNQYRIRVKSIEDAIRKIKENPLSYTTEDYEKMMSGNLNLLNEIKKQLIIHRGMVELRINEFLERDIHIRKLNKKEEENLNNLKIIQNYLGRTIDEDQKLLKKHFDLKDVYGMELETISKMALIERFNFRNEVYDKILDNPNKLEDIDIFLRPLLKRELPKKYNINKSLEYQKNINKNYSEEDEELSFEESDFIDEINKKKIEKLKKYNNVIKLILELSMKQGGISLREIQGLIKESNELMKKLIPTVEIFREVIIEMLKHRNININEIREERKNAIENGEIEFQLNKSILEVLDNNSELDSIKEINIKKLIDKDDIKLEGVKTEDGEFKNFICSDILFEAIKEDKNGLFYGRNKNK

SEQ ID NO: 40472 - protein, 235 aa, Clostridium perfringens SM101
MAYSMEEIKISNKIFYYLLKHGELKEEENDLYKSYSENNNVTELVKELGESSECYIKKYGGVVYLIPREENDFLGYSKGELKKILCRSNANDKDYYLSQFVILTLLVTFYNSKGVSSKGRDYMKIGEFLNIITDRLNEGAERTKEEDSSGIAFSNILERFEALKSSDKRSTSKTTKEGFINNILDFLEKQGLIDYIKNDDMIKTTKKLDNFMDWNILNKNNYNRVLKALGESVDE

SEQ ID NO: 40473 - protein, 1463 aa, Clostridium perfringens SM101
MSKINKLRFVNLNYNHNTMKIDDETFYLDGQDTMLNLRNGGGKSVLVQMVMAPLVNKRYRALKDRTFESYFTTNTPTYIMIEWILDDGAGYLLTGMMVRKKDVLSDEDSKDKLDIINFIHEYKEKNEYDIKRIPIVEINNGKKMVKSFLNSKKLFEELKKNKEVRFNYYDMNNTVTTKNYFEKLQEYKINHKEWETIIKQINLKESGLSELFIKAKDSSGLVKSWFLPAVENKLRKDEDRIKNYRNLVKRYIEQYKANKANIDKKEKIELFNKLSEDIKNSCDEFILTIEERKGLENKIANIIRILKNNYEDKENEEKELECLINQLVEKIAELFYEEYSIKIYRKEDKIEELEEYVKELDNLVNKSEEEKKALNRKNEILECSKIHKEYQSRSQELQSLESELKILTKKKDDNTPHINNIGFTIREILNKEISDMKEKVDERKTDINVLEFEKEKLKNILNENRLLINKLKGREGFLKASLESFDKIQSNFNDKYNENIIRNISGYFNEESLLSIRRNIEDYNFDLNKNMKNITEDIFYNKEILKSKNNEKERNIKLMFDFENQLKNNESLIEELDEKVKICIDVIKYIDFGEERVFDTEDILNAFYTKIDFLEREKSKLIRQEEDILDELDKLEGGRVLELPKEIKKKLEYKDIKIIYGMEWLKKNGYSTEKNIEVVKNNPFIPYSLIMNSSEIEILKREGLDIFISNPISIINRLDLESNFLEVDQSMVSFNKLNFFVSFNNKLLDEKELIKLIEEKKQYLESIRSNIENRKNEIRFLEKKKEIIQYSKLDKEKYENVKREKTFLEKKIIEIRENEISIAREFGKIEINISELENTKKVLEENIRKNLEKINSFNELIEEYNKYKDNKDELSLIEFKIEEINKFLKENENRELEIDKTLKDINNIMVSYNNSLEKLKSEAIEFSFYKEGLFIKKDKEDLLAEFYVLNKQITASEKDLKKRREEKSRAFKEIEDELNAKANKYNVAEAEYINEVYNINRDFELKDLIEKEDKNYNYLKDKRSNILQEIASEKSNVENLYESLEKDLGKTKAKSKALLYDKNFKEEIAKLKIEKASNEKKIKEVINEKNKIDKYLIDLSQFNEFVIEKEEDIFIDIKDLDNTIGSIKRDLFEKKDLELKREAKLNNCIVDIENKDSFRNENIFKSSIQSLKSLVSKPIKFKEHLNLVINSYNSIIEKLLIDIKLIEDEEEKILDSILEYIEEVNKNISIIDDNSTININNKRVKMLNITVQDFEKNKINYRLKLKDYIEAIRERAIKELEKNNSIEEIISNNITLFKLYDEIIGVENVEIKLYKIEENRQRIISWDEVSKNSGGEGFLSAFVILTSLLSYMRKDENDIFSRKEDGKVLIMDNPFAQTSSSHLLKPLMDIAKKSNTQLICLTGLGGDSIYNRFDNIYVLNLVSSKLNNSIKYMKSEHIKGDKEEKTEIIVSSRLKIEEQTSLF

SEQ ID NO: 40474 - protein, 333 aa, Clostridium perfringens SM101
MSLSSFKRKRIELDELEKLFKIDTYCDLYVKVNELISENKIKPIISSGQNGKSPTLYKRYTIIDIKEDNKELIDEIEYKLISKFNIEYYRNHLEKYIDHRKYILQLNDFFINKSEFLNYPVSMNERAFQIWGREKFLQKEEGKSILKNLGIDLGMLNYYDTSEPLAYYSRSKNTPQNVLIIENKDTYYTLRNYLISNNKILGKEITTIIYGAGKNVWKAFKDFRVSVENHVSNKNNKFFYFGDLDYEGILIYEKFYHMFSEEYNIRPFIKGYEKMVEKSEMMEINLPKTKAGQNRNIENVFLQEFSEKLDGKILKILENNLYIPQEIINLTDL

SEQ ID NO: 40475 - protein, 480 aa, Polaromonas naphthalenivorans CJ2
MLPACELLDLGRQQRNLLLLRPLFQLELNKLRIGDEATGDKGLFQAVDTHYLVLSALDFMMEGTTVNMGSTQQEVLSHLSAVAQVMKPELTAQQATRVAEVVLDTLDNKAQSYREFIFDHFDAMQRKHRTLRFRLVAYQPDLEDIYRYKPTSEGYLVYLGMLDLAPEDSQELMEKMLDLLVKRGRFEAALEIARRARKLSLEYRQLIRDRLMQAYRAPGSVNWTKDMAGKLTAARGHVAGRQAEDQRMEEAVREALQSSDELKTRQDLSQLLKTLQSASLIRSNLVNDITVAPDKFLVSQRSLFRARRPSSLPDLEDRLFPQLISLPANVLVANADNCISGLYPASWPKVYDLNNVFALLLERRADEPVLDEDDGEITPFESQKDQFAPEVISQVEQWLKRQFATGSTFRIDQLLGMAEAQGMDSQLRRCMVLMLFRSYAQSETLFPGMKSDAAGRFQMDIAQGTNLEFSPLQENKADKP

SEQ ID NO: 40476 - protein, 1441 aa, Polaromonas naphthalenivorans CJ2
MQKITRIYVGNYGIDMAWYDGITFDLTDPDDGYPTDTIINLENGGGKTTLLSFIFSCFETSQERFLKHIQNKNHRFSQYFAKDGLPGIVLIEWLMPARVAGGAPYRLVTGQAVAVRTNAERDEVDRVFFSFEASQGLTFETVPAPKLCFAPVTNMNEFSRWMHESNKTSPDFFYTRTQSDWQKHLRDERLIDVEMLQLQVNFSAQEGGIDTGFLTFTSEPEFIRKFFDLTLDPERSAAVRLAVVNTCDKLSRRPHFQQCLTELTKLRDNLTHFDEAAGAFATTRASQGEAVRRGSGLALSLDTMNRDRTQLAADEAARATDQELLANKSGQMASSRADDVLVLTALQYLRRKEQAEAAKKQADDLLSNARNKLVHVRAAQARGELDALDAQLAQLESLSAVAQEQLEPWRDNAEKQGALLRRALYAGEQKLQKAAAGEASLEVAAHQNQIALSKDLATLTKEEQYLFQVQANLKAMENAYTATKAQLIREGQLEPEEESTVAAARYASTVTAKRAREQELIAQAQGFRALESASRAKSKNETAEAARLKAEIGPLQRFIADAEVEREQLSQLPILRQAAEAETADPDSAALVPALDRLIHGSESEVAQCEVHLAALRSSKAAIVETGVSGASRDVNEVVSRLRELGVKSAAPFNTYLARALPDADKARALVASNPARFLGVCVASAELDKARSVFSPSLQLVAPVMVSSTALESDPVEENRFVLPAADDAAFNYAAATEHLTHLDVRINTEEQRREVYAGRQRAALAAKQRLQAYGARFGGGAVSRAGIDAARLAAEGLAASERAQEAEGLASASQEKAEAARKEADECSKAADRAHSDGRAIERFARDHEAGRAACLARLDSLLVELAAKGDLRDRISTELGDSAGAEKAAYRRKLEHQTEAAHLGAERGALKHYSKSFAAEQHLAEHPQELAVLRVLYSDAEKTYDAEAETRLGIVHEKQDSARKDRASKGQAFTNAFPGVKASDISPYLNANFAVLLPATQQEVEETDNASRSADSKCAVAANEHSRYLKANKTNSAASAEMLALNDDALHEAIQTSTQDQIQAAATALAAKLEAGRCRDRARQARVDATQALNTTSALRASLSLPELLDAEPELLLEDIAAQANQVIADFQSKAKSVESARKKAYKAFEDLKSTASTPALQKVEPDIASQLLRNDFEAACADSTRLLEGIEDRIGTTQSSLDGMTSDFENCVGELSNLTNGAITLLNSATTNKKVPVGAPYVGGKAILKMRARFHELGQDVRRQHLRSYLDSLIGNNTVPAKGPELVAEALLRIHGKPLGMQMLKMVPDENLQYVAVDKIQNSGGEGVVMAMFLYMVINQLRSETQAKLKKAGGGPLILDNPFAKATTPTLWKAQRMLAQAMDVQLIFATALPDYNTVGEFGRFVRLRKAGKNTKTGRWHLEAVDFKLSPQAEALAA

SEQ ID NO: 40477 - protein, 333 aa, Polaromonas naphthalenivorans CJ2
MSEAFLHLLRGSSRKRVPLLDVKRAFFEAHPETLTSPSRHEHLLSALRGLESSCAVQLPAPGSWERVGNPPLPNWVQLVRSEPAQPSPDYSQVPWVPELGFWPDLKPSALEAAKAVNDFLLRRRKSLLMVPLKERSLEIFGDEKRLDTLKSGNTLFGGRLPLSALGAFQVPPPIPYRKADAPGMPVLVVENHNSYWSFGEWNQAAKRYSAVVYGCGEAFRSTGAALGQVLREVQAVGAEYLGDLDPKGMRIPHEFNGASAITDPKVRPAVDWYRWLLQHGRKREKPEFATVDKAHALAWLGDGLGEEVAAVWIVGLWIPQEGLGYEQLAAFDS

SEQ ID NO: 40478 - protein, 508 aa, Geobacter uraniireducens Rf4
MPDRNQMSLFGSGPDAFSQEVDRGEFDKIEAAALTTRAQTIATLSTIATIIAQSSSPPFSLIDPFTVGLMAVGHVIDSLKLLDIEDSNLTVHDLVEQVTADLENQFQALRAEKSIDTMPWRSEIEAWSRGIVDKLLCKKGMGKKIDRLFNTEMGLFYDFQHSLLEEREKSTGKGGIHVKPTTACLTLYLGTLTQSIGDAQAAFAAVIQRQIRRGEYHAALQSALEHQRVTKQYCVEIQQFRRKILSDAGRQGWSADVMPLIEKTQNEVDDAMSSVTELESHLDDNFEALPRDKQSLAEKVLMVIRQSRTAYRELQAIMIELPRLYHKCIESQGFASRHIPLPSMRDDVFLPLFYQVTDRDQFGKVCDAINFGCASPISPVLFDPIASTEILLKPTTQEEIRDNSVGLECMDEDSVTLSIFDAETIQKARHTLLENCESSPATLSQITRDLCEEAYYEEAICVALMVSNAWVHRKLIEGALKPTRTYGRYACASCSGDDYLIAREETSP

SEQ ID NO: 40479 - protein, 1458 aa, Geobacter uraniireducens Rf4
MPNLLSVRFSKVGYSDARIDGLGYSLARDGEAKNSLVLTGNGGGKTTQVHLLFSLFLPQRRELMSYQDNTGRRFEYYFEENEIAFIASEWSIPNSQIPLGGRQRTRVIGRFTQFTNREKYEYETYFFSFIADDELGIDDLPITSSIPHRVKAYCRTISEAKKYLKETFGKQPWREFFGPTDKMEYWQNYLRSLGFNIDIFRLMQMFTMSEGDPGAFLKRYCSQEAVLGMITKEVMDSNSTARLRDMLVQHRDSISLAPMTRAQITAYNALSELFSKMEPVAAKLMVADQAFAKAVAELGTVAARINATLAVESQKVADLSQIQAADKAILAAEKKNLGEMQAELRGVIERLASLASQAARAQYQEITEQLGKKSALVTAMRAVVDQVEVMNAKTTRDDLSRRLDALAEPTRNLADELAMAEQLLAEYLVQDLNAASTAVKKLEADEREAVEARKGLVNEKQELLAELAGQKKEQAMLQGVEDERARSLAAIPWHESGLQDGTQVQPRLAALEAESADLKGRLVSAQNEQADLKAELVSVEHRLKDHNEKLEALGKERGKAWAAFEDFQKRYASVAEMPGIKGLFQLDTPNLFLTGLDSRLKGSVASCEIDIRKLECDIASREERIQAIEKNGGLLPSSMDVETVLDALRSAKLDAHSYWQVFSQQNRAPEEAVRELGKDPFRVGGVAVSGPVALEKAREILAACNVLAPVAVSDYSVAIKSREESGFVVFPDAALAIDRKEAERFCTTARGEIGSMEAKIAIIKTARDAAAESRDALVSFLGGYNESSEALFKGDLVRLDNAIQACSSEIGTLTEKHAAVLELLAQVKNTCDMLADAIRKLEPLIQQVSKHIARYEQGRDDRLRRMQQLSLANSSTGRAVELLEERILVSEGVEREARDAAEKGRALASGITSELNKLGGIRKAPTDIFRTLATNTASARELHSGKSRALESANANEEYLRMQAMFDAAQKTYEERQRSWDRRHGGLTADALSNARWQVASTVATEDDYQRAVQEKNEAYESQVTAKQARDTLAKEEESHKKAHFNLPVIPCSLEQVEGRTREAWLSTAIEELTAAVAARSEAVANRAADLASAEYQVQLLSTLASDLQVADEVCAPYANFQEAQQDLAAAKKAEKLASTERDSLGRDLGALNIDLAELLDQDLCAPIASMGSLIKEEQRRSGGVLKEDVTGFLDRIHNAIESLKFELSQHERNEQKVVEQVVLDVKKAFGYLSKLATRSKVPALGGIWAEWSGKPFIQFRTRIEIDSDTSRQAIADTVTMISQIPGVLPAGDEIIHTALSAVLGKAYIIETLKPDTSPTTVYKGIEHPTGLNAWSGGERLSGAVLFYLAICNLLSVDGQGGNVMLLDNPFGSCTNIDFIRLVIALTRQYGVQIVACTPTENEDIRRLFPLNIMIRKGGTDGIIKSTGKPIVRYEKTVYNEGEIATLEISREVPHATS

SEQ ID NO: 40480 - protein, 331 aa, Geobacter uraniireducens Rf4
MQRPETGRLLEALPYGKTMLDKIWMILSEVATVPPGEQRTLLRSMLDAIKDAEFIEFPRMTTSWDRSALPHLPKWINRPRTKVVRQYAEHVIWSPELSFLSSKKELADSPWLKIDKWLKETRNFIRDSVPVRERSLEIFGDEKMLDALIGAQAFKSSLITLDALSCYYVPEPAAWERGPLGSEKLPGVCIENSTTYDVVKRFNREAGIWGFVVYGRGNGFASVVEGILPIMEEFGHSRILYFGDADHEGLEIAARGARKFSAAGRELELEVRLYRLILECGKFAESKTGGVLSPGATDLIRKADLNELPGIFLQHLRVSQEWAGYRRLKRY

SEQ ID NO: 40481 - protein, 506 aa, Frankia sp. EAN1pec
MVDDELYRRWQVARLTEPLHRLEIRSATKADFNHVRYDLVQLALRAIDYVVAHQASMEGTVTPDELVAHLAGLARRLSPDDPDRPWTQVAKLTLANLLNDGRPLRARWGELADSDDERSGTRTYSFRLLRLLDAGDSPQLSATDEAVMLYLQALDVDLADREAAAKLILRRQMEAGEFERARRSAVDARRTAEGLAASLRDRLDETRRDLRGVDWNGDVPAQLRGAHQHVTEQLGLDRHILDLAERGIERGSGTERDACRAVLAEVRRSQEVHTRLERLIVGAIPVYLAAQEAQRFASATSSLAVDLGEDVLMPYLAADEERASTAATDFVGRLCARCPPVWTLDTLAAVLLRPPAIYEQSKPAWDDPGDLDEPEERGLPADVEAAASAVFRECRTAPHRLSELAALGAHHAEDVADVCLLDDVIHLAAAGRFVAGGGFGEDDPGSASTGLAAALEGLAAEADRTPLVGGRWRGDDLLVGRASGLAVREAEGTAGGAVVASGERLP

SEQ ID NO: 40482 - protein, 1467 aa, Frankia sp. EAN1pec
MYKLRRLHLDTVGVRENRFAALTLDTVDVDGNPADTLIWMRNGSGKTTIMSLLAAHILPARRDFLAARKKRRRDDVTRTLEDLVLTDDTSHVVAEWEAPDGALLLTGAVWEWPNRRRPVDHNGAGAQKLRKLFWTMRPDPAVEGTMFEDLPLTHRTRGEVDLAGFHAWIKSRAVAGADAAAVDQIDPWHRLLDDRGFDAGLYRYFVTINATEGGIDALFANIRSENDFARYLLGFVADAGRAASVRDLLRQVATELALRPRYRTEQEFCVDAQPRLATLATAHEDVGGASRERAETARAAAAFRLGLLDAAHTAEAGAEQAAQERRDVDEQRLETQRQADGARRRRDELMRLAAGYWFADATIEEEAAREALAAARTTERAWEAVLALQAVNRARIDVDAHRRAIDAARTQAAPLLVQADRADADLAAALDAELRAVAVEIEHLSRRIDETGTRAEAAEDRRDQAADEMGGLTAEADQLAQRADELERKRTRAVGAGLLVDGVPVETAVAEAETVLESLRADLDACVVELDGADRAVRGTATAYDEARGRHRDAQHAADTAATTLHGLEERAAQLNRSDAAARLAQTSDLDLLADAGRVLALGEEAIATSQTRLLERGVDASSLRLAVAGLEETSLLPPRPALRQVLEVLDDAGIPAVPGWVYLAEHLPLTAAAALVQERPEICDGAVVYGDLAAAVQLAAELVLDDPVVLAPVTVFGETPVVRDGLVVVGPVAARYDHAAGAVELEARRGRLSEHDQESGRLRTDLDELSRLTADLRTLAADVATRGGAAVVRERASHTTAVLEQAEDAQTAAADAHREAQVVQRELAARCEELRGAVTGAQGRLDRLNDLAEDLAALPPVRARLEEIPALRAKAVAARERAHNEARAARREQLDLSDTRARLSTRSGDLTLERGSLTVHGEHRGEVPEGGLDGARRAREQAHRLAREAFDEPELVRRLDDLVDIAAQAGGAWGEYAVEVQERARELAGAPGAADPALRSRYRDEAAQAADQAATRHALAKADLDDAGHAVRERRPVDRPRHAELPHEPVNRADAEAAAAEEDRAAARIQDDLRRVEQRLEALEKHHDALASRAVQLRLRADRFDQWADVAVTATAVSTDPAALDESTTRILDWARRAVARHTEAVDARGRAFEALRRWAADERFALTTGDTEATRRLRKMFLDQPVEGVAGRAGALSAELDQRRARIDQHLEHLDQSQENIVTRLVDLVDAALADLARFTRLSRLPENIGPWGGHEFVQVRPRGERPSQEQARVRVSDLVDQLVAPGASLDMEPVDLVWRATEAAVGGSGFRARILKPDPAQPTQKVDVTEMNKWSGGENLTACLVLFCVMVKLRAENRGGRVEGGVAGGLVPLDNPLGKANYVPFLQLQRTVAAASGVQLLFFTGIGDLPAIRAFDAVLACSKRRSRTGPGTYVTLDEADRPSRSEEIDGIRLVRQRTTSEPSP

SEQ ID NO: 40483 - protein, 328 aa, Frankia sp. EAN1pec
MRVQTDVLIRAATAIDHSGPGSPDWRARVAGAIEELVAAGLVECPRTKAGWDRRTLPELPHWVRRSAPPVAAPRMTAKPWHHLLHWVPTVDSERRLSSAERGLLDAVNRWLPAADQVPVVPMRERSWGLLGDDKALEKLRSGRLFVPGRLTLELLRCRSTWPPVQQRVLGAGTWLIVENWSTFESLCTAAEADGFDGRIIFGSGNQVGTRLAALADKGDTPASPVLYFGDIDVGGIRAARLAVTTAQGAGWPAIRPCRPLYELALASPHRLRVQPASADTVSWTTAWIAGELGQQVAMCLTRGEAVRQEAVGLEILGPAPFAALVADV

SEQ ID NO: 40484 - protein, 515 aa, Lachnoclostridium phytofermentans ISDg
MNHTLRSDIVNNHSTRMQYLKKYIPFFLLQQVSMTQFKDGKYAIVDMGYVTMALLRYFIEENHFNERSVTYQEVAEFLSELLRNDFSLSFYGEEEKELIDYLFDKIKNDGKPFVMDYFDPVEKKQKTTRVKLIESKLLAGSVVYSVTADAIEFYLETKEVKEESKINIQQLLLEKMIETKNFKGGTEVVRRINSEVNRLRLRKQEVLSLLGINVFEGAKALEDFQRTGMQWFDREQKAFIRNKELTDQALKKASAAGVSYQASLKEIYELETELKKAMTNHSRLLSDCTELQLRSDEMIRKHKYSRFRNAFDFMDYVEKVKNKNDVSLLKSIVSPLFSPKITKTFYLGNIDELLSYTGQKEEVGETVLEVDEVIYQFDDEVEEERISQNYEAMIKTLLDMLLVRENFSLAQFNHELELKFFDDIFKNSDYYSFLVHLSQKKEYDLSEIRKRQDTFFDGFLASFLEEARHERYRKLRFSLKLLSDQEGEVEKVTHLITDISGNREFVTTNILFVRH

SEQ ID NO: 40485 - protein, 246 aa, Lachnoclostridium phytofermentans ISDg
MLNNKNLAKAMEVFQALIIGEEISLETGKNADYYEAYSNNAEVNDLVEQMAKGMNLKIYDYNYSLFLTAGDHNRVFGYTNEELKRAMGLRLNKELYLCYFIIYNIMVSFYSDSATYTYTEYVRIEEILEAISRNLTNMIRNINILVRNELEESSFETLALTWDELPVVSSEDTNGIRAGRGSKSGYVKLVFNFLILQNVFVEAQEKYYPTNRFHAMVKNYFEEERGRLYEMQQQLEEKEGQEDATH

SEQ ID NO: 40486 - protein, 1474 aa, Lachnoclostridium phytofermentans ISDg
MPHINRIRVNNVKYNFGTQAYDDFIMKPFCHNTLYDLANGGGKSVLMLLMLQNMIPNCTLDEKQPIEKLFRTGDGSQTIHSLIEWRLDDYDTENSFRYMLTGFCARKATNQVPEEVKDTASIEYFNYCVFYREYNENDIKNLPLVKDKERITYTGLRKYLKDLERDNNYEVKIFDRKKDYQAFVAYYGIYESEWEIIRGINKTEGHVRTYFETNYKTTRKVVEDLLIEEIIQKSFTQKAGSSEEEETMSKTLLDIREKLLELSRCKDEIANYDKQIDVLQNFSHRLEGFVDLYQEKEQCEEELRKVYLKASDMTEESKAKYENLKNQVRESEEKREDLKKRLESIRVFETKKETINLRERLEKTEEEYQILLDKLQLNEAQLMKKESMNDYLEYLSEKQKRNEVLESIRAVQNNNSDLLSEIHSLVSEKKKRLDAYRTECVYFLDSLNLEIIEVQKALEVVNDKALSGEKEYAVVTHQLQVLNSKRQELGEKITTLLREANLLLIEETEKQKQESETKLSSLREKKKVTEEKKLLEEASYQEAKISVAKLSLQSTTYKDQQEEEEKQIEKIVIERKKLDQLLHAYGQSGLKELKQEIYKRLRKVIQTIASEKEIVLKLKKEKEDLELGRFSGNEGVLQLAASTLKSHYGIDAVTGVEYLHSLDAKKRSDLSLNLPYLPYSIILKGEVSTEEIMLKGKEFEEYVIPVILEQSLDWVDKLSLPKGISLLSKDQSILFDEERIKKEVNKLEDEIKDRENRIYRLEDQEKTYSEDEEKVSLYQGNQEEVYEQLMESTKARKHKFEEVEIELRKRREECEERENQIIAFGQLVVEIQKEIESTGRELRNLEELLILKKEFTSCETELFREETRKQKIKELLSQVAQEKVMLFEKGKELESVRNSNKEALNKQELLWESKYQIYYKDGEHKGISLTEEELTTKLHGCLSALESKHTDLEDKNRLVNSYVNAMNRCLKSIQGRSLSVSLLEQMQQENRLFETSESEISSLREVCISLEKETESAKATCDTLRSDYQRLLGKCDQAVSALKEQYGDGPFESFDGFDLERLAIDTKEQFNRLEAEAKKYQSVLEACKKEEALFEEMKKDIVRMRKVADTSTFETTIDSNRVKYTGLSADEIFSELKELESHFIENEKSVKQKQEEFAHNKGKTMDSLKLLGAVMLADEISQNVKRPNTESETRKLINSLSEVNDCLTLEKDRIFKGIEDMQNIKDNFENQCLQRCIYIKTELERLPKLSRITLEGELIPMISLHIPYVKEEFYKDKMSSYIDEIVKGADSMKDINDKLKFIRNALSLKKLFSVIVTDMNAIKLSLYKRERIKEQSRHLRYEEAVGSTGQSQGIYTQFLISIINYITNINSHRTENSGLRKVIFIDNPFGAAKDVYIWEPIFELLKANQVQLIVPARGTTPAITSRFDVNYILGQKLIDQRQQTVVVDYHSSVEARETEFTPLKYEQTSFEFYQ

SEQ ID NO: 40487 - protein, 488 aa, Escherichia coli SMS-3-5
MSLGFLEQARNESMARRELSIQSHALLVVRTLDSIYSALQRNPFDGVELDALAAIMYLFDAMLYYADRERQPGMTRKEAELCLVGHLNEAYPGQEEPDYAQVASKIFAAIKDPFRLRYYDFSQRTHSEEQIVRLVRYDQLSGSDDILWSLTDEGMLFYTLRLDETPIERAAILAWRTLKTIRRGEIDKAVHQIQSTQRQLEQYLIGMRMKVRAAQSGDLSASYAHDIRPVLNDSFDKTREVLEHIQNSMSAITEMLVEGSSKINPDKLNKLRRAQEIFAEVCAFTQRYQDCLLDVNKDFERARLKLIIPRDNTLFRETLEKGALKPLLSHSPDTVEKEIDDLTARLLAPRRQDDDRHILFDLEALLNLYLDRFEQALPHEIQDLTDQPVAIETNLRGIPESVIKKCSDWVSDRLKNWGHVSFRDVFDAYEGEELSEQEQQVCLLHIGSLAANSDPAIEVEIDGAIETTLWRANNIKLLTVAPLYPFEE

SEQ ID NO: 40488 - protein, 1478 aa, Escherichia coli SMS-3-5
MWLIKRVYMDGAGHEEAFYKDLTLDYIGLSQAVSSPVVEGLRSPVRNAKVVTSTYQQLVNGGGKSTYIALLLSIFEPSVSDFTQYLANHRQSEYHYRNYFYKELSVVLVEMVNESGQTLLLGHAHQRNGDDVDRTLFICDAPDSLMGAPFDEVPSYSRAERNSELRPYANSLRSFDSWLNLKAGSEGGMHWRKTTRQNEWRAFLLEQQINVDLIKTMVTFNSEEGGLTRFIEYKTEHDFLGAFFACTMSKDAAERLRELVAHEVERQGELEGIRRNESFLKDVLANWLAFLDPAKQLESIQAQQQLLDDGFREAMRDLAAFVGDAQVEQTQLEDNMDSLQTHIGQAMSLREQLGKRRALLEYDLVQHRFNKQKAIVDALQDEADTNQRQIEITHAAIDYKAYAKALNEYRQADEDLKVFQSETERPLQVIFERTAGEALGTLEWAIDRHRQQEATLEEELGQMDRESHVLRQSYDKIQKTLGGLETERDGYKRDKFQGESQRNELCEAGLIQKDETPVAAQYRLELTLRDAKQSEELANTILHQKEQALEAQLNVVREASIEKSEAQQKLILAEQKHQSAVDSALVLAKNYQKLPTSTRHDLDIEDTSWHSELCGLQLDKVLNANAQTLNGMKERLLQARHELDELRVTGHELVAKQVNEALEAFYAAGIARDKLWTFPHYLASAYNDDAQKIAAVIDQNPGRYLSLVALDNVTFEQVHKISEILPWKKAPIAIYLLDEAQDLRRETSELVQVVLSNPDKHGYSQAAYETRLQDLENTVASQEVSVKATESALKVLESFRNDWSRHYEQYGKHWAGLLDQRELALLILENADAALKQAEHDEQTLRDEKRDVQVRLNNAQQQKIQAEKAHDKVSLFVEKEWAKRETAIMKLEQLAAQIQRSKNTLYTQRERLERLSELEKNKRSEKTLLIIQIGSWSNLCNEPFYSEITATEGMEGRSPEYAHEMAAQAHKKLLEAANGDQVTVLKQQLKDAEQVQRYASDRLTAQPTYNTYPDEVKAAAINELTVINNSIVRLKEQQKQFTQNLISSQVTLQKFSQSCEEASKALDEDFVWEEKPIEIEAIQTSLAEIVNNLYAIEHQIKFLLEQKTLLLRKIENVKERLQNAKTAQAMIQPITPSSAAGLPGRILSITEYADDLAAQCQVYAGLNETLKQQNMRVSTVWGKFRKRIEEELAKDPDARASQEYLRQLDSIATYHEVLGDLERVGTGISQVFEAVQDSLEQFQRSIDLTVTHLTAHLEGAIKLLRRAMSVKIPEDCPVLPGRPIIKMTDRLNDVAADLRGFASSRLQQWIARGQIPRAPNRDALTADLVQSVFGEGELEVRLLKTNASRPQWTPVTRLEGSGGQRLTSAFLLFVTVGKVREYDTGISSAGFLLADNPLGKSNANDLMRIQTQMAKAYKIQLIYLTGISDENAQSMFDNHLFLNKVQKLRRRDLVTVDKERHALWAASLAAKPQFDPVI

SEQ ID NO: 40489 - protein, 351 aa, Escherichia coli SMS-3-5
MSSVMIWLSRLESTANKHRLAAGKAARTVKANAVLDEVLRAHNQEALSQEVPDLLSQAVTQLLERDWRAQPKHKASWQRYWRGMSLPSTFVYEGAIVPTKTTSEIAWHPWLARRITGQLTQPIKARLQQLNTYLFRQTGGDKSLFPGLLGHRERSLLIFGDEKALDSLPPDGWKHVTLTLADMGAFRRAPPLPYESSRCHDLPAIIVENSDVYYRLCQLNRAQTRWSLVIYGAGNKVSGQAECVSQLLEVEQVEQLLYFGDLDVAGLKIAHQLRCKLLNDYGISLHLDEWLYNKLILNGLMTAEGNANNERFDFELQCGWMPKFVLREMKTLLAIHQRLPQEGVASLGLFI

SEQ ID NO: 40490 - protein, 482 aa, Desulfobacterium autotrophicum HRM2
MIEYPNDPIFQRSYALAITKPVCQLQPHRETSPFYVVDHFSLFVNTIEFCLHSLALGSLDSELQRDDLKNKVFSLIHFQFQALKNENPRTKIPGPAEIDKYSSEFINTLLNVKKGKEFTDRIYSISDNRFYEIRFRLLYELDAFDGSFTIQPSVECINLYLQALSQPLIDKTIATQAILEHQLRSGKLSQAIQTAEEHYKITLQQKQYLMELKTSISINLKSVHWTRDIIPRVEGAEENLALFLDSDKRILSHIENDPNLEGESVEQLAFIRKKVMDCANTYSQLLTEITTMGSHLRKAQDDQAFIDSSRYEHLPNIINDIFLPLMGLPKQLIPTLNEKLFPAIIPPSLPYVDDLTFIVNRALVERNMDENAVPEQDEFQEFLREEEPLVSEQDLSEILSLLDGICLTRESVLLSNLLDHLVDEGYSQKVAAVLLAHFIFQAPRNYHGFTAEKTDTTFKFENFSCDDVLLSRSIIEKAEEAL

SEQ ID NO: 40491 - protein, 1476 aa, Desulfobacterium autotrophicum HRM2
MPYLLNTWFSRAGHPAARLYDLKVECCSPDNASEYTDTIVMAENGDGKSSIIQLIISVFIPNKRMITGGKGFDDVRTLDSYFKAGEVAWVVLEFTVDDKQEFLFDDKPTRIVGFMAYKSTVRDDAGNFELKRHFFSFKTGSGLSADDIPMKEKISYIEACDWANGILKQHPKSEPFSHKRQSQWADFLKSINIHPELMKMQLLMNKKESNADEILKLSNINEFVDLVLTPLIDPERTSALPETIEAHRNELANIPNLRKEQEFMNKLARQVSLLQGPGKNVKRLEKEIHGSEKKRGEIADKISNTVFHLKEKSSKLQSDTLASKNEVNTVTDQIKRLNATRLWFEMRKLQILEENARIDEASSNKRLEQAEYKLKLLKAASCLGELLKVQATIRSIDEAIAKADLPAKATLEQLHGVGAALYTLCNKRIQAIDRELSDIRKKLADARNEQKTLVRRESCLKSDKVHNSEIISKIEEWLSEAKLELNHLVESGVMLAQENFVQGKDRCLSEISDTEKSIEDKNRSMGQLEERLTALNKDTFESKVNKENCKNKIERIREKIKDYRESLAKIEHNQTLMELEGVDVVIPYDAGLCARLEKYIDEQRAEHQILTTALESDQLDLEALEQNSVLPPSKDVVRVLDYFSHQDIACFGFGQYFAQNRVLAPGKVRELLSQQPAKYSGIVFQSPEEFKKAKKVPALAHLRGPVELTLQQEGLSVNSNFSDGVHKHVVLPDTDASFNGDAAEIYKQELKKRLYKNESRLSEVNSRAKSASNIFHHLKRHLSIYGVLSLETMISDLSALKEDLGKIKSRILHINAQIDDTIHLKKTMEVEIVSFREQLGEKKNHLNEFRVYEETYHRKIVGQKEIIEEKKRKNKDIDRALKKIVADRLPLDSLIDNLEEKKERQVGLLESKKIDKDSIQYYDRQVGDGKDYAEVDHHELTEMYKRTKDQYESQSDLTAKLRGEREATERQRMGMEKKYANLRGNLSDTEVREAFETDTPGIQQESISEQETFVNTLRENAGQKKQQYKQAKENLSEWRSQYPTIEEPVEAGPVSTVEHAETVLDRLENELVQTNHLLEEKKSTHEQFKIMHNNCLGDIRGIEPVLQLSLPHANHQDNGDQVFSDIEEAGRAWTQIGQTIADINGELDKSKDAIAGITQAIDRILHDESYQDIAEKIKARIRNIKDSLYLQAEHYLSEIIQRVDSIHDTIGKMDKRIETIVEIYQQYVNEALANFKALESSSRFPVNTGTWEIWSKEPFFKVQMNPKVKNPDYVRTQLSSFIEQILRNPQVKLSSNSVQLILRGVHEVIGGNFSIRALKVQSNPTRERDDIMQTLAHSGGEKATAAIYLYTTLARMVGNNCYQRKNFPSFLILDNPFGQCNKSSFLKLQREMARISNVQLIYFTGIKDTRSLSEFNRFVTLKKTERTTRGDQRVQAVETRFESITADFSPDPITDPFAPVLGIKAGADGKNTERIN

SEQ ID NO: 40492 - protein, 336 aa, Desulfobacterium autotrophicum HRM2
MDLTTTFFEKLPDKQKIDLSELWDVFEKVVPADMCLNSRKKLSELIDNMVNAHGLELPKSKAQFNRSAQPPLPKFIKRKPKHGSHREKLNPKHSLWHPKLAFLPESRLSSFDNWLKVDGWLKNGGLEKEVVPVNERSYELFGDEKYLDKQFSQTVPFTKGQFSLDDLRCRRIYHPLSWEAGPESARGKPCLVIENMATWFSLKTLNDEQGWYSSVVFGWGAKFEGNWVNLEFIMKKCRFSEVCYFGDIDEKGLMIPFYVKSRFEDQFDMPFNLEPFLYEKLLSLEVTPGPDKSHTGKFDFKKIAPIIPEKIRSTVLDLIQNKKRIPQEALQPLTML

SEQ ID NO: 40493 - protein, 515 aa, Kosmotoga olearia TBF 19.5.1
MGELSGFSDRVKGVAIFQPLLELKNLRKYEDFDLFSLGFSILLFIMESMLYNRERCGYPELSAFLREQVSINYRKILSEEESLELARFLMDHLRNSGSPWCFEYLDLEDGKPKKYRFHLIGLADYDHGPHGDRDIYFKLTDEGLDLIFKTKEIYKELRISISQLYFRQQIERGVFDKALETVRELFTQVRSRMDEMEKFRRRMVMNIGGVFTEEYQKQVKEIYNQLEREQEVFQSLSELVKEKKEAYLYERLEEIEEKNLDQLIEISNMLDIVINEHSKLFGIKLRTDEQFRKALAESIQNFIQSKIDFRKEILEKVIASETRGDDLRRLLQPLLTPARFLGFNPMRIFIPQRLQQKREGFSEEELPVDQSFAMELERELKRKRERDRRFREYIEVVFEPLKSRNNYTLKEVLEGLSQQKREEFSNRAEFYSFLVGLHQLSPVELRVDSEIRDKVFDSEDNLPFLLLEYLENQKLDREKRFLEVQATCEELSFENGCVVTNYRFHVIEEDELNVR

SEQ ID NO: 40494 - protein, 238 aa, Kosmotoga olearia TBF 19.5.1
MYDSYTREEVEAAFRIYLLLQKKGELRRRDFMDLFEKYSSNPKVRDIFVSVFEPMAEAKVLESEDVLYLVPEPDSDYLSYNNEQLRELMRLDNNTELYCAYFVILCLLSEFFGADFLDEVLREYILVKDLERVVSASFESIEPHMDELEVDSGFNLRAAYEHWKSMEEYRELERMKASKTNRYSFILRVCSFLQSQGLVNLVQEREIYITRKTELIVRNFYAGKETKEKLLKLISGRL

SEQ ID NO: 40495 - protein, 1455 aa, Kosmotoga olearia TBF 19.5.1
MPRIWRMRLVNIQYDAGKKVFADELFNFGGKNTLFNLANGGGKTLLVQLMLQTVLPNERLNKRRLSDLLQNRNFTGHIAVEWRLDSAEADFLLTGFCFTRGNDESGRLRYFMYTSHYKEANPYDIKHFPYVNDKRPLSYDELLRLLKNLKGSYFKVFYSDSKRSDYLRELSTYNLFEKEWRRIKETNNNEGGIDDFFNSLQSTDQLLDNLLIPVAEELFYDDPREQKENLVEAFNNLKNKLLNIPELERNLKDLALVREKGQVLLEAFREREDASREFEERKVNLAMYSNSLEHWHNCVVEELKEIDEELRSIEREETKNRYLLESVKYSREYAAVEEKRQELFEISSKKEELYEVIQKTKGELDLSKAVNLWFEKKDLESKNRALNESIGNMYLGKEEKLEKLMIYAATVYQRLGEEIEKLERRLREVEQERIEKEKKKESLQERNRELNRQKSGIAVEKTRQQLKIEERDKFSTSLFEIHKNERWQLLPDVGLEESRSEFSRLVEDLKSLEVQRDNLERERTKILEEMDELKIRKPELLARIGAIDKEIQGYRKKRQQVRDVLRRHEISYVDLFKEKSLIELKLEKLQKELEEEGFVNKSSLQDLRNQLQLIERYDFYVPSEEVIKLKKYLEDSGVSCRTGPEWLKLQGFSDEKRVQYLKRFPLLPFSLVVIKEELSRLAKLSIDVEEFAGSYPVPIILLPKGSLDTNDDKQFLEIFEGQYIFWQKAHEYASSRASLDFVAAELESKIERVKEVLSRIENSMENLRGTREIVYAFFADYAEDLESLRLPELEVLKTELEALEDREHELKRAAISAEERLSELADRWKKLNSRKADVEELIIKFERLIELNKQAYEADKELRRLKEIENAIGKELKDNDDAISRCDEELKKIHALKAILDKDLSDRRKEREFYREKGKGRNPVSLSLTEAIDSYRRLESELGSHSATIKHYEEQIRENIKRIESVERKLSKFGFSETEFEEFTMRVSDIQIEALEKKLDELENEYVGLREKASGIRGELREKEKNIENMKKRIVSEYSKEPTLLEEPDEQEKRSNEDLIRLDTDKKRWMDIRSESEGFEKLLGELILKVSNSMMHYKVDRVDGGITDRSLKEVKEKISDEVDAVIDSVGKAFLRLEESKEKVRKAVGNYMAVSGEANSDIVAGLLSKMTYEDYFQLSYSEVKEAFEYLFGQISKYEKQIHAELVQKDKDKKLFVESCVRQTRRLAEEIEAIDSSSYIDYAGKHWKAVQIKLDNWDLPDMSAKMEIYINRCIEELKTIPDEKTQQLDYIKNRLSSKNLLNVITDLRRCKVRVLKPEARAEHSTLQPWDSIQKWSGGEKYAAYAAMFIAVISHIRKKKSNLSKPWKVLIADNLFGKASSAHILEYVFQILERNRVQLIALTDHTKQTIYNYFPVVYSLKLRSYLNRDYVSSNLEKGYYDIAPLEEELRSERQESLW

SEQ ID NO: 40496 - protein, 348 aa, Kosmotoga olearia TBF 19.5.1
MNVKKILMGFLDEFGGVFVESFELEEFLRSRDNFDYFSFYEAISELVFLGVLSPVRNSGFNGRNPPLYNKYRKRKPGLSAEDREFLDSLDPAIDTSRYRKSPDLLNRDKGFLELLDRFLKASDRESLRVPSSINERSFEIFGDEKFLSSADGHAFLQNASISEDFLNVYRTPEPFFFSSDSAYSGSLFNVLVIENKDTFYTIKRCFFSNGWRLLGKVFSHLVYGEGKKIIKSFEFALEIGLTPDSCRVFYFGDLDPEGIGIFESFRERFSDYDICPFVELYEELLTVNFSRAPKLRRKQRVSAERFSRFLENFPREVSERIMELFDSERYLPQEGLNFQFFDKVTGNG

SEQ ID NO: 40497 - protein, 512 aa, Desulfotomaculum acetoxidans DSM 771
MHECLRDFSARVKSLSVFEPIWQLKGLRKYQEYDLVSLGLAVLLYILDSMLMGRSECDHEGISKFLLEVMRCHYNKELSSEEAEQLTYTVLDQLRNNGKPFEHPFKDLETGGSEKLRFHLIEIAGYQIGGKIKFKLSQEGLDLLFKTREIYQELRVTIAQIYLRQQIERRVFDGALQAVDDLYLQVKKVYSSLQDMRRAILRDVHAVSIDRYKQLVGRVQRQFQDEKKVFSELKELVRSTEQDIRSRYLREKDRLALTQLLEVARRLDIVVNEHTRLFSEKLDLSMVLEETMESHIAHAFRTKISFDRELVDGVISNNASLETMRHLIHPLLKPKPPKYFDMQKVFEPNLITRTVEEQEEEVVSDYDPEEVMEQLKREKALKELRDKRTRYYIEICLSPLEKSTSYTLLDVLQSMEPAACDDLINRVDFYPFLVQLHQTGTLPMEVTEEMESKTFDSTEGTNLLFLLLQYLKENEYLADKGVLEVCGSEDVLTLANGCQVTNFVFRALSDVL

SEQ ID NO: 40498 - protein, 248 aa, Desulfotomaculum acetoxidans DSM 771
MYKAENVKDACAIFMTLVSRGVVDEKSSRLLQAYKNVPEVREIISGVFEPAAEVKVLNAVDKLYISPGIDNRVFGYTNTELRDLLGLKTNAELYTAYFIILCLMAMFYDSEDLNVVTRQFVPVIELESFVTDKTEKIGQLEEIAVIEEELEFGFSHAVYLWRDLPDYDDKLKSLARSKNNKVSFILKVCNFLQAQDLVIVHQDREIYLRDRLDCMVRRYYSDTSRKEQLLQFLLSGGQAARRDQVAAN

SEQ ID NO: 40499 - protein, 1493 aa, Desulfotomaculum acetoxidans DSM 771
MPQIERIRLTNVKYDNGKKEFVNDMFLPAGSNCAFILENGGGKSLMVQLLLQVVLPNESIGVRPASDLVSGSDRFTGHILVEWRLDDPESRYLLTGFCFTRGYEDERLFKYFMYTIQYDQIPNELDIENLPLLENRKVRSYQELLVMLRRLSGEGGRRLDVFQQDKGEKHKYVKHLETFNIYEREWRGIKTTNGDEGGMEGFFEKSKKTEQLMERLIIPGVDQVIFNRAGEEKELARAFTRHKDNLLSIPKLEKNIKDFSTIRGEGEKVLAAIKAYSDCILERSGQKEKVARLYCSVNNRKEEINALNAGLSADLEKQGKWLHELEYKLDSLPYIRVKLELQDLEKKFIALTESITLVEKEARQSAYEVNLAKGKNLWLKIAAEQAKIKAAQVEAENLTRSNRELMEQLLTCRYTWKTRLKERINRQMPGVKALREELLALKSETKEKEVKQKRLEESIEKSGKQSGMVEGWLKFYSEKEKTLLAGGYEEAWVKDPAYGKKAVSEIIQEIERAKDEIEDSIKKIVEELPPVEKEIEELKFRQASAANRMERINENRAVFNSQYEHIQDSLTRFSLDVGDIFANRADIETRLAQKVIEGQQAMLRVGAKKSNIQEKAELSGLEYYVPNRELLLVQEKLEEWGVFSETGSKWLDLAGISGRQRENYLKNNPLLPYSLIVARKDLANLSKLAEKWQKLALNNPVPLVVKSEAALSGGEVKDSALLPLMDNYVYLPWHGGYRYALSRQALEELRLSLGEQMEDAEQEISRLRQNSDLLAELEFKVREFYLSYPQDPTPVFESESNAVVAEMQKTASRLVYQEKRRIQKLEVKTVLEEDREKKGELLTQAKNHYKELENLYCQHEEKVSYLRQMEELAGQIQSLHTELADCRNRLNGLQTRITELTLRLDNESRILDEMERECEGLEVLEHDGWRQSHMITDKLLNMDGDNRRDSALPQVVAAVLPELRQALPLSYEEAKAQATGLEKTLAGEVKGLKSLEDDIKSCQEHIREYEKIIQNTYGLLLQEVSHADSYISNEVIGLLENRRESCKDMHRRMQKEQAGMNEQRAGAVSKMEIYCEEVAEKYGQEPYTLFSHPDNEEAVLRRDKLQVRNELQLLGDLLEKNNNELSLLKDARIRLDENMKSNSIMPIDDGLPPEVWQQAMQNVTDFVSRQTRLLNKLKDEEQSKSRVVEKQFEIFKKVLEARHNGIVNSFVKSLLEQDRHKYDFALVEPVFSKCFATILKYEESYKHKLKEIEEDKKELISRCIQQASRVADEINSIKKFSKFTLNDRNLQAIDIKLRSWEQQAAPVVTDNYINQCIMILNDMKDEGAEEQKLQEFIEHKMSSKELLNVLSPLSEAIVRVLKPEKDHASSRYDRWEGVFKWSGGERYAGFCAMYIALISYLRSKASAMYNPAKVLVADNPFGAASSPHILDMVFQLAAANRVQMICLTALTDQNIFKYFDVVYSLKLRSLGGKEFISVNRMDTGYYRSGVNED

SEQ ID NO: 40500 - protein, 361 aa, Desulfotomaculum acetoxidans DSM 771
MLAKLRQIIITHKTKRIETSYMEDMVRKKSVFIENGGYEALADCIEDLCAEGLLTPVKASGTNGRRPLLYNRYHIREEKKETDRHRLIAYHPRICTDYYSNHPLGHDEDIEYLDMLDAFLKDAGMYDTLNLPFSVNERSYQIFRDEKFLTSARGQEFCRRIGLQWGDLGCYPTFEPFFYVIYETVSPLNCLVVENKDSFFTLKKIFNRGGNWQKSALDLSDRQARVIDGVKLDMLIYGEGKKILHSLKFMEEIPDCRDTGITLYYFGDLDYEGISIYSGLAEAYPEYKIIPFVFLYRGLLKISPRPMVKKQRLNDLHLENFLKYFSAEETEVILSVLSQSMYIPQEALAYPFYLEECDRGA

SEQ ID NO: 40501 - protein, 498 aa, Desulfotomaculum acetoxidans DSM 771
MQGTMSFLSFDENNRDALQQSFNDLANLSRITDFLYGEHGQFEWQLDFFRVMYLIFQSAFSPDDRIRHENSLANRFQHRFGRKPPEGRLSLLIGRMQTVGWLLKTQDSYMVTELGIRMISFLFDLTQQNFLFHQKDELQKAIFLSQLTGLKLEMLQQLDMDTEPEFLTLLYAIQNLTAQVRKNIPLYVQKKTAVEEILKLKDLMEESVARIEKYVRTETVLERIDDFRLKYHYVNAVLNEATSVCQEGLGEVIRAIEIASAEIAHSPIAPEKFQASLLQKIKEEFIKEQAGVQSVYEIILQMEVEQNERSLAYLPVKIWGGMSAHDIYKTIKMAEQSEIDFSGAARRGPLLDGETLLDVPEPQYLTLEEINHLEREEAVLDRENFYDRAFQDITGFVLNHPEEEDTVQDWILSLPGEDRFNASVFLDFLTYMQKLGLLEIDLEKRRQPRHRPLDWSFLVPAGYPWVLTGQELVKFPQRKLLEGYDRMQYKKFLKKEEE

SEQ ID NO: 40502 - protein, 216 aa, Desulfotomaculum acetoxidans DSM 771
MSGDLYLTPRQKRVVQFIAATGNVSLMRHHTGVTRQDIKKMLEITDNRDLEAFIKVCNLVLKEETVPAQVLYDDILNRYVYVQTVDPVVLLDRIPVKTLLLFLFMYYQQRALGHPQTRLLDLLEIVDSSLVENPRQKVLAALKPLLDYNLVKEDDEIYRVTKIGDAFMTPLFLKKMTDVTLNKNYDLDVILEFYRKVIPRPEELGAEATDYQLSLF

SEQ ID NO: 40503 - protein, 431 aa, Desulfotomaculum acetoxidans DSM 771
MLPENIVLYLQKYLARDETISSKDATIRDRVYSLSAKTIKSRVSYTSKIFELSGEASPSIPPAFQGSRWQNKKTAKQLKNWLNYRNSSLSFELNIRNWVENGLLIRVIELANRGTSSKGVYFIPGLPLIESWNKKELSENNANRKEADKYMLRLEALVNPYDHPGFEKIRNFARREVRQNLRVDKRAEFLLSLLSAAQTMPFFDWKEIGTFSETENMRNAASKTYDGKRTLYQTLLEEILQDSPEAIGLTTVSGNYALSFSARCRIDFTFGRWDFNECPVISNISGEEIAEIISLQAKDVHTLFLTENRAVLRKLAGHMPHEKRRHVGMIAFDGQIRSAVYNFLKIWQAAGLNKLLVWTDFDQAAIYMLKKLYGLGFADFNVLVPKEDELTLLDYPQAISMLEEFIKENMLVEQESYLKDMRLLQELIFNC

SEQ ID NO: 40504 - protein, 539 aa, Peptoclostridium difficile R20291
MEMINILEGYNKRVNCIGSYYLIATLANNRNKFKEFDNIQFYNLLIQVLCYIFDRSLRRKNCLRDDIKDFIEEINRMDYKIMLSEDDLKDLANYIINGLTNSGKVYLFTYYSLEQEKHIDESIKIIEDKNVKINNQERLSYSLTTEGYRLLLSTKEYDELFQIQISQMIAKLRIEKGDYQGAKEDIYDIINTLEIHQQKIDNYIKIIKVNILYIKEEKYSTVIDTTVETLLEEMDKYEELKKEVKLLIKDKEDYLEKDEDIDKEKIKNIRTQLLQMKELIDGIVLAKSTATNLLSRVQDFREEFKEILKKLLTTPVIKRFNFKEEILDRLEKDSDFLLIIRELYISLFKVELPNRFNIGVAYQEQKLLNTREIENEIVNKDELEIIENKEKEERINYCENYYFDFFKYLIKYGLEKGQFTLEEFLKNYLKYDKVIYLEITKDSKLMRDIIIYFANQRESINIKKIIRMLENSAFSPNTDFQIERLIERLLVEDFELLNSVSHIKSNKIFEDEMKINTEINLETMTAVKLEIANIKFEII

SEQ ID NO: 40505 - protein, 242 aa, Peptoclostridium difficile R20291
MNISLNDYKIANEIFYRLLKKSELKEKEAKELFLAYINNSNVRYALEAICEVSKIKIILISDTLYLIPNNDNDIFGFDYRRESLLGKDLKDSYLGYLIMTIIFSEFTNGVAPASYIQVLNLLDLVQESLERSIARDNLEEIEKSCEFNITILKNYWESKRKWDESSKKGIETTSADFQIGFIRKIINFLKNEGLIVHIEDEDKIKPTRRFLDLMNNYFLDEERKVLIEKLVLRKGESINASN

SEQ ID NO: 40506 - protein, 1451 aa, Peptoclostridium difficile R20291
MPVINKYKIINFKFGMGQERILSNRTMELYGENLQVEAENTAGKTMSIQTIIQSICPLSDVAKPFTAIYNKKEPLYSMTEWLLDDGKTLLLTGIGFEKKAGSSKEEGKEKKDDLYKYFMFIIEESKEMEVDIDNIPLLKNNDKGIRIVQPLTASQDYIKMLRDKYGKNKVHFFNNYLRKQHREKLEEYGINQSEWKEIIIKLNSNNKEGGLSDFVKEHNTSEKLIRDKILPLIETSLTTEEFAPILQIKEQVRKCINNIIDMNEKLSDYKNYRDLNIRVESLQNKINRILFIEEDKNNVLGELANLYVHIENKRNELNEEIKQYQKMKASKEEEFKIVEYEEDSYEYFRKEKEIQDTQVEFDKAKNELNDKIEELELDEQYLNISKFKRKKKGLEEGEKDKIEKESEKQRKEVNQEEITAIINRLGSSIHYCLKEESIINNEKLKENTNNNIAIQEKKNQLNDDKSKLTKVLISKNSEIKYIEGKERDFNNQLHEFKLNNTDIKGFISNNFLGEVIDYTRYINYLNIKVKSIEENLESKVMQIEESNKLKDDINEAINNLKLDNHESYMKLQVLKTRKKDIDNFKEKYKIIKTRFEIDNELDNSTKLYKEVKQELNKMKLQVQDLENNKKQLEKELEDLQNYKDIIFEEEILTDLERNGIKPIEGMKYLLTLDGDLEYKNNLISKNPLLPYSIIITNKEYQKLKQINLKNKTKISMPIFVRDNIEDTFITTSSNLVISNGLNILSSFDNKALDPEKREKDMNLIKEQINSIRDKVEQYKAEIEILEEFKLLTNKIDFTAEDLSIDVKIENYKKIIFEINNKIKSNENNEKNLSNKIKELYENKEKLLNNKNILFNKLKDIRNIQDTYSIILENKNEITKLKTSIEKIEEEKKVIKKSIEDIDVNIFNLNSEKDRINRHIDDTESKINKFKIYEPIKLENAKLEELEIKYKKYLEDPTKKEIETLNYEISVCLKRIESITIELEEFRQLISSDNFENIPILFTIEELNKRIVLNKSKVDELRKLKYSIKSDIDKNQGSLNTKREEILKKFNGKEPLSTSLIVNFNFEERKIDIKKDIKDIGEIIEGNRTTCQNLEQELRDLKKYKVERKAITYQPEDIFIESKKLQSKLQNVEYNLIKSINSYKNTILEIKEFNYKHMEKYKNFIETLNVNKDNYSRQKEQVEIVLLVIREEISKLEKHSEQLRKEKTIISRQIKDYVMDCIDEFKIINKLGKHKGQALFNISLPKSDKIENSLSLVDMLMDEIVEEANLGDVEQKINTFYILNKTLNIGRIPVSVIKYEINRNETIKWNSINNETTGGQRFCISFIVTILLMEYKRYDRNAIVDESKYKGKVLLMDNPFGETSQQDFLKEIFELAKKFNVQIISYTHVTNASIRAMFNKIYLMTVEKTTSNKEFVDINEIKQNKTDELVYMSKFYIGNKEELIQEDIFSLI

SEQ ID NO: 40507 - protein, 336 aa, Peptoclostridium difficile R20291
MITKIKKTYIYLKEIQKIYKINEHKELVHIIKKLINDNKIKPIKTSDLTPQHEQLYTKYRIIKQETEEDKKILEEINYKICDKLSIDYYRKNLVHYKNNRVAIMDLNSYLIKKSDNLSKKISINERSYEIFKDEKFISSKVGKEVLKNLKIDLIKDLNVYKTPEPFIYLSINRISPQKILIIENKDTYITITKMLLEGKEILKNKIDTVIYGEGKKIINSIKGLKEDITIEYLTNKENEFLYWGDIDKTGLSIYTSLKDTNEINNIRLFEVAYEHMIDKTKENTLRNIPKNQKDNFECGLENINNLNLKESIKNILVQGKYIPQEALNRFDLEEYN

SEQ ID NO: 40508 - protein, 489 aa, Xenorhabdus bovienii SS-2004
MSLEFLEQARNESMARRELTIQSHALLVVRTLDSIYRTLQRNPWEGVELDALAAIMHLFDAMLYYADRERQPGMTRKEAELCLVGHLNEAYPGQEASAYAQVASKIFAAIKDPFRLRYYDFTQRTHSEEQIVRLVRYDQLSGSDVILWSLTDEGMLFYTLRLDETPIERAAILAWRTLKTIRRGEIDKAVHQIQSTQRQLEQYLIGMRMKVRAAQSGDLSASYARDIRPVLNDSFDKTGEVLEHIRTTMSAITEMLVDGRSELHPDKLNKLRNAQEIFADVCIFTQRYQDCLHDVNKDFERARLKLIIPRDNTLFRETLEKGALKPLLLHSPDIVEKEIDDLITRVLAPRSQDDDRHILFDLEALLNLYLDRFEQALPHEIQDPTDQPVAIETTLRGIPESVIKKCSDWVSDRLKNRGHVSFRDVFDAYECDELSEQEQQVCLLHIGSVAANSDPTIEVEISGDAIETARWWASNLKLLTVAPVHHFEE

SEQ ID NO: 40509 - protein, 1478 aa, Xenorhabdus bovienii SS-2004
MWLIKRVYIDGAGHEEAFYKDLTLDYIGLSQAVDSPAIERQRSPVRNAKVVTSTYQQLVNGGGKSTYIALLLSIFEPSVSDFTQYLANRRQSEYHYRNYFYKELSVILVEMVNESGQTLLLGHAHQRNGDDVDRTLFICDAPDSLLGAPFDEVPSYSRAERDSELRSYANSLHSFESWLNLKAGGEGGMHWRKTSRQSEWRTFLLEQQINVDLIKTMVTFNSEEGGLTRFIEYKTEHDFLGAFFACTMSKDAAERLRELVAHEVERQGELEGIRRNESFLKDVLANWQTFLEPAKQLESTQTQLQLLDDGFRESMRDLTAFIGEAQIEQIQLEEDTGNLQKYIDQKRFLLEQLGKRRTLLEYDFAQHQLNKQKTKVDALKDEADANQRQIDITRTAIDYKAYAKVRDAYRQADEDLKVFQSETERPLQVIFERTAGEALGVLEWAINRHRQQEAKLVEEQGQISKESNALRQSYDELQKKLGGLEVGRDRYKIDKRQGELQREKLCEVGLIQKGETPSVAQYRLELTLHDAQQSEELANTDHYQKEQALEAQQNVVTNALVEQSKAQQTCTQADLNHQLAMDSAQGLVKTYQTLPASTQHDLDVEDISWHNERCGLQLEKVLNANAQTLNEMKQRLLQAQHELEELKLTGHELVTKQNNQALEAFYAAGIARDKLWAFPHYLASVFLDEAESIAAVIDHDPGRYLSLVALDDATFELVHKISEKLPWKKAPIAIHLLDEAQDLRRETPELVQVVLSNPDKHGYSKAAYNARLQELEDTVASQETSVKAVEDAFNILESFRGDWRLHYDQYGKHWARLVDHREQARLLLENADVALKQAEHYAQTLRDEKADALARLNSAQQQKIQAEKARDKLNRFVEMEWAKRETAIMKLEQLAEQIQRSEETLVNLREAQERQKELADNKSAEQTCISIQISEWNNLSNEPFYSEITATEGMEGRSPKDAHEKAAQALKQLLEAANGDQVTALKKQRKDAEQAQRYASERLIAQPIYSAYPDEVKAEAINELAVINNRITRLNEQQRQFTQNLINSKVTLQNLSQNCANARNALDEDFVWKEKPVEIEAIQTSLAEIANSLHETEYQLKLQLEKKALLLKKMENVKERLQNAKTAQATIQSITPSSAAGLPSRILSITEYADALSKQCQMYASLKETLKQQSIRVATVWGHFRKRIEEELAKGPDIRASQEYLRQLDSVATYHEVLGDLDRVGTGITQVFEAVQDSLEQFQRSIELTVTHLTAHLEGAIKLLKRAMSVKIPDDCPVLPGRPIIKMTDRLRDVTADLRGFASGRLQQWIARGQVPRAPNRDALTADLVQSVFGEGELEVRLLKTNASRPQWTPVTRLEGSGGQRLTSAFLLFVTVGKVREYDTGISSAGFLLADNPLGKSNADDLMRIQTQMARAYKIQLIYLTGISDENAQSMFDNHLFLNKVQKLRRRDLVTVDKERHALWSASLVAKPKSEPVF

SEQ ID NO: 40510 - protein, 351 aa, Xenorhabdus bovienii SS-2004
MSSVMIWLSRLESTANKHRFAAGKAVRTVKANAILDEILETHSQEALRQDVPSLLSQAVTQLLEGDWRAQPKHKASWHRYWRGMSLPNTFVYEGAIVPTKTASEIAWHPWLAERITGQLPLPIKARLQQLNTYLFRQTKGDKPLFPGLLGHRERSLLIFGDEKALDSMPPDGWKHVTLTLADMGAFRRAPPLPYESSGCRDLPAIIVENSDVYYRLCQLNRVQTHWSLVIYGAGNKVSGQAECVSQLLKVEQVKQLLYFGDLDVAGLKIAHQLYCKLLSDYDISLQLDRWLYDELILNCWVTPEGNANSERFDFESLCGWMPRFVLRQMKMLLATHQRLPQEGVASLGLVI

SEQ ID NO: 40511 - protein, 539 aa, Peptoclostridium difficile CD196; identical to SEQ ID NO: 40504

SEQ ID NO: 40512 - protein, 242 aa, Peptoclostridium difficile CD196; identical to SEQ ID NO: 40505

SEQ ID NO: 40513 - protein, 1451 aa, Peptoclostridium difficile CD196; identical to SEQ ID NO: 40506

SEQ ID NO: 40514 - protein, 336 aa, Peptoclostridium difficile CD196; identical to SEQ ID NO: 40507

SEQ ID NO: 40515 - protein, 528 aa, Clostridium saccharolyticum WM1
MNYNIDYSDASNRQEIIGIYSLYYYIVSGASYAFDIGNLVISLLIYMVEEGRLNAYAMKVYEIKTFINEYLSGIEYVDEYNLDEIAENLISKLQGAKPNGDPIKFEYYDHDIRSVKSVKVAYVDYSLKDEGFKITDKGLEFLISSKEIPQEAKLTVALYLFKLQLEKKKYKAALNTIKSINLETLRQLDIKTEILSMNRFGREEASRLYKKYWGDFFDLRSEETSHYEDAKERLQLYKESEYLEKNNITLTPEDIEVLRAIEIELSKSSNLQALYTNEISKMPVEMLEIDKSSMINIFLSLFNLQEHFDELTKLDTPIDKFINSVQPLLLPKRNKRFGVTVALSGQKVTRQMENIVPEEINVKPQKHEDFEKIYDGRMKNNYFKLFEMLVEYLVKINTTIEDISDFISYVEQGKGTAAIGSIDFLSFLLSLSYLPDAQRENEYGSDNVQVIQLNERNLIIDKPIEVFQVQELLTYFWFEKMKMAYNAEIHIATEPDQKVQINGEEDRTIGNLKICLIEKGSLKNGQEY

SEQ ID NO: 40516 - protein, 244 aa, Clostridium saccharolyticum WM1
MAKNIDTVGNALKVLIEKGSLSRDEFPIIHESIINDGDTLSDLENLCQTMGLFLNEKAGTFYISPIPGVKTFGYTNEEMRKEFGYSFNNEDLYTALFIIANVITEFFPEASPSAMKPFMKSNDLMDIVDKKVEILREQVNLDEISYEKSYNFEVVVKKWSDLPRVRLDKGEGDSRKEYGKSSKIQLLNTTLRFMENQELIKMVDLNGDKVIYITDRFKATILNAYNADEIQAEIYNYLDNLITE

SEQ ID NO: 40517 - protein, 1470 aa, Clostridium saccharolyticum WM1
MAKLEGFRLVNVHANHNSIVYPNEYFFIDGKNALLDMKNGGGKTLAAQMLFQTVLPNSFFSDKNQVLNLFSGVTLGSTVHSLSHFSIEGHQFNNIYLGFAAMAEPRNSDEASDAVDNSDLGLKYMNYIIAGNNLAADSLSIETLPLCKEDGDRITPANYKSIKDFLQAKMRSDKHGRYFVIQTFENEKSRYYQELKKFGINSEVFEFLREINKDENYIKQFFEEKCKRPKDLLMNFIVPNTEKALDARAFVMNLEKVDRSSQLAESLFEKSQSLNELNKFQADKAEYERLRGEIAAFIEFVNGRVNALEEYDTHLKEYPKQAAAYVFALRQMEERSRGLEAEHVGLYVLKSNFEKDIENIEIRKLQIELEKLNKTLANKIEIVNQQNTEIENMQQEKTKLETINLTIDYKQHESEKNGIDERLEKLTSAHYDEKKITAEYANTIYMIAEKEIDNLEIQLDSNKTRLAQENEKLDNLKKTEGVLGERLNQCSSNIANANDQKYSLERSLSDIDKELREYPNYSNSLLDEEELKCLEALKISVASELKGTSEAINKNKEDQIEAKGDVTNTETIIGERKSQLSEKNEWVEAYRNSLKDIRTKTSAQESDIEEICGQFKKQVESHASRSIDINKSIEQLNDEIKILEDYGFLRARSKYDALNAIKGDWKYAKFGSDILKELDEEKSRKILDRFPGFAEVLIVADDDYKRVSEGKKTVSITVAQENLVLMPWSAIKKFEEEFQFNSLFLLTRDGEYYRNLLNPEVAIESRCKEINKLSEKQTALTSEKEMIETQIALLSAHMYKYPLQTVEKYLESVSKLEKEISASTATKLQQEQYIRTLELKAEELKDKLQKLEYENTEVNEKQQLLISKIKLTNEISEIAARIKDIIDEKSSLEYEIDNNNADLNLAQKEKGHLEKTIERFKENIRLYRDYVEGSKGYKDESFGILEEADIANLYSKFLAAKYAFDEKAQNYEELVGRQAKLNKLMQDIREDHRFGQIDFSEVYALNYVQKVAPEEFRVIDLKIEDLNKKKSGFEEERNNVKAELIACKRDYEKLENKITVYFDKFKALDAQQLSSLERESHKELLKVNDQIETIRKTMNDITAERNLYTNELGQFKVFCDTNALNWQTAIKSDFMLSYSEMQKSYAKVKAEYDKAISRINAEIKKLDAMLHKLIINEQLKLKLKEYLTNKRTFEETILLVKLLLQTSDSINTTIRNLETSIENIGRLDEEIAEQVFRMLKTILDEIAKIPEYSKFKYGDYTKESFKINLSDENSCRIENDIALSRLKAYVYELAYSVQNDGMTKKEIKNRLSINNIIQYGIDFDKLNIQILKIEQEKPKYYSWGRLSASSGQSYVTYVMFAITMVKYFNNVTVINDKMKAPIFMFLDNPFASASSIELWEPVRRFLDKSNAQLLCVAHNVPSSAQILFDKHMIIEQTKNAKGQFINTIRNEKTESKEIIQMRLFDHLEID

SEQ ID NO: 40518 - protein, 342 aa, Clostridium saccharolyticum WM1
MINILKNYSKKTIDIYDLAFEYRKKPVLQWSREEINEYIQQLQDLDDQRIIQIKRSGKGEANLDSIQRKITINKWNLEGQSEAVDLDLFCHDLGMDASYYLKNLDQYHIDRPHIERLTALLHRNSGELTLNEISYVVFKDEKALSQPEKASVNGKRILNNLGLEISDIPYVDTISPFYYPTSSDGDTVLVVENKDTCFSLLRLLAGKESNIKGVLFGEGRAVIKIFKFLHVYSLGNNDLFLYYGDVDQEGFDIARSLIEKYPQHNIKLSRALYHSLLSYEGRALIKKRTIDNSKAEDILTNLFDEDRTSIMSILESEGCIPQEALNYDDMKVTMDELQYRLF

SEQ ID NO: 40519 - protein, 510 aa, Clostridium cellulovorans 743B
MSLIISNVTENYRERIQRLALFDPLYKLQNKNSKDNSNNPIDYFSLGLLALLFFFENMLMRNKKTGVKELAAFLQEITDGEVDLNKDDFEKVARTIIETFRPATGKRNSKVFFNWETRKEDSVQYSILKADKADLTNNTQYYTLDDQGLELIFATKEYFNEFQLSINQLVLRKQLEKGEFVGALRQINEMGLDVKNLQDRIVRIKHEVNRNIVSTETYERYKNIIEDINMRLNRENDEFDELQAFVKDTREKVGNEITNDKDRKAYDLIIEIDRELGQVHYEHRLLLKESIILKTTALQAAQDALYYVGIDSFNFDQEITSRVFSSPLPLNATRRLIEPFMYLEKYETWSPLSVFAMQRLENKDKVDRTQEFLSLAEDEEAKLELKKQSGNFKVIADLAIKTISDKAQETPNINEVTLAEVIEYMKENNHEKILDYRIFYDFWIILHQKSPIDIATLEKSEELLFGEAFTLLMKKGSILSIEEVQEVLEVTERFTIKNMLLRLEGKDDSI

SEQ ID NO: 40520 - protein, 245 aa, Clostridium cellulovorans 743B
MILYNNEQVMQAFKLYSILSMQGYGSKEDLRLYISDEMIRGLVDQFAREVDCTIFASGDYIYLIPVSRNSIFHVSNETIRKKYLPAKAVNLDLYLMYVSIIVLFGEFYDSYQTMEATRDFLTINEWLSSLNERITVLSDHDDERLKELDREFDYNWSAIIEKWVDMDEIKETAKSQDARTISRKSFLNTVKQFLEAQELVKDIGNEELELTEKSKNIIQRYYMEYDYNRGILDFMYSLDHKKGEE

SEQ ID NO: 40521 - protein, 341 aa, Clostridium cellulovorans 743B
MYNTIVEYLKNYKKSRIILGELEKLAPGDMEYIIFAQNIRKLIADNILEEISPKNNNGKEIPLAYKFKIKKYEVKKDYINEIQSYILKVDGAIDLQKYFKLSEETWKKDVPFIEKINDYIVKKGFPEDDATSQERSFHIVGDEKWIDEKGGKTLLERIGLWEKLNIVNNSDPLMLAINPKRIIEINDDKSLSYYHLIVENKATFMALMEGLEETEFTSLIFGSGWKIVSNYRMLELQLNLKGNHKLVYFGDLDNEGISIWNSLNEKIQASLAIDFYVELLKKSCELGKENQLRNDNAIKNFLSFFSEKDKNTILGCLGSERYIPQEALNKDELKSIWRSTR

SEQ ID NO: 40522 - protein, 509 aa, Eubacterium eligens ATCC 27750
MKNTMAENMTGDIISDHRERMLNLKKYYPFFRLIDTSFSNFKDGKYEILDMGYIVMAVLRFFIEENNFKEKDVTYPEYLDFLRLILKRDFGLDLNEQDSKEIADYIFDKIKNDGRPFEFSYFDPVDRKKRVSRMKIIESSIRDNTVWYSISPDAIEFYLDTKEIKDESRISVSQLLLEKMINSQNFRGGVEVVERINEEVNRLKLKKNEVLTILSGDVFAGIEAYEEFVKTGMKWFDDEEKLFKKNRDLIAKSIEKLNASGSTGEGYYRTMNEIYSLETQLKQAMNRHSELLKDCTEMQKMTDDAVRRAKLGRLRSHMDFTSALSDMIKRDNADILVTMLSPLLKPNIRKTFDLISIDDALMVKPPRYEEKELISNERPEDIEFEDEIEEKRIKDNYVFLMKNLIVCLKKSDIITLGQFADAMKRAYGEQILRNADFFSFFVNLCQKDEYQLGGDAGEDTFLDAYLGEGFKDTESFTFAIRKGLGGQVILSDNCMMADVELVRKEAHGE

SEQ ID NO: 40523 - protein, 238 aa, Eubacterium eligens ATCC 27750
MENRNLDKALDIVSKLITGENVSERGENAALYQEYNNNAEVYDIVHMSLKKLNLNIYEYNNGLYVSAGDNNRVFGYSNEELRNVLGLRVNKELYLAYFIIYNIITEFYSDTMSSTYAEFIRLEDIIKNVDKTTGGIVDKSAGLVLDEVEENSFKQIALTWDELPVTTVEDQTGARAARNSKSGMVKLVLNFCVAQELLVESQDRYYPTDRFRSLIENYFDDYRGRFAELMNGGRDATD

SEQ ID NO: 40524 - protein, 1477 aa, Eubacterium eligens ATCC 27750
MPQINRIRVNNVKYNFGTQVYDDFVMRFNCQNTIYDLANGGGKSLLMLLLMQNMLPNCTLDDKQPIEKLFRQGSGNTCIHSLVEWKLDPCYQKDGFRFMTTGFCARKGRGTDDENQDGQEQTAAPTASVEYFNYCIFYREFGDNDIKNLPLVSNGERITYNGLKAYLRDLEKGGYKYVVKIFDRKGDYQSFISNYGIYESAWEIVRGINKTEGHVRTYFESNYKTSRKVVEDLLIEEIIQKSFNNKLSVDNDEGMMAKTLMDIKDKLVELSKKHSQLGAYDSQIAAIDSFKEYLSTYEAFYNRKEEIEKQLYDLLLVAMRESDKKDKELKSQDDLITKMYDELAQEKEAIAVAEVMSEKNSMAGVESLVNETRKALELKNTAIEEARGKLSLMESAGDYKDYAEYEKSYKGLQIAIDNRLREDTDITAELKILVAGYRKFYETETKRLKEKLDIAANRVKALEVRLSEAKDNLRNADKEAAGLGSLSDNLENEIQELQTQLGAALSDAGTVVCENASEEYDKSFSDKELLKNEETRMSEKFNDVQQQLMSLNETISANKALIDIFTEQSEKLEKADEAGNADNERMGKIREIYSADNDEAMLSVILETYQKMRSEYTEECKAAQELDSFIDNARKGTYICKSPERDRLKEYLESQYGSDVVEGHEWFAALNAGQKRDVLKRTPFVEYAFIIKNDFERIKADEMLKDFGKGAAAYPVISEQVLIDTKLEINKDLIVFALKDMSFLRDEAKLETQIKLAQEELDSHKAQAGKLADRMGLVWNDYTFALVYNAASGKVDASEAEAIRLKIADSEAAIIEAEKKRSALNVAKEQLAGQLSQTRAYIEEKENSCRILSQIIDMNSSIDKKYEKLKSLKADSEAARNRIYECEEAAASANSEYDTARDFEDSTRKEYEEIIKSWEEQYAPYYDENVSIEIDDDTYRLDKDEIESRFTGLKTALSQKNSDFADKQALMNHLSASMNKCRDAIEYRGYTFDDIKAKYEAGEIMAAGSQQLRNAKDALNNLVKSSDAVREELESQEALLNRLEGSIAHGINQIENNYGSFNEFPCDDPDGFITQHKVLIKKLEDNTKVQEKTRRQMSDSLKDILVCRKDLERIVSDAGMHVPEEFRPEDAQGITANLTEYEAVHKEYASITRLEYKKVDEFNKNKSKLIDLLNGFNAVELADEVRISLNVPENVVKTRSMIESLNETNTFIQLEKDRIAKGIEDMQMIKDNFENRCIQTCSNIKTELDRLPQLSNINLDGEQIAIISLQIPYIKEELYKEKMSEYIDETVFMAESFKEPAERLKYIRNRLSWKRLFSVIVTDMNSIRINLYKRERIKDQSRYLRYEEAVGSTGQSQGIYIQFLIAIINYISNMNSSGNEGVEGKTIFIDNPFGAAKDIYIWEPIFKLLATNHVQLIVPARGATPAITGRFDVNYILGQKLVDSRQQTVVVDYYSSTKESELEYTRMDYEQATFDFL

SEQ ID NO: 40525 - protein, 545 aa, Clostridium sp. L2-50
MAKQYVMINDIIEEHNARMYNLRKYYPFFVLSETAFTQYKDGRYNSLDMGYITMAVLRFFIEENNFNERDITYPQCEAFIKELLIRDFDIEIEDEDMADLILYIFDKIRNDGKAFEFTFYDPGKKQKKTGRVRLIDSRITDGKVLYYITADGIEFYLDTKEIKDESKINVEQVLLEKMITGENFKGGIEVVKRINSEVNRLVREKDDIVDLLSYDVFAGAEAYEKYMKTVGKWFSEEQKLFAKNKTLVDKAVAKANFDHLTKGSTLLDEISQLELELKKTILKHGNLINSTMELQNISDNIIQKAKLKRLRPVFDFEKELQKMIREDRPDKMGMILAPLFAPAIAKSFSMTSIDNLLTLKSEDEAKMVTAKKEDVNANFRYEDEIEEERSGRNYGKLFFELMDVLVRWKKLSLKEFNGFLEIRFGKEIYENADYYAFLTHLAQKKEYDISRMLKKQDTMLEKLVVDSIREYQKVRDSIGEQQIPQATADSISTVSVPDIYSEDAYAPDISFEPYKDMRFTLTFDSTEEIPVGEDMYVTNILFEVR

SEQ ID NO: 40526 - protein, 241 aa, Clostridium sp. L2-50
MDSRNLDKAIEIYARLIQGETIAKASRENSALYEDYYGNAEVYEIVGNLLKKLNLSIYEYNEALYITPGEGNRVFGYTNDDMKRILGLRLNKELFLCYFLMYVILLYFYKDSGSYQFREFIKPEKVIEEADKYLADVTKRLSVFSAEDVGAESFKAVGLLWDELPAVSHAVYDGEKTKASKASKSGYVKLTFNFMVSQKLFVENEERYYPTDRFKALCENYFEEYRGRLYQLLGGEEDAVH

SEQ ID NO: 40527 - protein, 1492 aa, Clostridium sp. L2-50
MPCINRIRVNNVKYNFGTQQYDDFSMRMYGKNTLYDLANGGGKSVLMLLLLQNLIPNCTLDDKQPIEKLFRNGGGNTTIHSLIEWKLDDADIKDGYRYMTTGFCARKAKESDEGASQDGQTAAIEYFNYCIFYRDYNKNDIINLPLSNGNERITYSGLKSYIKELGHKDMSLEVRLFERKGEYQRFISEYGLHESHWEIIRGINKTEGHVRTYFETNYKTTRKVVEDLLIEEIIEKAFLTRTGRDGDESTMAETLLDIKDKLNVLAQKKRDIANFDHQIELINVLQAKVNSCINQYEAHEDITRQLADIYVTGKELTSRENEHLEELLVAKQTAFEQKESQKKRLENLKITRDGFRLQELRDKSEQLNANLAENERQVSALKQDMNMKESINDYLGYLEDKKQLSENQKIIDHILQNTGADREKMTVYAYNRKLRDDAHLKELLLAKEEVEQSHEHAVKEADYCTKCIKEGEIELAVSGDNRRAASDKLQSLNNKISELTSQVALLVVSDAANVIEASEEKAEELEASLRALAESIREDQEQVFEDRYRLSLAENSLETLEKEYETSHLDAEEYRQAAKKLESIMAVYSVEKAEEIIDAINARITGTLTETITRKQEIERLLERRKYLESGRLFGPSAGASAVIDYIVTRHGHMAMHGADYLAALKPEQRTEILKKNRALPYGVVVKNFADIAEDINLDSIQTDNEMVLIYDMDDLSEKAVTLNENAVMVCRKGEYFTDDEILKSLKEELTIQIRGLEDEISMIDEKLATYREDLAFVGHLADERHLDAADIERKLNQDLLNKKDEVRELQDRIAERTSRITHQKEDEASVKEKLHELEEDKSILLRIKELSDLAVEEEVRYTENVQKEQRITGQIEELKRDAVRWNTTVSETEARMLAIANSIQDIQDKWQNYFKPYYPEDGKVDVSLDPKQKIQVALGQETEDVSRRDIEILTISDEVLETEFMAMYAVANKNAPDVEDKKKLVQALSQSMDRILHTIEKRGVKLSDLEAQTQLFATSEQQLQALSDELMRLELVSASMAEELKNVSKASGRLEGNIEYAVASLKKTYGEDAYAEEQISLSEAEQAITQGDQILAELEQSYKKTAEEYETCNKEQGYMIELYKDVKRIVDTNDINVENGKLLEAGKEELRQAFETSLLRYDRSRKNLEKTRNELMRFKGQTAEALSEMGVFEMAETIRRDVIIPENYYDAKALLESLLQIISYIDLEKERVEKGIEDMVAIKENFCSQCLQRCMDVKTELEKLPKLSKITVGEEVIRMVDLTIPYVKEEFLAQRMSDYIDDIVKGADAYEDERKRVRYIRDCLALKRLFGVMVTDMNAIKLKLYKRERIKEQSRYLRYEEAVGSTGQSQGIYIQFLVAIINYIAGMYSYGAEGEISTKTIFIDNPFGAAKDVYIWEPIFAMLAANHVQLIVPARGATPAITGKFDVNYVLGQQMVGNRQQTVVVDYTSKTSQEELEYQDITYQQATFDFI

SEQ ID NO: 40528 - protein, 542 aa, Coprococcus eutactus ATCC 27759
MALKYVMINDIIEEHNARMQNLRKYYPFFVLAETTFAQYKEGRYAQLDMGYITMAVLRFFIQENSFNEREVSYDEYEEFMGQLLDRDFDVEIAEEDRTDLIMYIFDKIKNDGRAFEFTFYDPGKKQRKTGRVKLIDSHIVDGKVLYFITADGIEFYLDTKEIKDESKINVQQLLLEKMIVGENFRGGIEVVRRINSEVNRLIREKDEIVNLLSIDVFKGAEEYENYMKTVGKWFADEQKLFAKNKALVDKAITKASYDNMGKGNMKAMEEISQLELELKRTIIKHGSLISSTMELQNISDNIIHKAKLQKLRPAFDFAGQLQSIIKDDRPDKMLTILAPLFAPRIVKTFSMTSIDHMLTLKSEDNAKTTKVKKEQLDPNFRYEDELLDEQISANFTKLFHELLDQLSKWGHLSLKEFNGILEVKFGKEIYDNKDYYSFLTHLAQKDRYSVDEILKKPDTMLEGMLVDHIERIKTGKGIAILQNQTDGDMGHGGSGLSREMYAPELTLDAFRGMTFTLEFHPDEEIQIGEDMYVTGIQFNKTS

SEQ ID NO: 40529 - protein, 239 aa, Coprococcus eutactus ATCC 27759
MESKNLDKAIEIYSKLISGEEICKKHPDNGPLYDEFYGNAEVYDIVMNMMKKMNLSLYEYNDSLYITAGEGNRVFGYTNDDMKKLLGLRLNKELYLCYFIMYMTLLYFYKDSSSYQFREYVKSENIIDETSKYLADITKKLDVLSTDEVEQDSFKAIALLWDELPAVTGNQEGDSARASKASRAGYVKLVFNFMSAQRLFVENADRYYPTDRMKALSENYFEEYRGRLYQLLGGEEEDA

SEQ ID NO: 40530 - protein, 1491 aa, Coprococcus eutactus ATCC 27759
MPSINRIRVNNVKYNFGTQQYDDFTMRMYGKNTLYDLANGGGKSILMLLLLQNLIPNCTLDEKQPVEKLFRAGGGNTVIHSLIEWKLDEADIKEGYRYMTTGFCARKAKDTADAGEVQKDTASIEYFNYCIFYREYNKNDIVNLPLSEGNERITFNGLKTYLKDLGHRDMSLEVRVFDKKGEYQRFISGYGLHESHWEIIRGINKTEGHVRTYFETNYRTTRKVVEDLLIEEIIEKAFATKTGRNGEEDTMAETLLDIKDKLNVLAQRKRDIANYDHQIELINVLEGKVNSCIGLYEDNDRICKGLADVYATGRACTQEGDTHMEELAKAKADAGEQMEQQNKRLANLRVTRDYLRLEDMNRKMDDTATQIEDNEKKLAELKNQIGYKESVNDYLVYRENKRQYDENRLIVDNIRNNIGSSSEKMAVYAYNRRIRDEKKLAELMAAREEAQTSYDHALEEAEYCRKVMREGEIAQAVAENNIADATAKIDEISARISELAASVNLLVVGDVKDMMNKAQEESDRILAEMTELEIAIADGRTKLYDDRYRLTTVQAEYDALERSCEDARLDAEAYRQSGSQLDSIMAVYSVENLQDITGVINDRIRGTITETIKRQQEIDRLTKLAKCYEDGRPFPPSEGAETVINYISTRHGLMAMHGADYLSALPGDTKEELLQANPYLPYSVVTKGFDSLEDDINLGSIDTGSECVMVYDMDKLSDSAIVPAENMLIIGRDRKYFMSKDSIEDARKANADKIAGLTEEISLINEKLATYQEDLAFVTRLVDARYTGAEDRERELNQALLDKKDELEELKTSIKVTETELKNNTERYGDLQQSQQKESDRRQTFVMIEQLSDLARPEEQRLAEYKQRKSDLVAKLLGLQSDVLKWSTTVGETEAKLAGLTRNIEDIQYKWTEYFEPYLPKSENVGVAENTDGAGVAAAAWQDGIPEEYKETLDISDERLEQEFMAMLAVSKEHAPDLEDKKKLMDALKKSMDRIQKTIEKRGFDMAVFAGAGELYPTSEDNLREMDDELARLTLIEASLMQQQKADQKAYSKLEGSIEYAIENINRTYGDGSYVREEISAADADTAIANGDAVLADMNRIFKEAEKAYSDYYKQYGFMVDLYKDVKRIVDTNDIDVSGGNVLDEDMDTLRQLFETSLMKYDRSMKALDRAKNEIMRFKGQTADTLVEMGVFEMANTIRQDVQVPDTYSQAKELLANLLQIIEFIKLEKERVEKGIEDMVAIKENFENQCVQRCMDVKTELEKLPKLSRITVGDDVIKMVDLTIPYVKDEFVKQRMSDYIDDIVKGADAYEDERKRIKYIRDCLGLKKLFGVMVTDMNAIKLNLYKRERIKEQSRYLRYEEAVGSTGQSQGIYIQFLVAVINYIAGMYSLAPEESIQSKTIFIDNPFGAAKDIYIWEPIFAMLAANHVQLIVPARGATPAITGRFDVNYILGQQMVGGKQQTVVVDYTSKTDQEELEYQELSYEQATFDFI

SEQ ID NO: 40531 - protein, 512 aa, Butyrivibrio crossotus DSM 2876
MRKEHILVNEIITDHRERMLNLKKYYPFFELAKTSFSWFMEGRYEDRLDMGYIIMAVLRFFIEENNFKEREVTYPEYATFMKSCILRDFGIVAGDREYKELTDFVFDKLKNDGRPFSFVYYDPVDRIKKTSRVRLLESRIEDGVVWYSISPEGIEFYLDTKEIRDESRISVEQLLLEKMIKSKDFKGGTEVVRRINEEVKRLRIKKNQVMELLTTDIFAGLDSYKEFFNTGIKWFDEEQKLFVKNKELIETALKRTENDINPVQGESFRTGREIHRLDTELKVAMNNHSELLKACTELGIKADEIIKKGKLTRLRTRFDFKGIMNRIIKEDKTDILEYIAAPFFMLNIKKTFDVGKVEDLLSYRPENEEKPEKKVELTEKDIVFEDELDERRFNRNTRTLFLILLRLLKEKKTVMFTEYNERVRNILSDKVLENGDYYTFLIHLCEKKEYVLEQGEASEDTFLDAMIKEYMNEPEFSEFIGMHFYLELAGGEEEEIETSHIANVTNFRIILV

SEQ ID NO: 40532 - protein, 242 aa, Butyrivibrio crossotus DSM 2876
MRQFMENRNLNKALDIVSKLITGEEVGRKSNTMLYEEYCNNSEVYDIITETCKALNLNLYEYNDTLFISAGMKNRVFGYSNEELKRLMGLRVNKELFMVYFIIYNIITEFYKDSSSATYLEYIRIEDVIKSVDASLHGIINHDIGVTQDEEEKDSFKALALLWDELPIVSIEDKGSVRAARNSRTGYVKLTFNFLTAQALFVETNEKYYPTDRFKAMAEKYFEENKGRLYEILNREDENATD

SEQ ID NO: 40533 - protein, 998 aa, Butyrivibrio crossotus DSM 2876
MPQINRIRVNNVKYNFGTQYYDDFFMRFSCRNTIYDLANGGGKSVLMLLLLQNMIPNCTLDDKQPIEKLFRPGCDNTTIHSLIEWKLDAGCVKNGMKYMTTGFCARKAKENSDNAERKNETANIEYFNYCIFYKEFGDNDIKNLPLSKGNERITYNGLKSYLRDLEKKDYGIEVRIFERKGDYQNFISEYGLHESQWEIIRGINKTEGHVRTYFETNYKTTRKVIEDLLIEGIIEKSYNNRIRKGNEDDSQMAKTLFDMKEKLTELSKRKTDIDKYDEQIRLINIFTDKMGEYKRIFEEKKKTENELMRCLCVCRKRLAGEKAKTEELCNRKEELAAHINEIKRRTAIAEIETETVELEQLEKLIAETAAEKETLLSSYDRLKENLRYVKAASDYFDYVENKARYDELKELISNSTWNREDVLKELSELAAFKKTIVDRKTTELEARIDEIKTLTEKVCAERDEAADKKINVYGEINKNQGQLKQLKNEIEELNKNTDELMLRCNLTSNAGIEDIISKAEDMLKSSDKALSGYTSHISEEENNISDLNREYLKTETEISFIKNEEERAAILYEKEQQLLKDLNQIKNVYGENDIEQLIEKIEKVLAEITENIVEVKGRIKYLSNYEKAISENKLPEYDRCYEEVLSYLKSRYDDVKSGAEYIALMDGNERSDYIAENPMLPYMIFAGDSYEEIKHDEMLYSLNTGSYIIPIIKKDNILRVCKENMVGACHDLSFIFNGTGANSELIKISEDIDKEKDTLARLNDKYNVISKDLYFCQYAENKLNDSSSYGVPEDLKEEKERLISYLGRISDDMEMSKKRLESYRTSLEREQAHSGETADNLLLYKKIKENTDRLASLYDETRTCEKLTGGLTKEHAELSRKVRSFDALLTEKENIRKSFEEEAASINKEYKEKFESYFNGEAKEPDIEEDEINTRAGALRKIISDEIGELADKEKQLAHYDALIKKNIDNLKYYGFTLDEAKKQKTKAFFQRHLLMKG

SEQ ID NO: 40534 - protein, 544 aa, Ruminococcus sp. 5_1_39BFAA
MQYEFLKNFPKRMKNVGLYGVLIQNSIQKTSWKQFGFLKFDEQMNLIFAVMLYIMEQSLREENCTMDDIGAYIDTINTRYLGKEISYDDCRKLGDFVVNVILSNEGRAMYFDGYDFEENDYHVMHISYVANRIVYLDQEVRRTSYYLTDDGYNLILSTLEIENNMKLTIHEMIFQMHLEKQSYDKAVDEIKNVFNLMRIQLQKIQEAMGKIRRNALNYSVKDYEEILLENLDTISDTKEKFQKYRELVRSRVKKLEEENINVRRLGEKEEENLENLRIIESYLNRTIDEHQKILSSHFDLKALYTRELEALSQMSLIRRFSMRNDFYDKVLENPSALGNLDYFLRPLFNREPDKVYNLNKALLYQKPSVRNEDEDTEEMLDFDEDAYLKEQEEKRRQKLKRYESSLGFLLEQASEKGEISLSDIWKNIQENEKNAEEMQQQLIPNVEIFKEIMVELIRNKEINMEVLKKERSEFIQDQTADFQLNEMLLQLSEERFSDKKIGKIEVYRIEDGSTVTFDNVFSENGVKKSIRCSNILIRIMRNEE

SEQ ID NO: 40535 - protein, 246 aa, Ruminococcus sp. 5_1_39BFAA
MAYEAEEIRTSQEIFYYLLEHHELREEDDQLLYKAYTEEESIRNLVKSQGEIAGSNVERYGNVIYLIPKEENNFLGFSKQQLKGTLCKSGATDKDYYLSQFVILTLLVEFFDGQGSSSKSREYMRVGELMNCLSARLKEGAAEETTTEEEEDGKNPKDTAGISFKILYETYEALKSDDRGSRMKTTKEGFIYNILMFLQKQGLIEYVVQDEMIKTTRKLDNFMDWNLLNQNNYQRVLRVLGVAKDE

SEQ ID NO: 40536 - protein, 1479 aa, Ruminococcus sp. 5_1_39BFAA
MSKINAVRLINVNYNNNAYRISDETLHFNGKSTLISLQNGGGKSVLVQMLTAPFVHPKYRNTKDRLFESYFTTNKPSFILVEWALDQGAGYVLTGLMVRKSQDMEEDRKENLDIIGIVSEYQSPCIQDIHHLPVVEKGKKEMILKNFNSCRQLFETYKKDRDMKFFYYDLTNYAQSRQYFNKLMEYQINYKEWETIIKKINLKESGLSDLFADCKDEKGLTEKWFLEAIESKLNKDKNRIKEFQSILEKYAGQYKDNRSKIKRRDTIRQFKEEANGIQTQAEEYQNAETEEGKQQNKIAWFIHDVNGLLSQTEKAHDHAKEVLEGLDQKLSRVEYEELSSQVYDYEEEKNLHIGNRDMIDMERENLQVQAEQTEKKLHILQCARQQDSVSEEKGELDLLREKIAVARQQGADLEPERKALGLTLKNIFEERIQDNRQQQENLSENIQKKGKEAQDEANRVEELEEKIRDCFGKKGKLESRIESYTRLENQYNAKYQEELVRNILGTYEAGTLEIRRQMYEQELEKTVRERTENQKKWEDDKELIRRQERSLEDKKEALIHKKTETENQEHTYQLYQNELEIRKNILKYLDMEERHLLDTDRILENSARKLRELEELRRNLEKEEDSLEKEYLSLTSGKVLELPEELEKELDDLGIHTVYGMEWLKKNGYSQKKNQMLVRKNPFLPYALILTRQEIEKLGRNDRNVCTSFPVPIVEREKIEEFQEKYTDKIVNFPGISFYILFNENLLDEEKLQAMIWEKKKELEKLNQAVDQRKKEYAEYFQRQETLKNQSVTKEKWEEIQELLKTLEEEKKSLEKDIRDAAQELDSLKTAHEKLQNLLIKSAAEIDRQKQRLEDFSQLEKDYAFYENNRNELEKCKKDETRFRENQKLAKDRQEKLLEEKMTLEHNLNMLEREKDKLDEKYTRYASYEAGSRESDEVRKQQSQQFGFASMSTEQMEARYEAITSVLSQELKNLEEQERRSAARYQREKEDLDYLQKKYHLKPEQWSGVIYDRKEESHQEGVLEDFRRKIQTKDMQWNDADKKAAVAQSKISELTKRIHSVCGMEKPLPKDEIQGQDFQARKNQLLYEKEEEKKQEEFLSGKLRSYEENLTALSEYNELIPVAAEDHEPVSENLSAEELRNCKGILIRDYNQKMRDTGQKKEELVRTLNKIVRMESFQDDFYRKPLEQMLELSDDAVRVLTQLKTTVQSYDSLMEKLEVDISVVEREKERITELLEDYVREIHSNLGKIDHNSTITIRKRNIKMLKIQLPDWEENAGLYRLRLEDFIDKITMEGVELFEKNENAQEFFGSGITTRNLYDQVVGIGNVQIHLYKIEAQREYPITWKEVSRNSGGEGFLSAFVILSSLLYYMRRDDTDIFADKNEGKVLIMDNPFAQTNASHLLIPLMDMAKKSNTQLICLTGLGGESIYNRFDNIYVLNLIAASLRGGTQYLKAEHKRGKEPDELVTARIEVGDQMELLF

SEQ ID NO: 40537 - protein, 326 aa, Ruminococcus sp. 5_1_39BFAA
MKRISLDDLLHTRQDLDYQEQYEYIMKLLEKGQIKPVKASKSNGKKPALYREYWMVEEQKDYSNYIEEIKYTFSTMISVDYYLAHPDTYEKDRIWVLMLNEYLKKHADALLTAESLNERSFEIWHREKFLDREQGKKILKRCGLNVEALNVYRTTEPLSYYTHTRNTPQNILILENKDPFFSMRNYLLNGHTEIFGAEIGTLIYGAGKGIIRSFQDFDLCAEPYMKHPKNTIYYFGDMDYEGIGIYENLAEKFRSRWKIIPFVPAYQAMLGKAEQIIELPETKEHQNRNISTQFFSCFDEIMVKKMEAVLDKDRYIPQEILNTADF

SEQ ID NO: 40538 - protein, 447 aa, Hungatella hathewayi DSM 13479
MEPKGFEFLINVVLCNEGRAMYFDGYDFEMNAYKIMHISFVANRIVYVDSDVKRTSYYLTDDGYNLILSTLEVENNMKLTIHEIIFQMHLEKASYDKAVDEIKNIFNLLRIQLQKIEETMNRIRRNALEYTVADYREILEGNLETIADTKQKFQNYREVVRKRERELEEEHINVKRLGKQDEQSLENLRIIEGYLDRSIDEYQKILSSHFDLKALYTRELEQISQMALIRRFHLRNDLYDKILDDVTALDRLEYFLRPLFNREQDKIYNINKALEFQKPVREKKEEAESIYSFEEEVLDSEEEYRRERLKMYEASLKVLLGFLKREGEISLKAIRETLGDQLKELVPDTDIFKEIMVELLKSGRLDVQMLKKERSESLGDKSAEFRLSEMFLDLLEQDDSLADVTALEAYRIEDGETIVFEGVKNAEGRLCNIRCSNVLLRLLGHRV

SEQ ID NO: 40539 - protein, 236 aa, Hungatella hathewayi DSM 13479
MAYEFSDIRTSQEIFYHLLMKRELREEDEPYLYQAYTEQEQIQNLVKSQGDAAESFVERYGGVIYLIPKEDNNFLGFSKNQLKQALCKSTATDKDYYLSQFVILTLLVEFYDGQGSSSKAREYMKVGELQNCISERLKEGCERAKDEEEREGLAFSNMLEAYEALRSDDRGSKAKTTKEGFLYHILNFLEKQGLIDFVEEDEMIKTTKKLDSFMDWNLLNQNQFQRVLKVLGVEHE

SEQ ID NO: 40540 - protein, 1498 aa, Hungatella hathewayi DSM 13479
MSKINAVRIINLNYNNNAIRINDETFRLGGKSTLLSLRNGGGKSVLVQMMTAPFVHKRYRDSRDRPFASYFTTNKPTFILVEWVLDGGAGYVMIGMMVRKNQDLSEGNGEELEMVNFISEYKTRCELDIDHLPVIEKTKKEMALKGFGVCRQMFEQWRRDRSVKFSSYDMNQAPQSRQYFDRLMEFRIYYKEWETIIKKVNLKESGLSELFSDCRDEKGLVEKWFLDAVENKLNKDKNRMKEFENIVTKYVSQYKENRSKIERRDTIRLFREEAGEILKDAECYREEAAAAVAHEGKIAAFIGELDRLEAEAENEKAAVQDETEALEAEIKRIGYEEISCEIHGYEEEQTLHARRRDMAGFELDSLEHECEGLTQKLRLLECARWREITRESFRDYRFADERLAALRQKKEDLEPERVMLGTRLKAYYGEVCRKESEEAEILTESLRVTRERIAALKGREAGYQKALQEAERLAGGLQTRISGYDGEEERYNRRHRQSLRRNILGEYEPAALEMAADGLIREREQVSRLMTEGKREAGRLEEELRIVDRNLEDAKKDLILTETAKKEQTKELGRLEEERKDLRVILRYLELPEEYLYERDRILTAIQRKLSDIAMARRGFEKELDELEKEYRKLAEGSVLELPAEFEEMLEQTGLRRVYGMEWLKKNGNSVEKNQELIRRQPFLPYSLILSRGELEKLIKSGNELFTSFPIPIIKREDLEDGAVECDGGIVSLGKISFYVLFNDNLLDEEKLALMMREKEAQIGRKRQAADQKDKEYREYFEKQEKIRSQTITKERYDAVEQEIGRLEEKISELNAGILELSAKQSSKKERKRVLERESAEAERKIEDLKRQEEDLAALTGFYKVYLESRAELLKCRDKMEATRQDQERSRQLCDKLEAKEKSLEGENGLLRERMKETEGKRQIYVGFGGESAGEAAIETVEEAAVSGTGVSAADAGEWHPVIPSLEEAVGLEARYAAITGNLSGEERELEENCRKTLSVYEKNEKELKRLAEKYRLSAAEYQDIWYSAEEKDRVDDMLETKQTEKKISERKWNEEDKLVALAVQNKERCQKDMVKKFGEDEPLPKDAITQVDFDVRRSRATDRVKDARDRLRAVEEKLRSYEENLTALSEYREFAPAEGLTWDSQIPLENMTPKQLGDFKGSMIRDYRQALEKRSGKKADLERTLNRVVRREEFAEEFFKKPLETLLLLTSSAEQVIMQLTTVLSSYESLMEKLEVDISMIEKEKDKIVEILEDYVREVHANLGKIDRNSTITVRDRQIKMLKIQIPGWEENENLYHVRLMDFMDEITARGIELLQENQNASEYLGTRVTTKTLYDTVVGIGNVEIRLYKIEEKREYPITWSEVAKNSGGEGFLSAFIILNSLLYYMRKDETDIFADRAEGKVLLMDNPFAQTNASHLLKPLMDMAEKTDTQLICLSGLGGESIYSRFNNIYVLNLIAANLRNGMQYLKSDHIRGSEEETIVLSQVEVNEQLELNLF

SEQ ID NO: 40541 - protein, 543 aa, Selenomonas sputigena ATCC 35185
MQYDFLKAFPKRMKTVGLYALLFANSSQKALWRECGFETLAEQLNMIFAVLLYIMEQSLKEEACTMDDISVFVDAVNAEHFRKAMSFDDCQRLADFIVNIVLSNEGRAMYFSGCDFEQGGFEAIHISYVANRIVYVEREVRRTSYYLTDDGYNLLLGTLEVESNLKLTIQELIFQMHLEKQSYDKALDDIKNVFNLMQIQLQKIREAMLRIRRNVLDYRVGDYERLLRDDLATIDETKEKFRHYRELVQSRVREMEAGSVDVQALLPEEAEKLRNLREIERYLGRVIDEHQRILGSHFDLKALYTSELEKMAEMSLVRRFSLRTELFDKVLANPAVLGRLDIFLAPLFNRAPAKIFNPRKVTEEQRARRTAEDEETTEDVDFDEAAWREEQARLQQEKLAKYAACLTFLLGALAARGEVRLSALAEAAAEDEAKRAALLPDVHIFKEVMVELLKAASLDVEALRRERAAYIREEAKDFRLSAMVLDILDEHPAWGRIRRIEAQKLYEAPPVIFRGVPDGAGSERVVRCSEVALRVQEGNEDGV

SEQ ID NO: 40542 - protein, 251 aa, Selenomonas sputigena ATCC 35185
MAYEREEVRLSQEIFYYLLEHHELREEEARELYRAYTESEPVQEMVKAQGRIAASRVKRYGDAVYLIPEPDNDFLGYTRAHLKKELCRSNATDKDYYLAQFAILVLLLEFYDGQGASSKTRDYIRVGELQNSISERLREGAELAAEEQEAQGLAYQDMLEAYESLRSDDRGTRQRTTKEGFLYRILRFLQAQGLIEYVEQDEMIKTRRKLDRFMAWNLLNENNHSRVLKVLGVEADEQDPRGAADQYQLQP

SEQ ID NO: 40543 - protein, 1470 aa, Selenomonas sputigena ATCC 35185
MSKIRAVRLININYNHDAIRISDETMHFNGESTLISLQNGGGKSVLVQMLCAPFVQKRFRNVKDRPFAGYFRTPQPSFILVEWQLEQGGGCLLTGMMVRRSQDVDAGEALEIVNFLSEYRAPCTEDIHHLPVVEKTRTEVRLKSYAACRQLFETLRRQPQKKFLSYDMNSAAQAKQYFTKLMEYGIDYREWQNIIRKVNEEESGLSKLFSDCKDEKGLVEKWFLDAIESKLNKEQNRMGEFRSILEKYVRLYQGNRSKIERKAKIQHFEEETLKIEERAEAYGRSSAAAAAMRDRLVCYMKEIARLDGRAADESCSEAEALDALEGAIREVEYQRYSARHYEEAAACEALRQRLRAAQERMAACEEERAAWQKRRQLLQLARQQEGLSKEQAELEKIVQLLDVCRHEERELGPERDYLGYRLRLHYERQIGAEEQRARSTEKRLDELSAREAAARQEAEAMEQERVECAQQEGALEAATAAYDRVEDRYAERWQAPLVRNIVGEYESGKLQALAAALDDAAAAAAAKERSKKARQAEVGTEIVRTERAAEMQRQEEAEKQAALVRARQILQGYDEELAYRRRALKYLDRSETDAALFDGEGLLAAAAGKLKEMAEILQKLTVEEKKCRDELENLRTGRNISLPPGLRKMFENLGIPLVYGMEWLKRNGLSEEENLSLCEKNPFLPYALILSEAQLQRLQAEPPTVFTAAPVPLVTRESLERGEERSAQPVGNVHFYMLFNKNLLNEEKLRCLLEEKEAAAARLQKELQERRKEHENYVKLRDKLREQAVKEPLYRAAEKEIEELEEVCAALAAALVQAKADLQALRQEEKTLAEELRALEREAARREQQQREFGELTDAYGRYLEEKARLADCRARLAALEKKKEAVRASLAQLALAVRTEERGREEVLRRLEELQRAQLAFAHYEEAAKPAALKTPVDDFTALLARYQAITEKVSAREQALEAQQKLAAERVRQAQKELQRLARKYEMEPEAWRGVLYSEAEEEQAEREEAACEKKRRDEEREKNAADKEIALAEQRIEQNRREMKRACGKEEPLEREAIPVLDHEARKEELLQQKRRHEKTLAAWQERQRCYESILTSLAEYEAEEPQAEVAFEEDFAHADAAFLRSFTGRLQQSYRKGCEERTRSREKLTQALNSAARIETFQEDFFKKPLETLLACVEEAEKVLRQLAVIRQSYRDLMAKLLVDIAIVEDEKQQIVALLQEYVREVHAQMGKIDSNSSIRVRGRAIKMLRIELPLWSENESAYRTRIEEKVEALTRRGIDLLEKEDTLHDFIGKRLTTRELYDDVIGIANIHIELFKIEAQRERRITWNEVASNSGGEGFLSAFVILASLLHYMRRDETDIFAERNEGKVLLMDNPFAQTNASHLLKPLMEVAKKNNTQLICLTGLGGESIYNRFDNIYILNLVESRLNRVQYLKSQQLAGKAPDTALSFARIEVADDEAHMESLF

SEQ ID NO: 40544 - protein, 320 aa, Selenomonas sputigena ATCC 35185
MEQLLKGRSAAPYEEQYRFIMGLLAEGRIKPLKSPGTNGKRPALHLEYWLSEEAPDYAAYREELLYRTMPRLSVDYYLRHLAVYEKERAAVRALHDFLQLHAAKLGQEISCNERSFQIWGEEKFLLQGAGRSVLKHCGFELAQLNCYRTAEPFSYYAQHRETPQKILIVENKDTFFSMRRHLLAGASSLLGEAVGSLIYGAGKRVVSSFREFSVSAEPYMKEEANELLYFGDLDYEGIGIYENLAEALAAPWTVRPFLAAYRAMLEKAAGIALPQTKEKQNRHITGGFFAHFAAADVLAMQQILEGGRYIPQEILHLEDF

SEQ ID NO: 40545 - protein, 438 aa, Bacillus cereus BDRD-Cer4
MVSKNLRNRGRAHTFTYYDFNKKDEKTYYFHLIEYGEGMNVFSDTEDRVDDFTLSSTGLELLFKTKEVFGELQITISQLFFKRQFEKGLFTDALRRVHEMHTLIEDEKKKIKKLQNTIIKDALGVSQRSELEVMIKRIDETLKSEHEQFDDLRKLVEEKIDEFYEGSLTEKEQEGIHIIQEIEGKLLQAISVHESLFTEKQKTQNIMSESLESSIIHAFSVHLDFENEILRELIETPATEEVLNAISKPFLPLRHYKTFNPLLALVPQKRYKKKQLKEEEIVEVDEEKMRLQEEEEARKKEEIENKEYRYITALLKHLVEKDKYLLSDIFQMIETQDERLYEDILYNPDPLLGLIAELHQSEYNRFEKVTSDVWKNLPDDKKINRMLIRLSNEFVTLQEIESFSLLETGRSHYIGTMKYKDMLITRGDFYGVDRRNRK

SEQ ID NO: 40546 - protein, 235 aa, Bacillus cereus BDRD-Cer4
MALSKKGFITSKEDEYFQWYEERGVQDFIRKVIEPTGKVMIFLDEQDGVIQMVPEVENETMSYTNDDLKKELGFKDNKEIHLFYFILFILIAELEQPYDTESADRMYLPMDELLDKMNGYIEQYERLGEEKLEELSDEYDVDVAGIVEAWGRMADFKEGATSHIRTKDNRRMYIEKTLKFLEKEKLIRIREHTNISVTNKMKNIISHYYHNVENKSKIHDLLLVTREGTVGEEEE

SEQ ID NO: 40547 - protein, 1453 aa, Bacillus cereus BDRD-Cer4
MKVRMTNIQLDEGKKIISNSLWEPNAKDALFILENGGGKTSFIQLVTQTVLPNSNLSKRLLKEVVYKGTTGHIMTEWKLDGENLPYKYLCLGFTYMNGETKTEELNYFTYLFTYNRGDTLNIDTLPTTVNGKVTRLNEYRKFLRQNDIRIFDVNRDYKKELKRFHLIEDEWKMIQKINGDEGGVDNYFKTASSTYDLLVKLLIPEVENTIFDSEEKKKEIQTYFKEYSKNLLSIPDMKRDLDDFQRIKNCAEDMVKAVENFQVKKKSFAEAQKHVVTLKKSIELQIADKEEKIDILMDDIEKNEALMYEADWKIDSYKSHILKGQIEAKEIELVAAENELKIKTEQLKQAKALLQQLEAKKEYGDYLDIHKKVLQLNEDISSLTASKPELEKRRNESKTLLTEALNFLIEEQQFALDDINNNIKFMIEEVNLKDAERKRLEKEKQDLYGEYKDAENHLNNYQEGKQKLIDELGEEAGYDPSVTFKSLHEQQLQSSVTIAQKEEKSRLNKQDMDEKREFVTGQRIAIDNKNNEVTSLKAEHTTFEKEKYNLLSLLSDDGKNTINIFEDMQEFLRYYQYSKVEAEQKIDKLKQYIHDLAKKLSLWESHDFFVPDETLLKVQQHLEQKGVITMLGSEWLSELSSEEMKSQYLNSYPLLPYTLLVEEANLTEVKKSLNSLNKELLNVPLLFYVKSKLQIQTKSVDAKIDELFPLYDELYLYHQLDVQWFASRAKIQEIIDGLKMELSQYKEQLTFAQITLNNYNEILTALETFHTRYSSTFSESNMQAVQKLSEDIKEIHQQINDTNEHIKMLENENELISKFISDEKVKIEKRDSHIKRLQSFMDLYSNPEELVEKVKYLKDQHDQYGTKVNLCEEEVIEQRETLDRQKDKKRSVESVMDGLDKERKHHQLDKNLEPSDSYTSEEKNEYVARFTAVQKDYADKNQAKNSFEENLSDKKNELLKSEKRINDIGFTLEEVKVFYSQEINLEELITKQKETVNTLSISERDIEIEKGKVGENLKEKTKQLELAKKEIDEKYGREVFLYEWEHEEELNRFKQSKEQLGEANKALVTKKELLRNSIIDAEKAMVHLQIENLPLYNERFGLILEEEIISKSKTYQKYAQTHANEHVTKLQKFKEGKKGVYLSFETYLKKIQESNNPKTEQFANGLSKLKTSDQIFELEFILESFNRIFDTINAFEEDLKRKITECEKDKVKLVDLCFQRVEAIYKNVTEIPKSSKVKVFGYELQLIKMRWDRFDDETTHSNLHYHVQTILETLQRMKRENKLENELNEYLVQKLDTVVLLDKIAPIKKCFVSIYKPRKKSLMTTSPENWKPWDEVSKWSGGEEFSSYMSMFMILVTYLRKKVNARDDSWKVIIADNPFGKASSEHVVKPIMELARNSKIQLFCLTAHNNEDIRSHFECVMSNRYYNTVGIELLQVEHREKGVSLGMFAYEHD

SEQ ID NO: 40548 - protein, 358 aa, Bacillus cereus BDRD-Cer4; identical to SEQ ID NO: 40467

SEQ ID NO: 40549 - protein, 506 aa, Bacillus cereus AH603
MEKALNLSFDDLGARFKTLIPVWILGTGANFGRLNYFARHVSFTLIAVIFYQELLDDLRRTRDDLVQTVYKMTQLMKIECDLDEAEKIVDALMVNEGSSKHTFAFQEQFFNEQIMEWETFRFQYLEVDRDATNFEEGVPVYKLSEEAQALFLNTNEVQKHLPISIQQILIELLIEKGELKSALRMLDSLNHRVMTLSKEEKIHKDELIRNPKSTIYDHKNRWGKQLKEVESQFEEESQKYRKLDGILRRIAVSPEHQNTYMQLTKRLTKTKNNHDKLARLVIENVRLELQIRNSHFRNIWLTNTTSFRKTIWEDRAKVVGFVHADEMLTLVESLFSPQKPSILPMEWGIEEHMDIKSSTFGGTGTKRKVYLEPISLDWESILLLWKPIFEELLRAGSVSLKYLQQIDEFTLAKWVENRDAFDFWLAFASMDEPFIISEENIQQIDSDDKALLLSKLMEKYPELSVLTGRQIFNSPSNDAVVIRNKIDVSTYILTLKEAKEDEYRTN

SEQ ID NO: 40550 - protein, 225 aa, Bacillus cereus AH603
MVHPYIESQEVRNCVRRLADSFGLKVVRQDKHMHILVQPHNSFHTNPISELKRTVKTYENRINLYIMGVIWMVICSEADNDIDSKIKWENEGLSYGEIEELVTKTLNHWYELDAESEGTFSKDWSLAVSEMHKKWRLLRYHKLENGRVSYIKESKFGLIDGAVRELEKDKMVFIERTAQTSRMTPTPVFFERLRARFGNMDRYQDRYDAFQVLLEDVKETGEMGA

SEQ ID NO: 40551 - protein, 1406 aa, Bacillus cereus AH603
MSNDKRKFTNSPIELDYFLYTKEPLIVEKADIFDFQLWDEKEKEAVSFSTWKEEVKADKSFHFYSKQEKEQYFEKIEEFGYDANTVNILKKINVGEGGFGKFFEGSTDNTGLFYNLLVPTINDKIEGIDSRNKKEVSVVTTWFLEVLKISKELPDLLAMVNSIEQINDYILPLQDRFNEGEEIKQKVELWRNKGAELLQLLITLMEYKENQVAKLEREQSDRKEKRDLARWKYANIDYIALHQEKEEVDGEYYELEHKQLKADFTVNEYQQNLIGQKVNLELKRRMEKLDEIEINNQKISMLINSDDMKESTNDLEIIKAYFTKHWEFISEYWGNEISRNARSILAHENKIKELKMDLDIENTQKRDLEFKIHDLSNCINQFEIRLEDACLQYGAELPYHISDSIVEIGLELNEAKNAFEIALNAKSNLDNEIVNTKVDIVRQEESMKAVKKEINQLENENIAITKIENEIRANVSKILKTNFSTEMEREEYYQIKQELENYLNKIKGTVKEQLRKMGAFEDDIHLLEEGDKMGSYIPNIDLLKVKKLLDTNRIESMYGTEYLNNLSMEEKRYELDRNPALRYSIVILEDSFESLDFSFMEQELIRSYVVLVDKTKSTKKDKMSTTNPYLDKQDEMNFLFKDLSYGFLEDVYEFDKWRVMLEKNIDDSDYEIEVLEGKIKEIEKVLKKIEVLLNGKLKTELAQKLLDLQAEERKYIGTILDMKGQLEEKEEEMKKQVEEIELLNQKIGIIEKNEEELILLEKDLEQNKENKKTKANFLRQIEEMENNITQLIEEEKKITVQKGNNKSSFDNWMKSVRYNYSIIRNILGDIRMPVVSIQQVYDKSKDLCSHTYRYAVSKEAREYIIKYNEVNEHISNKNIRLAELNQAVKMLQNQVIEHEDILQELSGDIWKGMTTPESDEMHLVTLVTQAEVQLNQGQVELAENRNRIEYNREEIQKLEKRLEEKKQDMEKDYPRFGAEYIEIPDCKAAKAQYRKERNLLDRQYNETRVEIQKLHTSLEGIEQITRLLKDLNLPAHSGQILLEEERVSIHEDPMGYFTQWNHKYNTVTMDYRSYQETLSKRITQIKEKIEYFDNIPETYQKELIHFLSTIRDMSFDDAVVSLNNYLDWAKNNLQDELEQKEKADKAIELCAERQSRRVLDVISGLQDIVRKLTVVNWKKERFPLIKYNKNFPFPINVEDIKPLIKEFCMNEIDFYVSKYKNEIDHFTVHDIAKSVNISKLVLKAMGEFPRLMIHIPGIEGGLLRGEAKHAVYKEWETINHGSMTSSSKSGGQTLLAHFIVIAMIMRQRVEENSPLFLVTDNPFGTMSAPELVEGVFCLLDLLNIQWLVVAPPITNVSITSKFPTINNMNIEVVEGRKVLEKKLVKNYRKYLQNYSVLNPEEQNNIS

SEQ ID NO: 40552 - protein, 376 aa, Bacillus cereus AH603
MIIMSDIKKIINSYITYFREKQGKSKKLLRIERFENDVIMAVGCARRYNELGGYKKFYESIIQLKGEGTLKDLANPRLNGKKPSLHEAYWIVPKYVENTWDKAAMAKVMNYLDLSFYLRKKIYQTEDEWKNILILYEFIKRKDSHKEIKREERSLMLFRSEKFHDDIEAEKYLASSAGSRLMNRLQLKPADLLYKVVHEPFHYWKNEAVPENHLHEVLIVEGLSTFQTLKEVLIQQLPWNFGPIPHYLIWGEGYRISKTLDYLNDIIGDPTQLTIRYTGDIDYEGFNIYFDAKSKYRDLNILLAYPFYSFLSSFSNEFATNILTEQKVNNKNLFLLQDEFKNYKEVFEVINKLWEERRRIAQECINFDTLFKRGSE

SEQ ID NO: 40553 - protein, 496 aa, Halanaerobium praevalens DSM 2228
MERANIGLNERLKKTKAIAELGQGMDTGSLRDYAHQIALYLLLKVFKREINNNNQRSRSDLIQMTIEILKEMELQIKLEEVARLVDGVLYAGDPKKQSYFKFKLYDQKSQSFKDFKYRYLIPDREYSKWEQGGKTIYRLSDISQEIIFITREILQEFGFDLEQFYTLQLIKNGNFKEAKGSVSNLIARVQNLIKKEKDWREDILRNPGLIFSAYKERRRKTEAQVREQFAEEKKVFSDIFIWQERLNNFETAAKKEGELLFKELERARELHDLLADLTVSNLALEFRLRRESPELFWQTSQLSFKKDFWQNTIVKSGLAKIDDLEKILKPLFSPQQDFIFPLDWAWSEQQLYRELAEEQTDIEPIEIEAAPKRQIDWELVVELWQDVFKQLLVKGEFNLIQLNHLSLAEKEKWLSQKINLELFMMFIVTKLELKVKKDYKVLDERLILFNKLIELKPKLANLAGRQISAELVDAKQRVNLLDQFVISAYKIYLEAD

SEQ ID NO: 40554 - protein, 254 aa, Halanaerobium praevalens DSM 2228
MGFKQEDLEKGAALFFKLLAEQIISISDPLAEAYSKNSEIHNIVHTMAAEAGLRVFSTPKNVHLVSRARDSNFANSYTQMKAKYPGLTRKRKFYLANIIISIFLAEIDKENHIRIRWEEEGVSYYHLADLVTATLKSWLKRQSEEDCFSENWALAVEEVGELWLTEFSPYRLNKDDKIEVTRTKNNQLSFINTALKPLVKQGLIIDQKDELKLIPKPELYERLDDLYHKQERYKKFQKLIRESREELEEEKKNA

SEQ ID NO: 40555 - protein, 1494 aa, Halanaerobium praevalens DSM 2228
MPRLNKIRITGNRYDGFKKQYRNSIFSLDSKHTLFTLQNGSGKGAMLQLIFQLLLPGTAWGSQNGNQLENMFYNRYGEFRQYTFHVVLEWSLEGSENKKLLSGICVSANQHKLAGEEELKIGLKYFLYTHQYQNRSQFSLKNLPLYQEEKDKVLQYDEMEKFVDQNRAELVKYYKSSVSTPNSEYYQYLSSHGIYRSEWEIMKNINRSEGALERHFAKAKDNQALFDQIIIPAVSESISYHDQGQKKSLINLFINNIEIAQDLPELLSRADDLKKLDYLVEPLLQNSQKGLRLQNTKVMIRERGNNYLRGIETRLSFLENELSRSQAEKVKTKKSIKNLKFEAENLKYVKKLRELKKLQTNLESSLIKKSESEKTLAEIKAEKLHLKLNQKYIKFEKLKTEIEQQKIKIDLLKKRPEFNDLEIQIKDLKTEIAAASLDLNTKIKKSFTAYYSYHNYLTKELKRMENKEDELEQQFRSKQKIKIDYEQQARNLKTEKNKLASFFNSLELETPAYLLQNLEKKEQKLDSKLEKIEENLKAETKAAAHLENEKHQVEIKLAKQKSQVDNLQISLKDQKEAEEDLYLKILKSLNLDQLDEFYSKKWLQQKNKKILQIIKAKEKRLQKLSAKSFELQLDLNLNDQEYWIASLEQKRLYQKIKELDISVYYGSQFLLEMVEDSQKYLNDYPLLPYGLVIINQLDWKKIKDNISPTQIFHSAVPIFINNQLDQVDFRLPFKLVTGQEKNFIKANKNFEDWSQALKDKESEFQATITILENKLKKLKKINYQAEAKLQKKSASDLKIEMETAAVELENLEKEIKNLADKIEIKNKKISELKQKYTKTENKLKNLKDKKQKVDIFLEANKNLEAKKARYQKTLAELENLKQLSLENKNKWRRIHENKVQLNNDYQQWSKKYYKFSTELKQMLAKEAFKLKTDFKTKDLNLFANPEYPDFYNFEQHHSYQKYERIIQLKEKEADKEANLKYLELDLKNKSAELDQLRNELAQLAADWEQREYSFKNLRQIEFALAELKTQLNKIEAETEALKEDIIIKKTKLQEKKEHLRERAAEIKARFHCSVKNWENIELKPKKLEIKNQLKENKEYLFKLENMISNYQEKLGEYRDYKGKLDYYELNSAKGELNAGVKADLKDSPAAVVNDWIADYRKNKAKIKSLREKIENNFYQFKNDVQVSLENNYFKNKVKENLLQNFKANAYQYNLEALNIFKEYINHALNDLSHARDKAEEARNYWAERSALHVMRLINSMQDMISKMVYYNQKGIAFPLVKLRRTDLLPDDKKEIIFELSQYFLELITKFKEQDIEIEKLSESKLEKYCGDTALFSRALRGRYPVLQVYKMTEKNEFLYAKPQSYFYSDWESVIKGKGKATEGSGGQSLSINAFMMMMLLNYKKQNLARTNPWTTLFLDNPFGKASAAHVLDPIFKIADKLNFQLIAFAAPEIIKSEISERFPVFWALEVAHDDQNRGTIAGELASGARKRKLD

SEQ ID NO: 40556 - protein, 386 aa, Halanaerobium praevalens DSM 2228
MLEKENWIKLFNNFKKTELKKRKRFNLNDLEVYIKEKLGGAAFYQAAGGYQKFFQLLKKLEADKQISAIKSSDFNQRRPQLKKRWTLIEEKFSGWSDKDIVKLSRLLDLSYYLKRSKKQTPKLKIMLFKIAKFLKNKQEREWASREERSLELFGDEKFLNQSQGKKLLTNLKLNLVDLKAEHYKHLFVYWTLNPTQINNILIMENHSAFIGAKKALAAGINIFNQNFDTVIYGQGKKIVRSFSFLEELLGLKPVEENQSYLTNELTKAEEKLKDEALRAKLNIYYAGDLDPEGLAIYTSLKAKYPKFKIKLLGEYYQLLFRLNKGPYPCQNKQQKNIKVLKEVIRELKQASFEDLSLDFENLWSKNLRLPQELITLEVLKKFKEIN

SEQ ID NO: 40557 - protein, 475 aa, Bacillus coagulans 36D1
MENMDRPLISIFQEQADSPAVLQSMRDIATLSGVLSEMGSQRVFDSPAEILRFLRILQLLNEEALGIGDRIPNSDTLYYRYQNRFPDADPPSKKKVAHIVNVLVNNNWLSKQTTGLKMRDLGKRMMDVLIRLANDSLAYYLEDDIGRSLFQARRDAELSEAYDDHGISGGNKIASLIRNVENTILMLKERELELLADRNALPQLQKIHDLMAELQEKLSERFRMFETMDESLILTDLMQRGTTAMSEGTNLSLGMINKYLKFTTMQKTPLSSSIQPDLVRQFIISMFDPPIDSDIPNAYQMFSFMEQGQYEDEAMDGIWIPVKFASPISGSGISEAIDYLENYEPVTEPLSEKEETIEYAAEEGSKDEMDELLGNSNWMLTKSMIQTEKIENYLEKIHKASMEQAVIEATSGEWSDAVNALTALAALVANKKIDIQPDPGDTETKTYEKTWEWMNQQDAKQVITKRKQGEPIDQG

SEQ ID NO: 40558 - protein, 229 aa, Bacillus coagulans 36D1
MIKDDFSERVFDNASPLNAMAALRGILSEEEELAFMNLLFSSSASIRGANFGLSRKEVEKQLKIQNDNDAFFSFLTRVNQAVSRYFQVIYDERRDQVVVMMRVPARAARNTLSKESLALLLYMFYQQEVLQHEFSLFGQLLEALGHETKKANQRIQLSLDQLKKIGAIEEYEDTHSDHKAYQLTAIGVHMFSDSFLRRTAEFSQSNKLNKEEVLKFFKRYNLYQEGDAE

SEQ ID NO: 40559 - protein, 1065 aa, Bacillus coagulans 36D1
MIPYRLKFAGIRDFEPTLMDLSGDEHIMITGPNGSGKSTISFCMGAVLYSSKVDVEGLKSRNLRPDQVWRAHISLLFRNAGQMKIDEPEFIEFTLHIEQEPGQPIKKEFIVEKGETIDEWQGKTTYTSGDQYHNFSAYKKALQYRYKIDSDLFYLIWYQQEVNQFAVMHPEERFRIFSEMHGIDQARKNWEESMEKVKETEETLLAAENHVKLNKQNLGILKTALDVFLDNQRRLKEGAEKAIHSLLHLELFYQKEIETVNSVIEDLSEQLDDFRDQYASSSTQKEEQEEAIKSLATTLEKREEALKALEQRIKVEYTRLKSITDEKNGLEEELESLTEKQKTISRTEEEARSAQAELLKELKHTEQKKSEIDYSVQEINHKLNELSEELGKLHYFIEEAERLEKIHLEKLEQFHSSHHVQTTIDQLGKAIHQNGDLLHETNAAIKQLRKEELSLKEDRNVSQRQQQSLDYFRTIGIAAYPLRELLELDSAAKLKDENRFNAIKYAVFFNGKHAQPPNDLYHVPLMDIVPDTFEEHVPELHLKIKAGLTEEQIRFAAKALYWTKQFFTGTKPRIENGFLIDQSGIRGPQEKAGYILSQRARQIRLQQVQQELGQLESKAKMLEQKIQSDTEQFQFLNSEIQKVKEAEAFMTQKHERAQKKQKLAEATAAQSRFRQELIQLDQRRNHIVEKQTEFNHELKQVVQELEFYRELGKRKEKFDQLREIARQEKEKRKEIKTLNASREELEFQLDEQESRIKNQERKLRAIINRLEDINRNIDSTLLQQNRKKERLETCQAELVIVMQQLQEIQNLVPDLYAVFSSSFERLAELSETTLKTQLSNAMITFDNARHQEGIDPAAEDNYKKAKEEYERLEKEYQESKILLEHNKQRTAALKENLETTINMRVLEINKRFAVYMAAFQFQGEISWAQREDKNRRTHFDLYIKARKEGHRGTMEDVSVKARGGRVGKGVSGGEESLSSLLFALALLQNLETTPGFIVLDEFDSALDEQRKSKVFDLYVEQLHRKLIILTPKSHEDEYINRFKKAFVVQHDPAIPKSKVTGIRLK

SEQ ID NO: 40560 - protein, 433 aa, Bacillus coagulans 36D1
MIEQPVLDYLNAYILRKGEQLRLDGVSKETFIDIPIVKVTKRTYRTVGILTIGARKPDGDSKSKAGAQLEKLHLTPRKKLTLHEDEPQTLKWLDEGWIVKEVRLKTDGKTVDSQCYRMGYTYYRFLEEQKLMEHQTRQDELMTLKNTFEQIDITSAETAVKSTIYERIRERFLSVCRPDALIQSELFEKAWPDQKRIKFLAFLAAIIQISTVQDRFDWKEIGASYYKKIGGSKVFDRNKSDFLDLFEAWAGYPAEALGMVSLGNLTPVYFSGQVTGTYSSYHYGPVHAVTNLSLYEDSHSSEAETLWIVENRAILTRIAAEKDFLKDMRVLLVCCDGHVRSAHRHFIEQILRNSPPKQVIIWTDYDPDGFRIAREVFEIVKETPVVKWIGPAGEILNSWTQYAGQMSAFLETRRMEQEEQTGDVMLWKTWIAH

SEQ ID NO: 40561 - protein, 549 aa, Clostridium perfringens NCTC 8239
MNFDFLDDQHMRMKKIGAYSILFRNSIAKGTWKKYGFSEWYEQDNLIFTVLLYIMEESLKNDMCTIDNIGYFIDEINSIHFKKELSYEECKELAEFIVNTILCNEGKVMYFKAYNFKKAQYEDININFVKNRMQYVDDVRRVVYSITDDGYSFILSTLEVEENLKITIHEILFKMHLEKASYDKAVDDIKNIFNRYRIRVKSIEDAIRKIKENPLSYTTEDYENMMEGNLNLLNKIKEKLIIHREMVELRINEFLENDININKLNKKEEENLNNLKIIKNYLGRTIDEDQKLLKKHFDLKDVYGMELETISKMALIERFNFRNEVYEKILDDPNMLENIDIFLRPLLKRELPKKYNINKSLEYQKNINKDYSEEDEELSFEESDFIDEINKKKIEKLKKYNDVITLILELSMKQGGISLREIQELIKESNELMEKLIPTVEIFREVIIEMLKNRNINVNEIREERKNAIENGEIEFQLNKSILEVLDNNSELNIIKEININKLIDKDDIKLEGVKTEDGEFKNFICSDILFESIRGDKNGLFYGRSKDQ

SEQ ID NO: 40562 - protein, 236 aa, Clostridium perfringens NCTC 8239
MAYSMEEVKISNKIFYYLLKYGELKEEDEGDLYKDYSENVNITELVKEIGEDSECYIKKYGGVVYLIPKEENDFLGYSKGELKKELCRSNANDKDYYLSQFVILTLLVTFYNSKGVSSKSRDYIKIGEFLNIITDRLNEGAERTKEADSSGIAFSNILERFEALKSSDKRSISKTTKEGFINNILDFLEKQGLIDYIKNDDMIKTTKKLDNFMDWNILNKNNYHRVLKALGESIDE

SEQ ID NO: 40563 - protein, 1463 aa, Clostridium perfringens NCTC 8239
MSKINKLRFVNLNYNHNTMKIDDEIFYLDGQDTMLNLRNGGGKSVLVQMVMAPLVNKRYRALKDRTFESYFTTNTPTYIMIEWILDDGAGYLLTGMMVRKKSVLSDEDSKDKLDIINFIHEYKGKNEYDIKKIPIVEINNGKKMVKSFLNSKKLFEELKKNKEVRFNYYDMNNPVTTKNYFEKLQEYKINHKEWETIIKQINLKESGLSELFIKAKDSSGLVKSWFLPAVENKLRKDEDRIKNYRNLVKRYIEQYKANKTNIDKKEKIELFNKLSEDIKNSCDEFISTIEERKGLENKIANIIRILKNNYEDKENEEKELECLIKQLVEKIAELFYEEYSIKIYRKEDKIEELEEYVKELDHLVNKSEEEKKALNKKNEILECSKIYKEYQSRSQELQSLERELEILTKKKDDNTPLINNIGFTIREILNKEISDMEEEVNERKTKVSALEFEKENLKNILNENRLLINTLKGKEGFLKASLESFDKIQSNFNDKYNENIIRNISGYFNEESLLFLGRNIEDYNFDLNKNMKNITEDIFYNKEILKSKNNEKERNTKLMFDFENKLKNNVGLIEELDEKIKICIDVIKYIDFGEERVFDTEDILNAFYEKIDFLEKEKSKLIRQEEDILYEIDKLEGGRVLELPKEIKKKLEDKDIKIIYGMEWLKKNGYSTEKNIEIVKNNPFIPYSLIMSSSEIEILKREGLDIFISNPISIINRLDLESNFLEVDKSMVSFNKLNFFISFNNKLLDEKELIKLIKEKNQYLESIRINIENRENEIRFLEKKKEIIQYSKLDKEKYENIKKEKTFLEKKIIEIRENEISIARELGNIEINISELENSKKVLEENIRKNLEKLNSFNELIEEYNKYKDNKDELSSIEFKIEEINKFLKENENRELEIDKTLKDINNIRVSYTNSLEKLKSEAIKFSFYKEGLFIKKDKEDLLAEFYVLNKEITASEKDLNKRIEEKSRAFKESEDELNVKANKYNLEESEYINEVYNINKEFELKDLIEEEEKNYNYLKDKRSNILQEIAGEKSNVKNLYESLKKDLGKTKAKSKTLLYDKNFEEEIAKLKIEKASNEKKIKEVINEKSKIDQYLIDLSQFNEFIIENEEDIFIDIKDLDNIIGSIKRDLFEKKELELKREAKLNNCIVDIENKDSFRNENIFKIAIQSLKSLVSKPIKFKEHLNLVINSYNSIIEKLSIDIKLIESEEEKILDSILEYIEEVNKNICIIDDNSSININNKRVKMLNITVQDFEKNKINYRLKLQDYIEAIRERAIKELEKNNSIEEIISNNITLFNLYDEIIGVENVEIKLYKIEENRQRIISWNEVSKNSGGEGFLSAFVILSSLLSYMRKNENDIFSRKEDGKVLIMDNPFAQTSSSHLLKPLMDIAKKSNTQLICLTGLGGDSIYNRFDNIYVLNLVSSKLNNSIKYMKSEHIKGDKEEETEIIVSSRLKIEEQTSLF

SEQ ID NO: 40564 - protein, 333 aa, Clostridium perfringens NCTC 8239
MNLSSFKRKRIELDELEKLFKIDTYCDLYVKVNELISANKIKPIISSGQNGKSPALYKRYKIVDIKEENKELIDEIEYKLISKFNIEYYRNHLEKYSDHRKYILQLNDFFINKSEFLNYPVSMNERSFQIWGREKFLQKEEGKSILKNLDIDLRTLNYYDTSEPLAYYSRSKNTPQNVLIIENKDTYYTFRNYLINNNKILDEEITTIIYGAGKSVWKTFKDFKVSVEKHVSNQNNKFFYFGDLDYEGILIYEKFYHLFSKEYNIRPFINGYKKMIEKSEMMEVNLPKTKAGQNRNIENVFLQEFSKKLNLKILRILENNLYIPQEIINVTDL

SEQ ID NO: 40565 - protein, 547 aa, Eubacterium hallii DSM 3353
MDFIQEKEKMQYEFLKKFPRRMKNVGLYAVIIQNSSQKLSWKQYGFTKFDEQINLLFEVLLYIMEQSLKEEKCTMDDIATYIDTINVQYLRKDISYEQCHQLGDFIVNTVLSNEGRPMYFGGYDFEKNEYEEMHISYVANKIVYVENEVRRTSYYLTDDGYNLLLSTLEIEDNMKFNIHEIIFRLHLEKQSYDKAVNDIKNVFNLMRIQFQRVQEAMRQIRRNALSYSVDEYEEVLVGNLNTITDTKKKFQEYKTVIQERVKDLEEENINIRKLSKKEQQDLNNLRVIEEYLTRVLDEHQKILNSHFDLKILYTEELERLSQARLIQRFSMRRDLYDKVLKQADTLENMDMFLRPLFNRNPEKIYNLNKAFSYEKSVNAGMEKDTEEEVDFDEEAFRREKEEKLQKKLLVYEKSLQYLLEKASVTGEVSLGQLKDRLDIYPEEKEIFIPNVDVFKEIMVELIRNRTIDIATLKKERREYIQEQPDGFQLNEMILKLVEEQPENNDITSIEVERLENEEAITFSEIKDEENRRKTIRCSNVLIRIFRK

SEQ ID NO: 40566 - protein, 243 aa, Eubacterium hallii DSM 3353
MAYTMEDIRKSQEIFYYLLEKHELREEDEQALYKAYTEEEDIQNIVKSQAETASCDIERYGNTIYLIPQEENNFLGYSRVELKKELCKSTATNKDYYLAQFVILTLLTEFFDGDGNSSRAREYIRSGELMNILSERLREGAAYEEEHNEEEMDTAGISFSDMCHAYEALKSDDKGSHAKTTKEGFLYNILLFLQKQGLIEYIERDEMIKTTKKLDSFMDWNLLNQNNYQRVKNILGVIENEQN

SEQ ID NO: 40567 - protein, 1489 aa, Eubacterium hallii DSM 3353
MSKINAVRFINLNYNNNAMKINDECMQFSGKSTLLSLRNGGGKTVLVQMMTAPFVHRGKQKTKDRPFESYFTTAKPSFILVEWLLDGGAGYVLTGLMVRKNQEISEEKTDALEMMAIISEYKEPCMQDIHHLPVVEQNEKTMKLKSYNSCRKLFEDYKKDKKLSFFCYDMSSPAQSRQYFYKLMEYQINYKEWETIIRKVNVKESGLSELFSDCRTEKELVEKWFLEAVESKLNKEENKVKNFQEILEKYAGKYKNIKEQLKRRDAIQKFKEAAEEIQINAEDFLVKEGEKIEQEKVIAAFIARLNVLYEEAEIERERQEEGRKKLQEELEFLKYEQLSCEFHEKNREKRNHASNREMIDLEKESLLRKQQKIQKKVHVFLCAKQQEMVNEDKQEWEIRKEKAAISRTKEENLEPERNRIGGQLSGYYEYRLSDNKEKKEAIKKQKLQIRKDISQQKDILNEYREKTKKITESKGSFRSLVRGYDNIEIKYNSNYKENLSRNILGVYEAGMLDIKQEMYDKEQKKSIQENKEQKEKSENTTEEIHRTERAIEEKREKYFQKDSDIKQAEKEKKGYEQELEERKDILKYLELPEEKLFAREEILHKAKIKMQELSSRRRTLEKKEDALQKEYKLLVSGRVMELPDNLKEEFEKLDVPVVYGMEWLKKNGFTEKKNKEIVSQNPFLPYALILTRQELKKLSERNGETYTSFPIPIIERENLESIKLDRTQSFVKMQDIHFYILFNENLLDEEKMEIMIEQKQKDIADIRETMQICKNEYEDYFHRFDVIKRQAVTKENWDKIQKKLQKLEKEKEDIFQNIQQARDTKQSLKKNFEILQKTLRELEKKIESQAARQRAFKELRTAYAEYEENNKKLQEYEREEERLENRQHLTEEKISQLEENYRELSGQENSLFREEESIQNACQKFAAYKEINRNVKAGKLLGVDSTLRTDNNSGVKIIPSEAEVLKLEARYEAVTADISQELKELELEEEKALTRYHKSFGELRELCQKYNLKNSEWQNIIYDKREQLYQEAELEDYDKKIERKANLLNEEDKKIGILNSQLEGILKQIVSECGKGNPLEEEKISQKDLESAKNQTKYQLSELERKIAFSEKAIQKYRENLTALSEYNNFSADEEIHFEQDFKKMSEKELRDFKGMLIRDYNDIIRCVQKCRETLAQTLNKIARQEAFQDASYKTPLENMLKVCDDAAKVLRQLNITLESYDSLMKQLEVDISLVETEKKNVTELLEDYVQNIHKNLEKIGRNSTIKIREKSIKMLKVILPVWEDNEKLYSLRLSDFVDEITEEGIRLFENNENAQEYIGRKVTSKNLYDTVVGTGNVQIQLYKIEEQREQQISWNQVAKNSGGEGFLSAFVILSSLLDYMRKDDSDIFMDKNEGKVLLMDNPFAQTNAEHLLKPLMNLADKTNTQLICLTGLGGESIYNRFDNIYVLNLIEAHLRNGIQYLRPEHKKGEEVKVETILPTHIEVEEMLF

SEQ ID NO: 40568 - protein, 326 aa, Eubacterium hallii DSM 3353
MKKILLEKLLDNCKEQEYQKQYEYIINLLEEKKIKPVKASRLNGKSPALYREYWLLEETKDYSNFIEELRYQIIPDISVDYYLRHLESYEADREWVLQLNKYLKERKETLQFKVSANERSFEIWGREKFLSKGQGRRILKRCGLEMSFFNIYETTEPLAYYSRTRNVPQNLLILENKDTFFSMRRRLLEGNETILGIKIDTLIYGAGKGIFRSFEDFDLCVEPYMKAAGNQIYYFGDLDYEGIGIYENLSADFGEKWNIVPFEAGYRKMLSKAKGVDSIPETKEGQNRNIKDIFFSYFSTEQVKRMKEILEKGYYIPQEILNISDF

SEQ ID NO: 40569 - protein, 488 aa, Escherichia coli TA280
MSLGFLEQARNESMARRELSIQSHALLVVRTLDSIYSALQRNPFDGVELDALAAIMYLFDAMLYYADRERQPGMTRKEAELCLVGHLNEAYPGQEEPDYAQVASKIFAAIKDPFRLRYYDFSQRTHSEEQIVRLVRYDQLSGSDDILWSLTDEGMLFYTLRLDETPIERAAILAWRTLKTIRRGEIDKAVHQIQSTQRQLEQYLIGMRMKVRAAQSGDLSASYAHDIRPVLNDSFDKTREVLEHIQNSMSAITEMLVEGSSKLNPDKLNKLRRAQEIFAEVCAFTQRYQDCLLDVNKDFERARLKLIIPRDNTLFRETLEKGALKPLLSHSPDTVEKEIDDLTARLLAPRRQDDDRHILFDLEALLNLYLDRFEQALPHEIQDLTDQPVAIETNLQGIPESVIKKCSDWVSDRLKNWGHVSFRDVFDAYEGEELSEQEQQVCLLHIGSLAANSDPAIEVEIDDAIETTLWRANNIKLLTVAPLYPFEE

SEQ ID NO: 40570 - protein, 1478 aa, Escherichia coli TA280
MWLIKRVYMDGAGHEEAFYKDLTLDYIGLSQAVSSPVVEGLRSPVRNAKVVTSTYQQLVNGGGKSTYIALLLSIFEPSVSDFTQYLANHRQSEYHYRNYFYKELSVVLVEMVNESGQTLLLGHAHQRNGDDVDRTLFICDAPDSLMGAPFDEVPSYSRAERNSELRPYANSLRSFDSWLNLKVGSEGGMHWRKTTRQNEWRAFLLEQQINVDLIKTMVTFNSEEGGLTRFIEYKTEHDFLGAFFACTMSKDAAERLRELVAHEVERQGELEGIRRNESFLKDVLANWLAFLDPAKQLESNQAQQQLLDDGFREAMRDLAAFVGDAQVEQTQLEDNMDSLQTHIGQAMSLREQLGKRRALLEYDLVQHRFNRQKAIVDALQDEADTNQRQIEITHAAIDYKAYAKALNEYRQADEDLKVFQSETERPLQVIFERTVGEALGTLEWAIDRHRQQEATLEEELGQMDRESHVLRQSYDKIQKTLGGLETERDGYKRDKFQGESQRNELCEAGLIQKDETPVAAQYRLELTLRDAKQSEELANTILHQKEQALEAQLHVVREASIEKSEAQQKLILAEQKHQSAVDSALVLAKNYQKLPTSTRHDLDIEDTSWHSELCVLQLDKVLNANAQTLNGMKERLLQARHELDELRVTGHELVAKQVNEALEAFYAAGIARDKLWTFPHYLASAYNDDAQKIAAVIDQNPGRYLSLVALDNVTFEQVHKISEILPWKKAPIAIYLLDEAQDLRRETSELVQVVLSNPDKHGYSQAAYETRLQDLENTVASQEVSVKATESALKVLESFRNDWSRHYEQYGKHWAGLLDQRELALLILENADAALKQAEHDEQTLRDEKRDVQVRLNNAQQQKIQAEKAHDKVSLFVEKEWAKRETAIMKLEQLAAQIQRGKNTLYTQRERLERLSELEKNKRSEKTLLNIQIGSWSNLCNEPFYSDITATESMEGRSPEYAHEMAAQAHKKLLEAANGDQVTVLKQQLKDAEQAQRYASERLTAQPTYNTYPDEVKAAAINELTVINNRIVRLKEQQKQFTQNLISSQVTLQKFSQSCEEASKALDEDFVWEEKPIEIEAIQTSLAEIVNNLYAIEHQIKFLLEQKTLLLRKIENVKERLQNAKTAQAMIQPITPSSAAGLPGRILSITEYADDLAAQCQMYAGLNETLKQQNMRVSTVWGKFRKRIEEELAKDPDARASQEYLRQLDSIATYHEVLGDLERVGTGISQVFEAVQDSLEQFQRSIDLTVTHLTAHLEGAIKLLRRAMSVKIPEDCPVLPGRPIIKMTDRLNDVAADLRGFASSRLQQWIARGQIPRAPNRDALTADLVQSVFGEGELEVRLLKTNASRPQWTPVTRLEGSGGQRLTSAFLLFVTVGKVREYDTGISSAGFLLADNPLGKSNANDLMRIQTQMAKAYKIQLIYLTGISDENAQSMFDNHLFLNKVQKLRRRDLVTVDKERHALWAASLAAKPQFDPVI

SEQ ID NO: 40571 - protein, 351 aa, Escherichia coli TA280; identical to SEQ ID NO: 40489

SEQ ID NO: 40572 - protein, 505 aa, Bacillus cellulosilyticus DSM 2522
MEKLDLLEISSGYQERMRRLALFDALYELERKREQDQNNNVIDMKGLGLLTLLFFFEKKLMRQYKTGAMQLAYFIEELTKQKYKLDKSTYEKMARTIIQTFRPASGKKRSYSYFNWEKMKDEMIEYSILKANSFDVKTNTQYYTLDEDGLELVFATKEFYSEFQLSINQLLLRKQLDKGEFKGALRQINEMRIDVETLEERMIKLRHEIQRSIVSEETFERYKQLLEDIYSRLAREDEEFKELREFVKETKDRLFSKDIHKKEKKTYELILKINNELEKVHYDHSRLLDQTFKLKETTLITAQESLYYTGIQSFNFEHDIVSKITSSPLPIEAMIGILHPFLKVEETKMWSPLSILEEQNIIDDREDRPDDNLMELKDEEDTDKFRKKMAVKFKELMELFLTAFENNRAERLSSFMEYLIENKQEEVLKQRYFYDFWLILHQRSPIKMGDFEEEDGAQTILGDSLYLLGERKLTIEEEPGTIQKTARFSIQEMIIRLEGETNEIF

SEQ ID NO: 40573 - protein, 241 aa, Bacillus cellulosilyticus DSM 2522
MKYSEEKIVEAFKLYTVLARDGYADVVSLQKFKADDDIRSLLESFSREVESVIIRTSEQIYLVPKTKLSPFHVSNDWIKRNYLRSGATNGDIYLLYFSSLILFGAFYDSYQSQEPTRQFLRQDEWLRLIQARIEQLKSLDEETLKGYEKEFSYNWSLIIEKWDDMDDIKETAKKQTGKTISRFSFLDTVKRFLIDQGLVTEIGDGEVTLTEKAKTIIQRFFMEIEYNKGIFEFIYSFERAE

SEQ ID NO: 40574 - protein, 1472 aa, Bacillus cellulosilyticus DSM 2522
MPAISKIRLTNIVYEEGNKRYNDELFLFDGHNGAILLENGGGKTVLIQTALQAILPHSDLADRKIKNTLLLENAPAHIAVEWILSDRPRRYAVTAVSLFTTKHGLDSIRYVYEYEANDRNGIEGIPFVKEGNSGIRPSAKGEMQDYYSLMKEKEKFNAYTFDTIKEYKTFIEEQHHIISSEWESVLKINSSEGGVEAFFDDCKNTSQLFDRLLIPTVENSIAGHDANIFADMFEKQHSSLRHYKKLKETIEENKQIQFELEDYVKAFEGLHKSEQSYVKAKQNAKGVWIEISEQLDSLKTKKEDMSEIHEEWKKNNEWYSLKAESYEIRSEEERLSDLDKDYTSAASSHSEKKEQYHQALTDYYSYKFAELQQEKKEKEELLQHINSEIGKLDETEDLVEIEDEMEQKNRALLGFFHKQMEGLEKEKQGLIYERNPIINHIHDKSKEETRLDTDERKLQGERLKIQAYCESRLKDMYDLEQLLLANPAQEKVMEELPKWTSRYHFLDEEIILLNKKEKQLESDLKEATENKQEQQEWFSEVESEKKQLEYKIAELKKQEESVIKKLAIIRPQWGTLESIYFNEESINNRFSDQIEKLKKDRESLLFKERLAYRFVDDYSNLDTFFADAYLEGMLHSWKNQLDYIVTGVEYLQMLTIEERKMKESYPLWSISLITTKKSKDKLISKLDNIKDRIQYPILVLTTEEAVEIQENDDFQSWVAPVHWKTNSNPSTFIKWKEEIGASAKEMTDEREEKEKELKRWEQCYDSYKSFLQNYPYDMLMTWEGSLSDYKTKLSKISGDIGKLEIYLAETKRMISSNHDKKKQYQEEKQGLQMKMEKGTTYLQYSREVDKCLEKEKEIVESLAEITRKLKRVREELKSFNNEKVELDGRISRLEINVENLKDDDMYITVQSLIPLYTNESKTIILQKIRELEKKRDKIATTYGEWIERRKATSDAISKLANQMKVLKKEHDYIDEGRSLPTNSTPLLQSLWEKIEKLNADREKFSKTVEETLTKKENQKGKVDSLRDRFNETFPEKEVYLFSQPLNEVPILLEREKKELDERIQYINKQIERLDKEFEKLNQTMQELNRFSVAHHFNLPEVEAHLLNEEEKLAFSNSKMRYVQETTKILGDEKASVDMERRKVEEAKSEFADFCNRAITDVKMRNMALNGIKHKQTFEDIIVFKNNMVSSVQRATSYANEHIRQKDADLQAYINHIHSHLQTLTEELKQIPKKTKVKVEDDWKQIFTFFIPEWSEEEGKSKIRDYIEWILEQLESDRFLNDQGQQDHGKVRKDIEMWLQSKQLLQIVMNNEVMKVNCRKVTNDNKVSTRSFSWEQSNVWSGGEKWSKNMTLFLGILNYVAEKKQHIMPKIKRHRSVILDNPFGKASSDHVLSPVFFVAEQLGFQIIALTAHAEGKFLQDYFPIIYSCRLRASVNDSKKIMTKEKWLHHAYFQDHEPKTIDRLGEIEQLPLFE

SEQ ID NO: 40575 - protein, 337 aa, Bacillus cellulosilyticus DSM 2522
MDKIKKELIAFGKRTINLNELEEVIKPYKHTYEDFSSTILQLEEDNIISMVKSKGRTTRKPSLAKQYRIDKSALTENYHKELQYYRAQLDPSISIDKYYGNPSDWKTDLPYILKVDEYLKKNFYPTDKVPAPERSYELVGDEKWITENSGKSLLEKINVYDKLNIIPVSDPMMFAINPLKLAESKQLHIIVENKTTYQALLPVITETEFSTLVYGSGKKVIKSIEQFELQYPIKATHQFFYFGDIDREGINIWYSLTKQLEVKLAIPFYLECLKKEAALGKGYQKSNGEAEDKFIRFFPENVREQISTLLKNGKYHPQETLNTNELQKVWRESFWRN

SEQ ID NO: 40576 - protein, 505 aa, Clostridium lentocellum DSM 5427
MSIEARSVMEQFGERMKRLAIYEPLHRLDRKKGKDRSGNELPYYELGMLTLLFFFENMIMRHKTSGARELALFLYEVCHEKINLDEAGFEELAREIIEVYRPSNGKRNSRSFYNWETGQEETVYYSILKAARSDLKSNTQYYTLDEQGLELIFSSREYFSEFQISINQLLLRKQLEKGEFMGSLRQLDEMDLSAEALTERLAKIKHEVSRSIVSEETYTRYKKLIEDINLRLIRENEEFEELHEFVRLTKDSLKYKLDNAKDKKAYEFILKIDNRLEEVHHEHSKLLQESIALRTHALDAAQQSLYYIGIDSFNFEQEIVDALMGKPMPLCTSSTFIEPFLNLERAKLWHPMSIFYKQRIERVGEVDKGKAFTYGATEEEISKGKSKIGQYFKEVMSELIPLFEEKSVVTLEDICNQIEGLRPEWLEQRLFYDMWMILHQKSPIVLENLDEESLLNGIKEALGGITNSIKVMEYEGTVQKVPRFEIKNMLIDITMRQKEGERNEL

SEQ ID NO: 40577 - protein, 238 aa, Clostridium lentocellum DSM 5427
MNYRNEEILEAYKLYSKLAVEGASSLGEMRAYTREEHIEELMNQFAAQDYATIIIAGEQVYLVPIASSSPFHMSNETIKKLYLPNNATNLDIYLMYVATIILLGEFYNSYQTKEPTRVFIGMEEWLEAVNTRMETLAQIDKEVLQKIEEEQEYNWIKILEKWLALDDVKEKAKKLTGVTASRISFLNMTKQFLEKQDMIKDIGNYEIEITEKTKVIIQRYYMDYEYNRGILDFIYQYS

SEQ ID NO: 40578 - protein, 1474 aa, Clostridium lentocellum DSM 5427
MASISKIRYTNVIYENGGKRYNDEVFTCAGHNTAILLENGGGKTVFIQAALQAILPHTDLGERKAKETFVLEGNAAHIAIEWIISNKPRRYALTAVTLYLQNNELKSYKYAYEYGVEDKDNIEGLPFTREEEGVTRAATRVEMNEYYQKMSKEHIAAKTFVTTKEFHQYIEAAFKIIPEEWRSITVINGGEGSVEAFFDGCKTTSDLVEKLLLPTVEEGLVGKGAQEFAGTFESQREHFNKHKQLERSIKESEKIKAEIESYVTSFSMYNQKVKEYEAKKEEAKALWLLIEDKEAQTREKLTACDTEKKQLETKKRVLQKEIALIEVEEAKEALDEARLSYEKENEAYEKAKEKKEEKEKRRHALKLSRFQNNMNEARAKIKLYEEQLALLGEDTEVEAIKEALEENRGEIKGYFEEQLVMLQKELGHCEREKERYLEEQQEQEKEKKQLGEKLQKLRGDASKLIGKLEHQEKQMNQIKMLIVAQGASEDIEGQEKKWKSRLAEIEESKLKLAQNLRVLEERQVELNQIIGESTNKHTKVLREASRTSMQLQQLEEAHEKILVEIKKVLPAFYHLSSIYLKSSQVITALEEQVEKLIREKEEALLLERRHSHFLENYEGCDFFTVEPLLELWVEKWMNQFSFLQTGTAFIASLEDKELKQKMYTQPKWAQLVVVSDGSERELISLLEEQTAKMTYPVGVVTLSEARALLEQEKQVESLIYPTAWSENMQTTFFEMHKREAGKALEEAMAYRRQKENELREIDQTLEKVKSFLETYSHEKHASLREESDGFKRQEMELVRNMEDAKDKLMKAQKEAKLTSETLRKEVEEKNRLQGYVEKATEYLGIKEECDKEEVRIKMLQETIKEEESAYSKVEYALRNTLEALEEAKENYSLLRSSESRIVDDPLYKEVKDEKAIYSNKDIVYLRDKQEQLKEALDNKQKGHSEIESLLKHNQKVYEENEKSFRQEQAEREKRLESIPVYREAYAQEMDRLSEELIEVRKQLEELDEQVKLMKTDFDKKEQEYQSKKEAYEVSYGVISEEATQSLQDKERLLRTQVELAEKEKYLVKQTAGLERELKFILDNKQQMDKKDELFGYCAPEVKVGILDEAVEQEFIYDLKVRVIVSHLLESLQQLKNGVEAGKKVVEEKQIDFKLFCQREIRDSKLRNMAVQGITQKQDYDALVVWKENIVERINHTLTILERDLIDQDQQISQFIIHLYAYLKTVASELTEIPKNTRVNTEEGWKNIYEFVIPSWQEDSGKEKIRTHIYNLLDDIDGDSFLDDTGKEDTGKIKKYIKEQFKLRSLLKVVMGNDAIRVRCRKVSNIGDISSQKYSWETSNKWSGGEKWSKNMALYLGILNYLAEKKQNIQSEEQKVSRAVILDNPFGKASSGHVLEPVFFIAKQLGFQIIALTAHSEGDFIRRYFPIVYSCKLRSTLDQRTSVFSKEQEIKKAYFMDNDPVALSILGSNQLSLFV

SEQ ID NO: 40579 - protein, 508 aa, Paenibacillus curdlanolyticus YK9
MEAMDRNELEGTLAGFQDRMSKIALFDPLFELQRKKQMDLDGQPIAMMELGLLTLLFFFEQKLMRYAKVGVKDLASFLNHLTAEKYRVELVEWEELSRTIIQVFRPASGKKREFAFFNWENLEQQTVYTSILKANAFDSKTNTQYYALDEDGLELVFATKEFYSEFQLSIHQLVLRKQLEKGEFQGALRQINEMRVDVESLQDRMIKLEHEIKRNIASEETIHRYSILLEDIYMRLQRENDEFEELKQFVKETRMRLHADMNLEKQQRAYEYILKIASELEKVHGDHSGLLKQSMDLKNQALHSAKESLYYTGISAFNFDQDIASLVMGSPLPTEALKAVTAPFMGLEQTKSWSPLTVFAEQSITGQNEQEPREDAFLEVTEEEDINGFARNRQSFFKVIMGLVVEQLERYESVELQQLFNILKNNGRSEWLTYRSFYDFWLILHQRSPVRAVFSNQDSWDTSLAEVFSLLGRRVLLVQELPQIIADDATRYQIQNMKLSWEEERDAL

SEQ ID NO: 40580 - protein, 256 aa, Paenibacillus curdlanolyticus YK9
MLYNDDKVMQAFRIYTQLAMTGSAEKEVQKAYMVDDQVRGLVDQFAAEVDCTVIATGEQLFLIPLVRLSPFHFSNDYMKKTYLRAAAVNADLYLMYVTIMVFIGAFYDSYQSLEPTRNFIPLDEWAAIVQERIDSLREHDEEKLKLYEKEFSYNWSAVIEKWDTMDDIKETAKRQSGNTISRLSFLDTVKRFLVEQQVAEEVGSGEIGLTEKTKVIVQRYFMELEYNRGILQFLYDMDGSKKMSEEARDYARNIKN

SEQ ID NO: 40581 - protein, 1476 aa, Paenibacillus curdlanolyticus YK9
MPAISKIRFTHVLYEGGNKRYNDETFFFDGHNGAIVLENGGGKTVFIQTALQAILPHTELAGRKLKDTLLLENGPAHIAIEWILNDKPRRRYAVTCISLFLNGNSVDSYRYVNEYGEHDPDSIDRIPFVKENMGRTRPADKGEIQDYYSSMAHRHHLKARTFDTIKAYKGYLEENFHIIASEWDAVVKINDTEGGIEKFFDECKATSQLFDRLLIPTVEQAMEGFEEDRFVNMFESHREGFKRYKDLKEQIEDNNGIQLQLIQYVKLHEQLHNAEVKYDEARKEARTYRELVQLQHRELQAEEARLIESQHNWKSHHDALIRGEKSLELAEEEQERMNAALILVQLREESDGLQQRRIDAERHYYSGQYAELRVKAELAKSRRVELRNNLNRMEQSEDEQQIHERWEQAGGQLRTAFEQDEKRISHNLNEQISELSTLKANQQETEKQLKRIEAEIRQWEMQVGQKQSKLEEKREYRNKLAKGILANPVLEKVEEQMPIWSARQQRVEMERLALLERSKILAAERGDIIEQQKANEIKCRHIDRQKTVNEQQMNHLEAEHLNVRNELGNLRSDWDRLLSVYEKLTSITERLHDGIAKRQDQKNYLMLQERYAFRYVDDYNDQQLFFADPSIERRLQSWKRQFSMLQTGVEYLAGIEIGKQLEIADRLWSITLVTIEADKAALGLKVAEADDIVFPIRILSVSEAVSIIQGNLPHMEDRWVVPGHWNYNTDSEAFDKWKQSLQEEAMSVRTNREKKEAELEAWWRTEQSLTSFVATYPLIRFNEIDKSIRESREQLIRLSQESVKLDHRLNELMALEGQFRSDSEVMQAEIQQLGIWLRDGQQYMLIGSEMQKLEEEIVPIKEQIAGLRSQQRMKDFQLKRTLDEREGIEATITDLKIGLQNLKSNELYQAVQSFAYVNTNHTLIELKEAYKAVDRERDGIGRVRSQLELEYNHEQEREVQARTGMTTLLREHPNLEQEAQLPADMDTFNKEWWERVEKYREQAKNAGEKFSDQHMQLMKIEATIERMLKEFGEQFPGGQRIQFDDNLFDVKNNLRLKAEQLEQEQKELKQRSKYIERHNRELDSVLQLWNQYILLHRLEDIRLAPAPIEEQHRREFDYARMDYTERSIHLLESCKQAVDKEQMNVRKGIQSMKAYCLEHVKDIKLRQMVIQGIEFKETYTDIMEFQQVMETRIQKAIHIMTETIQTHDRELQEFIHRIHTHLKQIANELRELPKKTRIRTADGWREIYSFFIPEWDNHEGKERIREHIEWILIQLEKEQYQDEPGKDIQQNVRKSLEQWLDSKQLIKAVMKGEAMKVSCRKVMNDYQVTKAAYSWEQSNRWSGGEKWSKNMTLFLGLLNYVAEKRQFIRANMKLHRSVILDNPFGKASSDHVLSPVFFIAEQLGFQMIALTAHAEGKFLQDYFPIVYSCRLRYTTDSSKQVVESTKQIRHAYFKDNAPQTLERIDGRAGQMTLFDF

SEQ ID NO: 40582 - protein, 350 aa, Paenibacillus curdlanolyticus YK9
METKRIIEHFLQALKKTTITLEELEALFSGVRIDWNEFSTVLLCLEEDKTLEAVKSAGRTTRSPKLAYRYRVNKHLISSASRNLLNMDQLAYHSSVKLDYYHSVSVQEYEQDKQWIARIDQYIKHNGFPEEAAPAPERSFQLVSNEKWITDFGGETLLKRIGLWEQMRIYPVSDPLMLAVNPGLFDDPIRNECTHLIVENKTTFQALLPVLRDTAFHTLIYGCGNKITGNIDMFPLQYPVNHCEHQFFYFGDLDYEGIRIWYETNKQRPIRPATIFYEALLEMPFVIGKDNQRRNDASVQAFLTHFTQTQCEKIERCLTFGGYYPQETLTTSQLQLLWRREQWKQWIEMN

SEQ ID NO: 40583 - protein, 339 aa, Bacillus cereus 03BB108
MHTLIEDEKKKIKKLQNTIIKDALGVSQRSELEVMIKRIDETLKAEREQFNDLKNLVEEKIDEFYEGSLTEKEQEGIHIIQEIEGKLVQAISVHESLFTEKQKTQNIMSESLESSIIHAFSVHLDFEQEILRELVETPATEEVLNAISKPFLPLRHHKSFNPLLALVPQKRYKKKQLKEEEIVEVDEEKMRLQEEEEARKKEEIENKEYRYITALLKHLVEKDKYLLSDIFQMIETQDERLYEDILYNPDPLLGLIAELHQSEYNRFEKVTSDVWKNLPDDKKINRMLIRLSSEFVTLQEIESFSLLETGRSHYIGTMKYKDMLITRGDFYGVDRRNRK

SEQ ID NO: 40584 - protein, 250 aa, Bacillus cereus 03BB108
MEWTEEIVSKGFTLYVALSKKGFITSKEDEYFQWYEERAVQDFIRKVIEPRGKVMIFLDEQDGVIQMVPEVENETMSYTNDDLKKELGFKDNKEIHLFYFILFILIAELEQPYDTESADRMYLPMEELLDKMNGYIGQYERLGEEKLEELSDEYDVDVAGIVEAWGRMADFKEGATSHIRTKDNRRMYIEKTLKFLEKEKLIRIREQTNVSVTNKMKNIISHYYHNVENKSKIHDLLLVTKEGTVGEEEE

SEQ ID NO: 40585 - protein, 1457 aa, Bacillus cereus 03BB108
MPRLMKVRMTNIQLDEGKKIISNSLWEPNAKDALFILENGGGKTSFIQLVTQTVRPNSNLSKRLLKEVVYKGTTGHIMTEWKLDGENLPYEYLCLGFTYMNGETKTEELNYFTYLFTYNRGDTLNINTLPTTVDGKVTRLNEYRKFLRQNDIRIFDVNRDYKKELKRFHLIEDEWKMIQKINGDEGGVDNYFKTASSTYDLLVKLLIPEVENTIFDSEEKKKEIQTYFKEYSKNLLSIPDMKRDLDDFQRIKNGAEDMVKAVEDFQVKKKSFAEAQKHVVTLKKSIELQIADKKEKTHILIGDIEKNQALMHEADWKIDSYKAHILKGQIEAKEIELAAVENELKMKTEQLKQAKALLKQLEAKKEYGDYLDIHKKVLQLNEDISSLTASEPELEKRRNESKTLLTEALNFLIEEQQFALEDINTNIKFTVEEINLKGAERKRLEKGKLDLYGEYKDAKNDLSNYQKGKQKLIDELGEEAGYYPSIKFKSLSEQQKQSSVTITQKEEKSQLNEQEIDEKREFVTSQRIVMQNKNNEITSLKDEHTTFEKEKHNLLSLLSDDGKNTINIFEDMQELLRYYQYQKVETERKIDELKQYIHDLTQKLNLWESYDYFVPDETLLKVQQHLEQKGVITMLGSEWLSELSSEEMKNQYLNSYPLLPYTLLVEEANLTEVKKSLNSLNKELLNVPLLFYVKSKLQIQTKSVDAKIDELFPLYDELYLYHQLDVQWFASRAKIQEIIDGLKMELSQYKEQLTFAKTTLNNYNEILTALEAFHTSYSSTFSESNMQAVQKLSEDIKEIHQQINDINEYIKMLENENKLISEFISDEKVKIAKRDSHRTLLQSFMDLYPNPEELVEKVKYLKDQHDQYGTKVNLCEEEVIELRETLDRQKDKKRNIQSVMDGLDKERKQYQLDEKLEPSDSYTSEEKNEYVACFTAVQKEYADKDQAKNFLEESLSDKKTELLKSEKRINNIGFALEEVKMFYSEEINLEELITKQKETVKTLSISAKDIEVEKGKVEENLKGKTEQLVLVKKEIDDEYGKEVFLYEWQHEEEFNCFKQAKEQLGEANNELVTKKESLGNSITDAEKAMVHLQIKNLPLYNERFGLILEEEIISKSKTYQKYAQTHANEHLTKLQKLEESKKGVYLSFETYLKKIQESNNPKTEQFANGLSKLKTSDQIFELEFILESFNRIFDTINAFEEDLKRKITECEKDKVKLVDLCFQRVEAIYKNVTEIPKFSKVKVFGYELQLIKMRWDRFDDETTHSNLHYHVQTILETLQLMKRDNKLENELNEYLVQKLDTVVLLDKIAPIKKCFVSIYKPRKKSLMTTSPENWKPWDEVSKWSGGEEFSSYMSMFMILVTYLRKKVNARDDSWKVIIADNPFGKASSEHVVKPIMELARNSKIQLFCLTAHNNEDIRSHFECVMSNRYYNTVGIELLQVEHREKGVSLGMFAYEHD

SEQ ID NO: 40586 - protein, 358 aa, Bacillus cereus 03BB108
MSKWEIFIIEYMNKYGKKIVKTVDIEHHLKILLKQEYDDDGGYFRFSSTLKNMVEEEKIQPVKARGHNHQTPSVFNEYRLVKQERRMNPTHIKKLMTDYPLFNMTAFYDEAEFEKWKFYIDRVHVFLTHNSDTKKNMLKANERSFELFRNEKFLLDKEGIKFLANLGLALSDLNCRRTYEPFVEYQSDPSKKPKNILIIENRDTFDSVKELMMGGVDTWSGITFDMVIYGEGDKIQRSFYFLEEYKLEDYEVYYFGDLDARGIHICSELIKIDSRVKPFTPFYIALLNRYGHEPLTRTIERKLKQAIIDNSLKVFSAFFEGDYIDELKKYTKINQNVQTYIPQEGLNLAILRKLGERR

SEQ ID NO: 40587 - protein, 515 aa, Eubacterium cellulosolvens 6
MLRSDIKEMLADFQNRMKFIDIVRSITVTSYPDEIKKMFGGDYDIINNLVVAVLLYIKERTLSDMQSCTLKDIAGFLDNLLPVIPEEYEVDTYKLAGFIVVNILQNNGKLIEYNTFFADKEEFKKMPVRLVNEEKGSYHLTDDVFDFLYRSKEIESELDYSVTRFKMQEYMKRKNYSEALSQSRELVARLRNMSHSMDDFILRCRENIAKITVDEYERIVGQFRNLMYDEQKELAEIQQNARREAETIRKALDQGADTEEARKNLKSLEEINRNLDITILEQRALINAKSSVSESYKQMLRDSFVIKSFERMNFEQDIMAKLRRMGDGLGDAVRVFMEPLIRPELEKKFSIENFYAACGTISEEEEDSGFRIEDEDSRAEELDRERNQRYMEICTAFFSYLQREDSFEIKKFIRSLSMDELMRWNRENALPNTLMTIYQKKVIDVEALHKEGNLLAKEPLGEFDLLWVLGNLPRNYLDMKKILFFTSDRKCEFTVEDGEVSMTIEMTNFTVEVER

SEQ ID NO: 40588 - protein, 235 aa, Eubacterium cellulosolvens 6
MNTNALRLYHELMKKGWIDRDENSVLWSFVEDPEARDALDQMGAELGFEIVPAQNRIYMVPTQDNDLFLKNNVDYRADIKAANDVRVRDLYLLNYLAIYVLFTFFKGEGADALVREFITKEELLKEFTKHCLNATQKGVDGEEKAEDFSENFFMLAEDWLGKKEGDPSSRRVEDRYGVINKILLKFRADDLFLEGDDGRIVPTKKTKDLMPYVLRKERVQVINAWIEGDENAADQ

SEQ ID NO: 40589 - protein, 1459 aa, Eubacterium cellulosolvens 6
MPQINKIRIVNFSYNDGNRFIPDELYDLSSGGGEALNSLFNLNNGGGKTVLVQLMMQPVHPRAMAGGRRIEDYFGRPGDHSFVLLEWNLDGSDNKLLTGIAIAGSTAAGGDEKQRGNSIRYYTFKTIYDNSASPYSIAAMELSANEKGKYVPASFEYVREKAKNSRGMLEYYSSDDSVKWAKELAAYGIFRSEWETVIEALNKDEGGLNQYFDEAKTSDKLISKFFIPAIENKMKSAEAKGTDSSLETMLINYAKKISEKENVIRERDTNRKLLGSLSELEEQSRELYKSGEELADGIGKVCAFKAAVGRKTDELGENILNKTREVQLLEEQIRHIEHEERSKEFYLAGEEFDASHLAFSKAGQALERAREEESAKKHEEDVLQSARLHSQILCEDSDISSYKTLIEEKENNSEDAEAVAKLKYSVYVKAGREKDELTQKLGEMDQQIIQQKEKLQAGIVELEKSEKEKDEVRENYDRIRAKLEVSKENTDARAEALGLAAMRMLDGFYSGSEIEEERKQKEEEREKVTASAAKICEERSTLEERKNAIPEELADVKLSLGKLETVEKQAEAELSLYGERLEELVQICDKYSLEAEAVFSGRLGRVLQEETETTAAAVRKQQQDRQSLEDRLKAAGEGHVHVLSDIMKYVISTGLSYQTGEEYLTALLENGALTGEKVEEILTAHPEFAFSLLFNNEKDLAKLLSAGNVDWLPAAVPLFTMEQVNELMEGRGDTGSHLAAYDKTYFSDRAGYCDRLEAEIREKNERLKRLQEKLSVCEAEKKQADDFSYPEDWKALQEKKIQELQEKEGQLEEKRKSLEEELERIKEQMIALEKELESYRQTLQKLEKWLESFEELENMLSREKEWYDRSQEAYGVLKKAESNYLAKQEEHKKAVEALSELENQRRQQAEYLAYVETVLENVDTAKETEIQEGTLEELYSGYRTLSGNLSESLEQLRQKLAGAQKNKAGLEKELADYGCERTEYEAVRFSPEALKIVRDAFREASEKREKAQAVYVDCNAREAAARQRHEAAERSLEEFEGEALPQNEIGADFKKRIRAARQEIRKLEEIRNTLGEEKRALERIYDSVGIVLKSYLSVERTATVELSGKPGAQWQELHDHLLQKDAAFKKLKEKMLSGIREIVGEYRNIALFEIVNKLGAISEMLEDSGIRGDRLYTVSESISAMVASIEKINSKIETDLKEIENDFNDIVDQCMNQGKRMYLDLRMIAASSRAHIFEGKPQTQMVKMNLPEEKEISEEASRISIRTEIEQGANEIRELLRNEAEEKQIRKRARAIVSSERLLHKYIRQESIQIKVFKIDMNSANSVYKRWEDTLTQSSGAEKFVVFFSVVLTLMNYTRSSAGLVSRNTRSVLILDNPFGKITSAHLLKPMFDIAKHFHVQLICLSDINKSDVVGCFDCVIKLVIKAQSLSNFEVMTHEGNERIEHGYYKIMNGQMSLF

SEQ ID NO: 40590 - protein, 349 aa, Eubacterium cellulosolvens 6
MNVRERLVAYGRKTITLEAFKAMMNIGAMDEKTAYERISGLLEEAALEPVKSSGTNGNVSYPLYKKYRILLKIDADGVLMEEINRLHPLLLRSGYLSAEPAVFQTYTSEIRSLSTYLFREKEEIYISRKERSYEIFGREKVLDDSGIKALLRKLRIMETDLKFYDTPEYCFHDYIPVRKEKMTLLICENKDIWFNIRRCMFEEGTGKLFDTALDGVVYGEGNKISNKKGALEEYVKFMGNPEVTLLYWGDIDREGFDIFRRTREANHGLKIELFVAGYRTMMERARNREIEDSPSSRKQGESFEDLIHAFSPEEQIFLRDIFDRNKLIPQEIITYKDLRNDWRKENASF

SEQ ID NO: 40591 - protein, 452 aa, Variovorax paradoxus EPS
MFQLERSKALVLEADGSSPFDGVDTHYLALSALDHMMEATTISMGSMSSEVLQHVADTAARMRPSLTLTQAQRVATAVLDALDNKANKHREFEAEYFDAPSGSVRMFRFRLVQFQPDPQDVYRYTPTAEGYLVYLGMLDLSPEDSQELMEKMLDLLVRRGRFEAALDIARRARKLSIEFRQLISDKLHQAYRAPSSVNWSKEMQGRLAEARKHVSDRQAEDFRMEQAVGDALHEATELHTRENLVLLRETLRGAGDIRMKLVRDISASNELFIAAQKAAFRARRPMGLPDLESVIFPNVMQLHSPVLLAEADNFLCALYPPQPLKMFDLNTAFTILRETRTNDTPSAENEGELEQFNPVPDPFPKALVDEARNWLAAKFETDATWQADFLLELAREDGLSAASQRCLVFILYQSFAQSESTFEGMASRKSGEEFILDFVRGDNLEFFKKDGQ

SEQ ID NO: 40592 - protein, 1463 aa, Variovorax paradoxus EPS
MQRISRFYLGHCGYRTAWFDGEILPLTDPITDAPTDAILHLENGGGKTTLMSLIFSCFETEQNKFLKHLQEANNRFSQYFDQTGIPGFIAVEWVLPSRTAKGKPIRLVVGQAVSVRATVEPADVDRIFFSFQEQADLRLENLPAPRLGPTPAASLAEVSRWLQEQKAANPDVFFVKNQAEWKRHLQVDRLIDLEMLQMQVGFSAQEGGFDAFIRMKNESEFIHRFFSLTLDTTRADEARKLVVEVCEKHSRKPEYQARHSQLTLFRSQMSTFADASRAYLDSVAQQGQIQLQGALTSLALQKRQVTSAEAEKEHRREEQLQLQIRQLADAEGGRLAREYTTALHVLHQKKQAMAKFEREAADKQVNDLQDKERFVRAAVLQKDILACEQRIKDLEAVAEAQAEGLKPIKDHAEVQGSLLRAALFLEETRLTRLLQDLTTKQKIRHDLRGTLGEARDDADRKERALAQEQSNLNGAEARRAQRLDAFVAEGLIESVERDASAAAVNWQHAVVQHQRDRESHHATRRQQRETAKQLRRESRAETERAVQLEQDVRRLQELIAQGEHAREALSQHPALTEAAEADLADPFSPILHQRLATLVASYSRQIATIDVRYAELNLTKSAIESTGVAGAGAEVAHVVRVLRDAGVRSARPFNEYLAETIKDAERSRALVQSDPGRFLGVCVARTEFEKAAGVAWTGRLPRKPVTVSVASLDPAAPQADRCVVVAEDDSAFNTAAAAQLAPKLAAAMDADSQERKALEKRYERCVKAQQELESFLATYGEGRLAEAHAKEQVTAEDSQATRARAASLDEDAVRQEAAAEESEEKARQSEEQRAAAAEAMRRVEEFIRDHDAGRAQRLHRLGELPALIAAAEEDRAAAVVELEELMVEESTDATVRAEETVKRDGMATERGQIEYYDKNYDAAKHLKEHPRALDILRGQYKDAASIYRTKEEDVLGKLHEKLQSERDKKTEKANQFAKTCKGVTATDMKPYLHVDHDAVLRETSSEMEQARGTQVDKKTIEQLAIRDAERWYASNKSLVNAPPNPAIVAMGVDDLQGEVARLDELHRVEVTRSETAIEAGKRARLRAEEKKSQADMDQNADQMLCGALGLTEQTTVVQIVAETHALTGLTLDAGDPVVLEQPAAAQVAALGRSYGQKGAAVKKLGNKAREEFDDLKQAAASPDFAKADAAVAQQMQVNSFEDTCRAAEKILTALDDRISTTKSTLDTMQADFDACIEEVTEVVRIAISTLNKATSSDKRVPAGAPYIGGKQVLRMRANFSNINTDLRKQRMRDYLDILAASKAIPVTGTDLISESVMRVYGAPLGIQMLKMSVEETEQYVVVDRISNSGGEGVVMAMFLYLLINELRAENYASVQKSAGGPLLLDNPFAKVTSGAMWKAQRLLAASMGVQLIFATAVEDYNALAEFNRFVRLRKAGPHTGTRRWHLEVANYTFTPKHEEAPAT

SEQ ID NO: 40593 - protein, 334 aa, Variovorax paradoxus EPS
MNTFLKNLRTCPRRRVQLDEIRRHFYAAFPEVQDSAQRGAQLLKGLQELEIAGHLKLPARGSWESFGQPPLPLWITLARIPQQAGRRDYGTVAWAPELDFWPRLKAPQLEALMPVNDFLLRRRGLLPLVPAKERSLEIFGDEKRLERMCQSGMLFGKLPLSALGCFQVSAPLPYRPAVAPGRPALVLENKDAYWSFGEWNTTANYFSAVVYGGGEAFQSTGAALAQMMREVRAGRALYFGDLDPKGVRIPLEFNRKAAPGQPQVSPAIELYAWLISNGVRRPKPECTEAPFDLVATWLEEPLASAVHAIWRQGDWLPQEALGSETLQQGVIPLS

SEQ ID NO: 40594 - protein, 506 aa, Bacillus sp. 2_A_57_CT2
MEEMDVNESWEGFAQRMQRLNPLFELGRGMEVGELKPHIQTILMQVLLTIFYRELNDDDHRRKSDIKYMVEDSIKQMKLLADEKQVERITSGLLYQGKEEYSRPFEALYYDEIRQSWETQVFRYVTMDELYTNLEIGGSIVYKLTDVSQEMIFMSREMAEEFSITIEQLYSMQLIKNGNFRKATRNLDHLISRVNRLMAKEFSFQKEMINNPKILLMEEEMQRADNRAEIEKQFEEEKNHFRTISSMIEKTKRRNEEDDLIQKELILLQEKIGHTRQLHDRFAKLVIQNISYEMKLKAENPSLFWETSLVSFREHIYENWFMKEGFSSFDRVEKVLGPLFSPRNEFILPLDWIWGEQEFDEKQLTEVMEEEAQEESIIHQRVTNWDSVIKAWSYVFQYLQTYGEFSLADLTTLPLEVQDLWFEESETIDLWMMFDKKPLKVQVLHRKEESLSDEREILLYKLMQEYPQFQVFEGLKIYTEFDHRAEPFLWYQMKITPFKICVQEEK

SEQ ID NO: 40595 - protein, 249 aa, Bacillus sp. 2_A_57_CT2
MMSADSIKKASAVYFTLLKDKVIDENSEHFQAYFDPDVRQTVLLLADESGTFIIESPKRIQLVVQPTGSVFATNFTHMKDRHKQVETKKHFHLMSVVIMAFLASIDRSQAAKIRTKREGISFYTLERQVNDVIMNWDSILKVKQDFGEEEKIDMKDVVTTWKYMEVDTDDYGSKKANRRTRIGLIASSMRLLETEGLIVILDREDIPKAIPKQELFERIEYLYHDYDRYEMFKELMTTEEDQHAENPSN

SEQ ID NO: 40596 - protein, 769 aa, Bacillus sp. 2_A_57_CT2
MPKIHRIRIAGLKYDGMQKQYKDTTFNFHNEDTSTNGLISMMNGGGKGVFLQTIFQILKPGTSWGKQNNRYYQQFFFNNKEQFIPYTFHVLMQWELDGADCRHLVTGGMFSAEQRISMNEEGGEAKTLEQEAKIVPNITFYTREFERKEEASLEHIPLYEDGELADTEGLKDYLKWNGYDVYRDTKKHYRILDTYGINRKDWDIMKDINKDEGGVGKFFEGAEDDHSLFQKRIIPTVSQILHRTEHQKNDLVEIFKSQASIAKDLPVLLKREQAHKEFLEDIIPFEESLAKGIKHKEIVEDSIKVGRQLLGALEHLKKTEEETLIELEKEIEKLTGKQVELRFQKDNLEYAKAHREVLDWEKKLGEEQKKHTILQETVKEKQERKDELAFHLLLKEWHEGEQSIRALSQQIVKLEQNSGLEQVNQRMDEIKKEAAQHWEKSAAAIREAVQHYSGYQKFLKKKTNELSKQDKQKTREIAQLRTEIDFLYTKIHEFESKEEQLIKEFGDRLTYDLQGFIENLNKQIESKKEALEDLQAKEKQSNEKQNQLASAHGTLAQSIQFSEEKCKELKMKSEEMHRKEAKLYDKLQVVLDDVSAQFTNALLSKYAQQVEELLVQNREQGEEIKKALWETQLDFALNDEHFWIANNDVKELKEWIDEKTGIDVFYGSQFLQSLKPDEMASHMLTHPLLPYGLVVSRPQWEKVNKHVLAGRMFKSPVPIFMREEMAGENQQNTFVMITGTEKELLTNKNQFTNWKIKIAKEIEEKKMHF

SEQ ID NO: 40597 - protein, 361 aa, Bacillus sp. 2_A_57_CT2
MFKKVKKINIIETRVRSFIEDIQHPKQKKKLNINDLEFQLRKLLDDYYEMDGYSLFYEAIQSLQDEGQLTPIHNNQHNGKTPSLPLYYWVNVKAQADKWDRLGMMKLSDLFDFSFYERHPEWQTKEEWSRIQSLYGFLQSSGEREVVSLEERSLELFGHEEFLHDGVSFPDGKGFLARIGVSEEQLKVVKYGEPFVFWMKQGKEIKDIQRVLIVEKLSFFHTSIQLLESDLLDYEPELIIYGEGTKIERSFSFFFKIFPAKSYLLYYAGDLDAAGYGIMTRLIEKYPDCCIQPALKIYRKMLECLDQRNEQKSGQLQNLKYRDAFFRWFTEEEQELLMQLWQEKKRIPQEVLTIETWRRWM

SEQ ID NO: 40598 - protein, 498 aa, Bacillus sp. 2_A_57_CT2
MDLMDYQNIGERTKRLNPIWHLGRGMDLGPELNPYREPICLRILLEIFQREVRDNGNRTIPNLEEIADSCIRQLKLQTDKEKNERLIEGLIWSGNPVYLSSFQAPFFNETTKEWEEHSFRYLEEDMEFSVPEEQYYVYKLSEESYEIIFMSHEILDELDIPIQSWVALQLIKKKNYRDALDRLQQLIIRVRKLIRKEAEYAENLKRNPKIINQLPFESGEEHKEKVQQQFTEEKKRYLEMEKLLSRLEDNPEVEVEIYILLDKINETREQHDLLAQLVIENVKTEIDIRKNHFEHLWKRPRISFKEAIWEELILQKGFKNPDDMFLLLNKIVSPKKPFKYPLDWSIEQEVTLPAIDIDDEDEPVVDEDSLHEPPLDFKPIVLLWKPVFQKLLQYGEVHLNTILEGEETKEEWLNQKYAVELWNQFVNSKLKVSKEDLLNSTDQRVRLIRELIHEDDVFEDLLNKEIITHFDMNDLLTFYLKDERGLKITNYRIELKEA

SEQ ID NO: 40599 - protein, 246 aa, Bacillus sp. 2_A_57_CT2
MLTMESVDTANEIYCALIEKGALKDSDSLVSKYKDKDNEAVRQIIKNRCKKEGTDVLLGKDYLHLISTENSVYCTSFSELRDKYYSIESKKYLHLIGLIHLTFFSEANNEMTSLQLNWLHNGISYYKLIDQVDRVISQLYEKQVQSNGDFSKEFSIAIDDVYHLWKRKDTDKPNRQRIAPSNKTKFGLVHTAMKILEDDNLVFIKVVKTSAQAIPTPLLHERLDLQFNNNVNFQEIKQLINETKNG

SEQ ID NO: 40600 - protein, 638 aa, Bacillus sp. 2_A_57_CT2
MDTLMAKARIVSLKYNKMQKQYKNLMFEFEQDEKPVHALITLMNTGGKGVFLHALFQLIDPLIRWGKEDKRVESFFFKQKKKFAPYTFHILIEWKVGSEPHTKLLTGIAVTAKPKLGYKNDGSPIDLEYITYVSEHHEHSPFDIESIPLWNDETETALPLDNLKTYLKRHEGHVKVFNRNQKREYLQTLKQYGIDHAEWKILKSINKDEGDASAFFAKANDNHSLMSNLIIPSIDKQIEPEYKKTYQESKSLAETFKDVAIASHEMPKLLNREFTYRIMKDELTPLTKYLKKCAEIELQLKKHRENGFILKEFMNKEAEHKSRLNAHLADDLQKIEDELKELKWEATNLKYAKTFSTIRELEDELEELTAKYQDIQARIKKEEELKLAFTLKLRLHERDYLRKQLNEQVEKANELKRVLKVDDLENEIARNVGSIKNQWDKTRVAWTETKREHVHYMNQLDQELNEHRSHQKSIESDIEKLSTTLVQTLTKMDMHETHKKELKNRYGDQFVEDTYRYHKEMKEKKERLLQKHDSLQEQLTNLLAEQKSLQKKSGETETTIVNLKGKIDSLSQEITEKQEEERELMDELSGVLKEKRKVIRKKPLYCLSKPSSSLPLKPKGQLKPACKINGNGKTNTPS

SEQ ID NO: 40601 - protein, 352 aa, Bacillus sp. 2_A_57_CT2
MYSALLRIVVEIAKKKKTKSKISVKVLENEIQKSYHSHIDYMEAGGYDTFYQAMQRLTKEGVMTPIKASPLTDKALPLHEYYWIFGKRKTEKWDDAIIFMLSDEIDMHKYRSFPFLQTKKNSSRLLSLYRFLKSIDGHQWINREERSFMLFGDEKFLGSPQGKTFLNRINLTLDDLKIEPPEGELEFWQSPRFEDKPSVTILIVENHATYKTFKKCLKVGKWDFSHQPDMLVFGGGNGIASTLSHLHAYVKGKDVSIRYSGDIDPAGLNIFYTLVSRYPEYQITLAEDIYLFMLQRKDRACQQETLQKLSRDARDYIQENHAFLFKRAEDLFLQNKRIPQEIINSDTIYESG

SEQ ID NO: 40602 - protein, 465 aa, Paenibacillus larvae subsp. larvae B-3650
MRDISYLSGVLSDLGSQNAFQTPAEILKFLRIIQLINEEALGLDDQIENSDTLYYRYRNRYSDPDPPSRRKVEQIINVLVKYNWISKQSRQLKMRDIGKRMMDALIRLANDSLAYYMHDDIGRSLFQARRDAELSEAYDDHGISGGNKIASMIRNVENAIQLMYERELEMLADRNALPQLEIIHELMQELEVKLTERFRQFQTLEDSLVLSNLMQQGTAVLAEGTNLSIGMINKYLKFTTMQQTVLLSTINPEKVREFILRMYDPPLESDIPNAHQLMSFMEQNQYKGESADGLWVPVKFAAPISANAIRESVHYLETYEPVINPLREEETEVEYMEEEIYIDQLSELMGESQWMLTKSMIQTDAIESYMEQVEVAPMEQVMIEATSAEWGDAINALTAIAALVGNKKLMIDQASKGVTIDQPLYEKKWEWMSRDDRYQLVRKRNSRVRSDQTETQGNGGNKEDV

SEQ ID NO: 40603 - protein, 253 aa, Paenibacillus larvae subsp. larvae B-3650
MSEQDISFLEAGKITGKHEEFSSPLERRADNVGYAESPNVTPLNIMQSLKGMLTEEEELTFMNILFSSSATIRAGNFGLSRREVEKQLRISEQDEKFFSFLQRVNQAVSRYFQVIYDEKRDQVVAMMRIPARAARSTLSKESLAILLFIFYQQEVLQHEFTLFDQLLNAFGHETTKANQRLLLNIDPLKKIGAVEEYDTNSQEKAYQLTAIGVHMFSDSFLRRTVEFSQSNQLNKEEVLKFFKRYNLYQEGIE

SEQ ID NO: 40604 - protein, 1028 aa, Paenibacillus larvae subsp. larvae B-3650
MGAVLYSSKVDIEGLRSRNLAPDEIWKAQIRLLFKNEGYARIDAPDYVEFSLSILQEPGQPVKKEFIISTGDDPEEWEEKIRYTSGDRQYNFSAYKKDLQYKYKIDPDMFYLIWYQQEVNQFAVMHPEERFRIFAEMHGIDQVQRNWEESMEKLKETQETLRVAESNVANKKQWLQIKKSELDRYEDNQQRLLEGGKWYAHSLLQLEAYYKREQEQLNSQIEQFELEKEQQQEHIGEMKGREAEVNVKMTALQKEIDQLKAELSQCDEQLQALDIVMKETKTAITELERELQEVSKEKERITRTEDEVKQQLTDVTLQLNDTLEQDTKLNFEIEKSEVRNQELTGVISRLEALIERDQKEETEHQERLRQFVSSHHVQEELNRLEQSLLIAKDKRHEHLNCVRDLKEELARLEDERDWSRRQMDSLTYFSSRGIRAYALRELVELDGSAQLKSEERFNSIKYTIFFDGHMVAVPNDLYHVPLRKVVPDRSVTELMPLQLRVKEGLDEEVFPHAVKALWWVEQFFKDGDIRIEHGVLVDPMGIRGPQEQSRYILSARALIARKEEVARSIRELSLKLEELDESIRQDTKRMQELNSIIHLVREAEAFMTREHERASRVIKQEEETARREELVEHIRELRKVQKELIEKRLKLERDQGELKGEAEFYVRLGQQKEKYQDLNAKQRYLRSLSGQHEELEHQHENCEDQLDNLEKELRKQQRELQDIQDQQEREERKLRQIHNQLQSRIDSLDTVKGGYVSSIQELEEFKRLAPHIYNEVARGDSLQSVNPSQLSSLSQIRSDLETGKVKFNHARNETGIDPEAPENYKVVEKEYQRHQDEYKRTSVLFEQDQERTGQLKDQLETTINMRVLEIKQRFKSYMGLFQFEGEIEWDQFEDRRGRTHFNLYIKARKEGHRGTLEDVSVKARGGKVGKGVSGGEESLSSLLFALALLQNLQTTPGFIVLDEFDSALDEQRKLKVFDLYGRELERKLIILTPKSHEKSYLDRFSKAYIVHHDPTVPRSKVTGIIKKY

SEQ ID NO: 40605 - protein, 434 aa, Paenibacillus larvae subsp. larvae B-3650
MSAIENIFSYISQYILKNGEQLDTNYTRITSLVDVDIVKQTARTFRRVGTLTLSLDAYAQEDAQIPDIPLLKWTLGKRAILDDLQAFEWLNKGWIMKEMRFKQDGKTIERVHYRMGYRLFVYLQKKTDREHQEKIRQFASYQLDAQKVLRGLVFDDKERAVLLSSLTHHVSDSIYWKIEELAESDLFPSSWSALKRIKCLTFLLAFIMISNHKELFDWKEIGAQYYGGIGGSKAFDDYKEEFICVLEEWSKQSVEILGMISPGKIIPLYFAGHLRGERSCFQAGPVYALTDLSIAQDQYSTDATTLWLVENRGILTRLSAERNFLRETGSLIVCVDGHLRSVHKRFIHNLLKNSCIRQAIFWSDYDKDGLLIAGEMVEAVSVYPLTLKWICHDHKVIKNWSEYQQYMGALLQEVCLEQELILGKAEDWRRWIIN

SEQ ID NO: 40606 - protein, 529 aa, Clostridium symbiosum WAL-14163
MKHVGLYAVLLQGSLQKTTWQKYGFVRADEQINLIFAVLLYIMEQSLKEEYCTKDDIGVFIDELNMEYLKKDMAYEDCKSLGDFILNVVLSNEGKAMYFDGYNFEQKAYQIMNISYVANRIVYVEDEVKRTSYYLTDDGYNLLLGTLEMESNMKLTIHEMIFKMHLEKQSYDKAVDEIKNVFNLLRIQLQKIQEAMGKVRRNALNYSVAEYGDILDENLDTISDTNQKFQDYRELVKARARELEKEKINIRRLTPEEEEKLKNLREIESYLTRTIDEHQRILNGHFDLKALYTRELEQLSQMSLIKRFPLRSAFYDKVLEKPEIMERMDLFLRPLFGQDPDKIYNLNKALEIQKPIRRRREEEETELLDLDEDAWQEEQERRLREKLKRYEGSLSFLLELASEKGEITLEEISSRLPEDEEQSADRERLIPNTEIFKEIMVELIKNQQIDIRALRKERSEYIREKADSFQLNEMLLDLADRQGDPIQRIEVYRLEDGKVIEFGRVKSEDGRIKRVACSNVLLRVIREDR

SEQ ID NO: 40607 - protein, 236 aa, Clostridium symbiosum WAL-14163
MAYEIEDIRLSQEIFYYLLEHHELREDNELRLYKAYTQEETIQNLVKSQGEISDCHIERYGNVIYLIPKENNSFLGFSKAQMKAALCRSNATDKDYYLSQFVILTLLVEFFDGQGSSAKSREYMRVGELQNCISKRLKEGAKSRGEEEEEKQGIAFSNMLEAYEALRSEEKGSRARTTKEGFLYHLLTFLQKQGLIDYVEEDEMIKTTKKLDSFMDWNLLNQNHFQRVKKVLGEVE

SEQ ID NO: 40608 - protein, 1405 aa, Clostridium symbiosum WAL-14163
MSKINAIRLINLNYNNNAIKISDETFHLNGESTLLSLRNGGGKSVLVQMMTAPFVHKRYRDAKDRPFESYFTGSRPTFILVEWALDQGAGYVMTGMMVRKRQEISGEETGSGEELEIVNLISEYKERCLLDISHLPVVEKTKKEITLKSFGACRQLFESWKRDKSVNFFFYDMNNQAQSRQYFDKLKEYQINYKEWETIIKKVNLKESGLSDLFADCRDEKGLVEKWFLDAVESKLNRDRNRMKEFQNIVEKYVEQYKNNRSKIERRDTIRCFCEEGEKIRAEALQFEESLKQVAFHENQIAGLRAELGRLRNEEEEAREKLLQEMKEIQEKREYLLYKKLSGEYYELEKQERFHSSSRDMIDMEREALKRECSETEKRLHLLECARQQDETDEDGRALLEAVERFELAKKKGESLEPERQRLGSLLKQYYQEALKSWEAKQEQNRKEQETVRETLKSKEERLEELQNQIIDYASRMAGQKTRIAVFDQRENRFNKMYGESLKRNLLGEYEPGALQILLQIYEKTLEDVIKERLTLRQKQETETEEKKKLERRLEDLKQELGRNGEEQRELLRIGREYGEELSERRKILRYLELKDSLVFEQDAILQASGRKLKEIQIARRELEQEEERCQKEYERLTQGKVLELPKEFEAMLRELEIPCVYGMEWLRKNGRSTGENQKLVKRHPFLPYSLLISKRELKILLSFTEKGDGKEVYTSFPVPMLLREELEGRAGEEAGTVLEWNKIHFYVYFNQNLLDEAALKRMVEEKAHQMDKLKGAISRKQEEYQGYFEKQEKVRNQKVTKESYQENQEKLEENGRREQELKGQIEAAAAQARTLEEELEQLRGRIQKLENDDRWQTQRLSEFKEFSSEYAAYLEERNELERCEKKAASLSEQKAVCREQMERLRRQLQTLDNAAADLKEKVRDNREKYLVYETFPEHFAEIEAPWQTGEGREEAYAQMEARYQAITAGFSMEQQELERWVLECRKRHRKSKEELAWLRDKYKLEDGAWKTVLYSREEEYHQRSVLEERSEKKILKDSEWNKEDRVLLLLRQSMKQKKEKMAETCGKDEPLPQSEIMPEDIDAQMNELSWQEKEKKQQQERHEKRINSYEQNITSLSEYNHLEQREEISWETDISLLDKKQLDDFKGETVREYRLSISASGECKARMVQQLNRILRMDVFREEFYRKPLEAMLEVSGIAAQVLAQLNITVQSYQSLMEKLEVDISLVEKEKARIAEILEDYLKDVHENLGKIDHNSTITVRERPIKMLRLELPSWEENLTVYQLRINDFLNEITRQGIEWFERNENAQEYFGTQLTTKHLYDTVAGIGNVQIHLFKIEEQREYPITWTDVARNSGGEGFLPPLSSFPACSAICGGMIQISSQTEMKERFSSWIIHLPRPTRSIF

SEQ ID NO: 40609 - protein, 327 aa, Clostridium symbiosum WAL-14163
MKRITLEEIEKNGKFETYEALYRHILSEISSGRLSPVKASGINGKKPALYLRYWVTEEEKDYGCLKEELIYGLTPLISPDYYLKNLSLYEKDREWVRMLNGFLTERRELLNQTESINERSFEIWGQEKFLKRGQGMRILKNCGISPDFLNYYETTEPMPCYTHTREVPQNLLLLENKDTFYSMRRHLLEGKDTILGMKIGTLIYGAGKGILKSFQDFSICAEPYMQNRQNQIYYFGDLDYEGIGIYEKLEQLFGDQYSIRPFMPGYFRMLEKAEGVLLPITKEQQNRNLTGQFFACFPKSAVEQMKKILESEQYIPQEILNIRDFGE

SEQ ID NO: 40610 - protein, 541 aa, Clostridium symbiosum WAL-14673
MRYDFLKHFPKRMKHVGLYAVLLQGSLQKTTWQKYGFVRADEQINLIFAVLLYIMEQSLKEEYCTKDDIGVFIDELNMEYLKKDMAYEDCKSLGDFILNVVLSNEGKAMYFDGYNFEQKAYQIMNISYVANRIVYVEDEVKRTSYYLTDDGYNLLLGTLEMESNMKLTIHEMIFKMHLEKQSYDKAVDEIKNVFNLLRIQLQKIQEAMGKVRRNALNYSVAEYGDILDENLDTISDTNQKFQDYRELVKARARELEKEKINIRRLTPEEEEKLKNLREIESYLTRTIDEHQRILNGHFDLKALYTRELEQLSQMSLIKRFPLRSAFYDKVLEKPEIMERMDLFLRPLFGQDPDKIYNLNKALEIQKPIRRRREEEETELLDLDEDAWQEEQERRLREKLKRYEGSLSFLLELASEKGEITLEEISSRLPEDEEQSADRERLIPNTEIFKEIMVELIKNQQIDIRALRKERSEYIREKADSFQLNEMLLDLADRQGDPIQRIEVYRLEDGKVIEFGRVKSEDGRIKRVACSNVLLRVIREDR

SEQ ID NO: 40611 - protein, 236 aa, Clostridium symbiosum WAL-14673; identical to SEQ ID NO: 40607

SEQ ID NO: 40612 - protein, 1483 aa, Clostridium symbiosum WAL-14673
MSKINAIRLINLNYNNNAIKISDETFHLNGESTLLSLRNGGGKSVLVQMMTAPFVHKRYRDAKDRPFESYFTGSRPTFILVEWALDQGAGYVMTGMMVRKRQEISGEETGSGEELEIVNLISEYKERCLLDISHLPVVEKTKKEITLKSFGACRQLFESWKRDKSVNFFFYDMNNQAQSRQYFDKLKEYQINYKEWETIIKKVNLKESGLSDLFADCRDEKGLVEKWFLDAVESKLNRDRNRMKEFQNIVEKYVEQYKNNRSKIERRDTIRCFCEEGEKIRAEALQFEESLKQVAFHENQIAGLRAELGRLRNEEEEAREKLLQEIKEIQEKREYLLYKKLSGEYYELEKQERFHSSSRDMIDMEREALKRECSETEKRLHLLECARQQDETDEDGRALLEAVERFELAKKKGESLEPERQRLGSLLKQYYQEALKSWEAKQEQNRKEQETVRETLKSKEERLEELQNQIIDYASRMAGQKTRIAVFDQRENRFNKMYGESLKRNLLGEYEPGALQILLQIYEKTLEDVIKERLTLRQKQETETEEKKKLERRLEDLKQELGRNGEEQRELLRIGREYGEELSERRKILRYLELKDSLVFEQDAILQASGRKLKEIQIARRELEQEEERCQKEYERLTQGKVLELPKEFEAMLRELEIPCVYGMEWLRKNGRSTGENQKLVKRHPFLPYSLLISKRELKILLSFTEKGDGKEVYTSFPVPMLLREELEGRAGEEAGTVLEWNKIHFYVYFNQNLLDEAALKRMVEEKAHQMDKLKGAISRKQEEYQGYFEKQEKVRNQKVTKESYQENQEKLEENGRREQELKGQIEAAAAQARTLEEELEQLRGRIQKLENDDRWQTQRLSEFKEFSSEYAAYLEERNELERCEKKAASLSEQKAVCREQMERLRRQLHTLENAAADLKEKVRDNREKYLVYETFPEHFAEVEAPWQTGEGREEAYAQMEARYQAITAGFSMEQQELERWVLECRKRHGKSKEELAWLRDKYKLEDGAWKTVLYSREEEYHQRSVLEERSEKKILKDSEWNKEDRVLLLLRQSMKQKKEKMAETCGKDEPLPQSEIMPEDIDAQMNELSWQEKEKKQQQERHEKRINSYEQNITSLSEYNHLEQREEISWETDISLLDKKQLDDFKGETVREYRLSISASGECKARMVQQLNRILRMDVFREEFYRKPLEAMLEVSGIAAQVLAQLNITVQSYQSLMEKLEVDISLVEKEKARIAEILEDYLKDVHENLGKIDHNSTITVRERPIKMLRLELPSWEENLTVYQLRINDFLNEITRQGIEWFERNENAQEYFGTQLTTKHLYDTVAGIGNVQIHLFKIEEQREYPITWADVARNSGGEGFLSAFIILSSLLCYMRRDDSDFFADRNEGKVLVMDNPFAQTNAVHLLKPLMDMAKKTNTQLICLSGLGGESIYNRFDNIYVLNLVAAGLRNSVQYVRTEHIKGTEAETVIASRIQVAEQMEMMF

SEQ ID NO: 40613 - protein, 340 aa, Clostridium symbiosum WAL-14673
MKRITLEELEKNGKFETYEALYRHILSEISSGRLSPVKASGINGKKPALYLRYWVTEEEKDYGCLKEELIFGLTPLISPDYYLKNLSLYEKDREWVRMLNRFLTERRELLNQTESINERSFEIWGQEKFLKRGQGMRILKNCGISPDFLNYYETTEPMPCYTHTREVPQNLLLLENKDTFYSMRRHLLEGKDTILGMKIGTLIYGAGKGILKSFQDFSICAEPYMQNRQNQIYYFGDLDYEGIGIYEKLEQLFGEQYSILPFMPGYFRMLEKAEGVLLPITKEQQNRNLTGQFFACFPLSAVEQMKKILESEQYIPQEILNIRDFGGLERVNLPQSVTHS

SEQ ID NO: 40614 - protein, 464 aa, Bacillus thuringiensis serovar finitimus YBT-020
MEGMDQSVISILQTDPSHMGVRNAMKDLNKLSGVISELGESEYFNDPLKTYEFLLLLNILNEEALGLTSSIEDVRTLKFRYRNMYGGDPSIRLEHFINILDKYGWISKGKSKITMMDVGKRMIDVLIRLANDSLAYYMQDEITRSLYQANRDADLSEAYDDKGVSGGNKLASMIKNVEEAVERLKERELEYLADRYALPQVQIIHRLMNELNVRFEERFQKFQTFEESLVLEPLVKRGTSVMFEGSQVSLGTIKKILHFTHIQQSTVGANIRHDALRRFIENCFTKQNMELPDAHEILSFMEQDRREGERQDGLWMPVQFAAPLSSAAISSGIQFLEEYEPYTDHIEEVVQEEYEEIEEMSEAEVKKLMADQQWSMTKEQIQTERLEEFLMEQEEVDMEELVLEAGSNTWGDAVNALIALSALTANNKADIIDNQNVKERNIEKEWEWGSDDDKRKRVRSRERN

SEQ ID NO: 40615 - protein, 227 aa, Bacillus thuringiensis serovar finitimus YBT-020
MIKENEFEAEKGINPLAKLGELRYILSRDEEHTFMQLLFSSSARMRATNFGLRRKEVMKMLGLNSEDIEGFESFVMRINGALSGYFQCVYDERRDQVIVMMRVPAKQAREVLSSESLGLLMFIFYHQEVLQNEFTLFNQLLSALGHETLQARRKVQTNLDPLLKIGAITKYDSPSQEEAYALTAIGSRMFSDSFLHRAAEFSQSQQLHMDDVLKFFKRYNVGGGETI

SEQ ID NO: 40616 - protein, 1073 aa, Bacillus thuringiensis serovar finitimus YBT-020
MIPYRISFSGIRDYKPRTISLMGKRDHILISGANGAGKSTLTFCWGAVMASTKVNVEGLRSKNLPDNRVWRAKIELIYENDGFVDAARFVRFTLDLEQEPGHPLKKEYYIAEGDRVDEWEQETRFSSSDKHFNFREYKRMLLQKYKIDPDAFYLIWYQQDVNQFAVMKPEERFRIFSEMTGIESIQKSWESFKEQERDKEAILQTARNNQIQYKFELERWEKEKNRYEDQQSRIKRGILQYKTALCTLEDHYYTERMKYKDELEDVKENLDEKYEEAQQGEKQFAQLEAELLAKQAEFQSAEKEREIAEERQLQCKKESKDKEREWNAMKEEIKDVTDRVKNIGISEDVVRAEKSSKEQQLQEAEKEKVYTEQLISETSYNLNELRSEVAKLEVQVDNDEAAVVSAKNYIVQYKSSFYMEEKHTKVESMMRQTKDLVETVKKDLQQKYEEKKQLELNRYVSPRQEEGLRYLRREGLQAYPLRDLIELEGDAEFRHEDILNTIKYAIFVESKEFRPPNDLYYVPLPLIVPTESVISLPQYKLRIKEGDNEKLVSVAMKALWWVKQFFTGEQPCIQKNSLIDIRGFRGEQEKTEYILSEKAIMQRLEETGKWIEEHEKQLIQYERDIQTLEEKERKLHDIVYKLRDAEAVLQKAAERTFRIEQLGRKTEEKQRLEQEIQRLYAINQELHTRISRLRERLETLEQYEMIYEELHKEKEKIAHMQKLEQIHRELLDELKRVVEQRDILDETCNRLEIECNKASQKTKQQKQEVEELRAYIQRLEKKKQDVQEHFITTEEKLISIQRENQDANDTYGKLLEQLGWEKQIEEWSEAKALSQKQSAEITLEGALGETVDPLAPENYAKMKEENEKSNAELHNAEQILNELRENIALMRERLETTIQMNAHKIHKKFEQYMEQFHFEGKVEWNMDTNKHGDMRYYLYIKARKKGHRGKMEDISAKGRGGKVGSGVSGGEESLSSLLFALALLQTIEASPGYIILDEYDSALDDSRKEKVFTLFEEELNRKMIIVSPKSHDPNYLQHFSQALTVMHDASVPVSRILQIKRAVEETETVIKDN

SEQ ID NO: 40617 - protein, 418 aa, Bacillus thuringiensis serovar finitimus YBT-020
MNGIQFVQLYVMKSAEKIDELYIKKEQGITTLPIIKQTPRKIIKTAELLFSEEEVSDVSTTITKNFYSPNVRKRESDVLKWLTIHEMIDCIERGILIKEVRFEKDGKTVHSIFYRMGYGLFTYMEKKQQLEKVREEEALQQWMKRKQSMPKYINEYTERLWHVLCNIESDLSSIDEKRWSFQKTFLFLEFLLATYKMSCEKRTFDWKEIGAAYYEVIGGSKKFDQHKKEFLNKLEDLLDAPPHCLGLVSLGTVTPIFFCGNLYEGNTRYECDTVRSLTDLVVFRHAYKTDAKVLWLVENRAVLTRIAAEDDFISSTGSLVIGVDGQLRSGHKRLIQSVLDHSKSITKIIIWTDYDGAGEIISDKLFELVAPYEQYTRWISSEGKALNKDEFEQSVRLRESEQEESLGGVDAWKEWISQ

SEQ ID NO: 40618 - protein, 516 aa, Lachnospiraceae bacterium 6_1_37FAA
MELHRNLLEEIRAEQGLRMESMKKYYPFFEIVSHDLKQFQNGKYKSIDIGYVLMAVLRMLIEENNFNNTGVTYTDYLNFVIPFLESEFALDCTPEEYAQLAGYVFDKIKNDGKPFSYEFYDPEEKIRKVARVWLMKSHFQEGNIYYYITESGIEFYLNTKEFKEESKISIQQLLLEKMIRTQNFKGGREIVKRICNEVLKLKMQKREVLQVLVHDLKNGLSLYREFFQESVCWFDEEHDLFMKNTRLIAGAMSMLSPVDQIKNKEEIFLLDSELKRAMAMHSELLSECMDLRRKVDSMVEQGTLNAIRPVVYFRQFLETALKKDDVEQLKLLAEPLFQAKKKKMFDLKRLDEMLALRRGMDEEREEIESEEEADYVYDDELEEQRISSNYRILVRELFAMLKKTDCFTLREWNEQLEVRYGQKIFANGDYYSFLVNLCQKHEIVIRDAVRHPATNFEAVLKQYFEIEGTEEELQMDFCLETLTDEEPVTFLECFSVTNIRVERMNGDDRADAGNRD

SEQ ID NO: 40619 - protein, 238 aa, Lachnospiraceae bacterium 6_1_37FAA
MTEQTLETGIEIFARLINQEAVKYQGEHTKLYEAYTQNGDIFDTVNKITKALNLEIYDYRGGLYLTPGESNHVFGYTNEELKEMIGLRLNRELFLCYFIIYHIITKFYTDSATYTYQEYVKVPEIVEAVDASFQGLAEKVETLALTEVEEYSFEQMALAWDLPLLTNEDSSVIRAEKGSRAGMVKKTFQFLIRQGLFLEVEDRYYPTDRFSALIESYFESEQSRIYEIMTGGRDDAAY

SEQ ID NO: 40620 - protein, 1470 aa, Lachnospiraceae bacterium 6_1_37FAA
MPHINRIRVNNIKYNVGTQFYDDLCLRFQGKNSLYDLANGGGKSVLMLLLLQNLIPNCTLDDKQPVEKLFRGSTGSSVIHSLIEWDLDRPDQEECGFRFMTTGFCARKKADRIKEGEEEVSSSAIEYFNYCIFYNEFNAYDILNLPLVNGKERITFKGLKELIKRLQAESNRKLSVKIFENSKSEYQSFIAGHGLYESQWNIIRGINKTEGHVRTYFESNYRTSRKVVEDLLIEEIIQKAYQLQTGKEKDAEELAQTLLDIREQMVELSKKKEQISNYDRQITVIQEFLTKFEPLLQNFELCRENEQKTSVFYHTLLDERERIEAEAEQLEEALQNMQEQQQETERILLTLDLQELECHLDEANYEREQKEKQKEQLKEAVEELRQTVTEKESVQYFLNYAKAQSRAHTIEVEMERMKQGNEELYQSLLEMTAQKKRKDEQIFEQLNRQKDEAEKNRETSRREKEEADKKERESDNACAVLESRLIENEKERTALQKEIGEGMKAFPFLLREQIKDTIIEKEKEEDAERESKRTLEQECETIKEQLQSDRLMAKDLEHEAKELHTKEEECQAQLAIYEELTEKVAQRMEVYGEKDVYRLLELLKEKQRETIILLHDGQNRQSELQKQLEQLQKGILFQVTPEAEQLKEFLYRKYGDGVLGTELLEQMQGEKKEEVLGRIPYLPYSIVVGHRIYEKILAEPKPEEWQNVSWMIPVVDQTYLEHGQFDAGDGVMFAGKEAAYFLEKEQLEKEIHRTEEVLDLEHKKQEQLREQQKVLTADTDGVQEYVTNYFENYAGWLEEQQERKEKRAQVMEAQEQLKEKEKKLCARAAELERKIPESAAKIKKLAEEILSLQRLEDIFRKSDLVEANQREWKEKKAELELEKEALWRLVQAKEREISEADGRIRQITAQIMERKMGWERYAAYYKEEIPIQEPIPERLEEELDGAIAAFEKENKDVREKSETLQVIREQITSYLRELRSRKADVKMLEQLYEEQKLAEVSDEEIEAQKEHLMEEEKLLQRCEKKVSELVLACTRFQSQADVIAGQIRERFYRIERLPIAAGTIEIEKERQKELQQQCKRELAELFRKQKETGKAQEEIQTMIGKITWVAEEYHIKDMSVKTLPGFVILDWKETERQIMSGWQKMKARKTAAETAFGKAKAWCEETLTGLGAGSFALQMKEQIPVPQSFEEADKTIKRLEEACVMIQMGRDQIEESLRDIEKIKSSFENQCLQRCNTIRMELDKFPKLSSIMIDEKLTQIVRLKIPYVREEQQQMQISNYLGQVIENLGKYETEQEKKKYLIQELSMKRMFSAIVTDMNRISLELYKRERIKEQSRHLRYEEAVGSTGQSQGIYIQFLIAIINYIASIHSYHANEESLKKVIFIDNPFGAAKDTYIWEPIFAMLAANRVQLIVPTRGATPAIIGKFDVNYLLGQKMVGQKQQTVIVDYRSKIDVEEAEYVKMEYEQTTLF

SEQ ID NO: 40621 - protein, 343 aa, Lachnospiraceae bacterium 6_1_37FAA
MEAFVQEGVLSPVKRSKKPGYLATVYERYEIVGNKEKVVEDPEYLALLHSYVGTKVLEFYKRNRRAFEQDREAIDILYNYYCRIEKVWMTANELGYYLFGDEKAFEQPEGEKEKQASDEQEMSTEKDGGGRHRKKAGAYTHLLNRMGFDIETDLHAFYTKEPFICQVRPSFFEKNIRKILIVENKDTYFRIKNGIYGKEYDCVIYGEGWKIIRAFSLAEETGIMETDIIEYFGDIDPEGFAIYYELKTQYASYSIRLKMEFYEKILEAVRGSERKPGKIRGKIQNRAREVLPSALQEFDTETADFLQRMMLKDLCYIPQEALILVGEAEVENTTRRIRSNGVT

SEQ ID NO: 40622 - protein, 521 aa, Pseudonocardia dioxanivorans CB1190
MTGAYGGVVSPAADASARDRWRALALTDPVSRLVRNAAHAGIDDDEYDLRLLALAAVDIVVGSMGFAREATLDDVVDELAGLAARMAPHRPDQARDVAQTVVRGLLNDAHEQRRFTYRFADLGAPGEPARWEAYSFRLLSLREAEYGPVLVASDQAVTLFLHGLDVDLEDADRALAHVLQRQLDDRRFDAAARTAAQAERTSVGMSAMLAELLDATRRDVGSHDWEREVPERLLRARRHVESRIAEDDRLLEHVQGGLDAETSPEVRAVSGRIVDLLGRARQVHLDLERRLVGAREVFLSAQVRQRLARRRRLRMLALREELLLPVLELPRAEAALVASAFADRALGVSVPRLVRFDDLVDALWAPPRAREAAEPEIELVPDVDVSDDVQRYPEQVVAAAREVLGAAADGEVRLSELLAAVPDGPDAAEVTELVLLSALWAFAPDVAAEAEGEVAAEVDVLAGGIEAERADELLDVPGVGGPDLVVRLRGGATGATETPAEPADVLFVDVYGDAYSRETVS

SEQ ID NO: 40623 - protein, 1506 aa, Pseudonocardia dioxanivorans CB1190
MSPAVPVMWTMRRVRLHRIGPRAARFVDVTLDLTDADGRALHSILWLRNGGGKSTVLSLICALVRPHRRDFLATSSTGKHLEDYVLGSDTAHVVVEWSGPGGQTLVTGAVYEWADRAQPADPNRDHDRLGARWYVFRAQPGTRSGASLDTLPFGPDDAPTPLRDFVAAVKRWDAIPNCGVAVTDSQDRWSRLLDEHGLDPAIFTAILQMNATEGGIEGQFQFRGPDQFVRYLLELIVDPEVPGQVSDILEKVREGLAARPEILADLAFADEAGPLLGELSAARTTHAGATAAVAAAEAGATNLATALAAAAARAEAAAAEHAERVAELTATGAAHETAAQEARVREVAARRAAAAHRVRAAELRADGLAAEHARAGALVAGWHAVATVDAARQARRRVRSLEEQLAAATAEAEPLRARRDATAAGYARALDASIAAVAARVAALDAEACDAGAAERAARTAWQEASQRRGTLTGRLAALTDALAGLDADLAAARSLLAGSGSGSGSGSGSGDLGAGVTVAAGGSVDAAAVEDALARHEAVDAEAADELDRLAAERATLRERRAELAAAAETLTAQRRTAERAAEAAGDRAVELRGRVADLASDDRLRGLAGGTDVDPVAEAGDLVALLTAAVARAERGRVELAVADAEDERALAALGADRLLPPTLDVVRALDVLDRAGIPATTGWRYLADSVPAGRRAELMRAAPALAGGVLVHDPADLPAARSVLDGAALRPTSPVVLATTGDLDAAHGPATGHLVDPARALTDRAGAGAEIDERESARAARSAADAELVAARDADADRRRRLERLRVDCPPGTLEALDAEVRAARDAVAAADADLARIASDLASVGDREADADARRGDLERCRRDAAAAIATLTQLLPRVREAADRRAEAAALPAEIADLDASLDAAVAAEDAARTAAAAATGQADVLRRSLGEQRELRAGLSDPGSDPGPGAGSEGEPVALDEARRAWESADQAYRREVSESALAASLQEATRALADPAARVADLPEVVRQRAEALLDGPDGTDAGTRAAAIVRAESAAAALATSIGELRAELREAKAELAGLAEPAAQMQVEPAEQAACDDPDALDAARADALAAAARAATEAGELVALHAAAGSAARDADARRAAARERATGLGHLLELLGVDPGTGPGPGIDPGPGDVGSLDDAHAAVTAARGRLDGAVAVARRAARDVEAVAHRIARWAGADRFAGVKSDVRDRFRVDDVAGELGPVADELAGSLAVYAANLRERLAELEEHKGVVVTAMTGMVRQALRSLARAQALSELPESLGEWAGQRFLEVGPRSTVETADAVVRDRCSRLVDALTARGAEVPRGLELLWQATDAVVGDGNWKARVLKPSTTFAIERVSVERMRKWSGGEKVTISLLLFCMVAKLRATNRGRDVPGLGALPLDNPLGKANYVVFLDLQRKVAAANGVQLIFLTGVGDLKAVGRFPNIIRMRNVAGRGRQYVRQEERILAGDDPAGVVDTTRIWREDPVLTLPLG

SEQ ID NO: 40624 - protein, 359 aa, Pseudonocardia dioxanivorans CB1190
MTTVEEDESPELSPLAARLAGVVAASRTGRIGIEVLRGAAHEADPSLAGAPDGRARLRELCDELAGAGVVRLPRVGGTGWDALPRPALPRFVTRVGRPGLVLDPPDVRPATATAWHAQLRWVPAFLRDEDPSDAERALLDGVQRLLADGGPRDVVAVQERSLRLTGDEQALDALRRGRLFRPGRLTPELLGIRRARWEPITRTVGDGRITLLVENVATWESLADALPADGAVGRVVWGMGNQLSTVLTALADGPGHPGELSYFGDLDVGGLEIARRGAETAETLGLAPLRASTLYTWLLDEGVPQPGSLPVGDVAELTAWLPPVLHEPVAELLGAGERLAQEWLGRELLAEADDLRDLR

SEQ ID NO: 40625 - protein, 499 aa, Streptomyces griseoaurantiacus M045
MKALAVVRPLLALDSSKAKAERGWEGYRLAELALAAIDVVTLRTDMRTAVRQETVVDHVSEFAALQLPGRPAEEYRAVARWVTERLINTEERDRAFRHAIGSVMDEGFQTRMTSFQILKEVPDHVGQAALIATDAAITVLVHAIDVDIASEQIAAEAKLEALLKRARIGEAWQIAHTARLQSIRYAKDIHGRIEAMKRNVRAVDWDTEVKETVDDALEHVRSRSATEQQLKERVDQLLEVTDDAHKRRQLEGLGALIVECMQRHSVLIDMLLKVGPEYRRQQDRQVFVAPTLHARVHMHEQLLQPVMEFSLDACLEPLEAFTRALLGPQQPRVMYLPDYFEALARVSESAAGDLVPVAQDDDPDDSEHTALFSDAQHEAVDALLDTATDQGVRLSALLGSARLPGPGMGPESGTDALLAMRVQQLFRRVPVRQLAVGEPAVVALDDGTELVDERFGGSDFLLIRAQSQPSVPPGPSDAPTDNNRLSSVTPIPDRDQESA

SEQ ID NO: 40626 - protein, 1486 aa, Streptomyces griseoaurantiacus M045
MYELNRILLRNFGPVDARYEDVTLDFSGAGPEVETASLIPAAGHVTHRPAPANLIMLQNGGGKGVLLTGITCTTIPHRHQDVETLRNFTVSLAQPSHVVLEWADARTGRLLVTAQILAPDREGKLHRRFYSFHPAAALDADRLPFHRDGHWLPFEDYCTELRDVQRRVDALELRIEDGQERWEKHQRTLGLQPDLFDVQRRMNAKESDAAAAFTTTTSDAFVDWLLRKATDDDQYAELGTAFHSYAHAHDQRAAWDKERQFALTMQRACGEVAILHQTRQKTAHAAESAQQRLVHLTATVQLREQQLSDALTVHADAITDTYRAHEEAKRAAERAEQRVHHVRHHASALELATVRAKQRGAEQDKKETEAEKSGWETVPVALRHAHAVDDHTRAQEALSQAERTAAPYLRAVHQAAADLRAGYARAEAAAQDKVRRLAEANQQTETDIEQWQHRREQLLEDTGAAQADLRTLREQIDSFTTTLGRARHDRLVEPDELAGDAAARAEAHTRHLDQLMDEAKQARQTARTGRDHAHRHLADTQRQALSDRAAADAALAQTDRLRKQATAVQSLPLCADLLEATPDELRAADALEWLHEHATVLGEAAGRRIANLETTLTGTRLGLREDQDLLDVLDTSGGLHPASAAVRRLCEDLVTHGISAWPGWRWMHDNVPADAHPQVIRAHPDLVGGIIVGGADGLDAARRHMEQTRPLPAAAVTVGTGERLLRPGSCDDDRFVIEPSPALHDEDAAERERGEVTARITAATRQLQDLDARLAEARELERHLANWLDACAQMPVPDRLAQLNDLQTTAAASETAAQEARDAAEGHDAALHEAEQAYEVLVDRAGQAQRALHVLRQLASAETEAGQARDRISALTAQCQEWRTEADDLRAACKRAEAELLRRAQAIEAARQEADSHAESRRAVPAPPGGDAAIEPDAPHEPLPVLKHRYEQALDELRAVQVGEDQQQRAARAEEHLLTCQREWNQVPGPIQALAQKFSADPRATDEVQRHAILRDVAGQLTDLDDRLNALRDKESELKVRTDHLKSAAAAAPLTGEEAAAWTPATLEDATALSARAARELEEARTTERAASERYNGARRSQANSSRDLAAFRSVLPRLESAAHGLDLPAAAEPYPGTAEAAETEARQATEEYRTCHQAARDADRALETGVSRLKEEAADVRFEGLDIPLRTQISALGGAKIPALAENWTQALGSRIAALTSDLDAMAKTRDALASQLGAHVTDLLHRLDQASRFSAFPDGDAPWAGQKFLTIRYKKPDQQPLAAAMRETVDALAQNPRTRKLKGIDVVLRCLKEAVPRGFTAEVMKPNAAQRITRVPVEKMGTTFSGGQELTGAILLYCALAALRTSPGPRSRTRNGGLLLLDNPIGRANATYLVDLQFEMAAALGIQLIYTTGLSDEEVTARFPMCIPLRNDAEARAGLSLIRLDERIRHALVPSPRIVPDDSAAVPSGYLHSARLHTKETPAQ

SEQ ID NO: 40627 - protein, 322 aa, Streptomyces griseoaurantiacus M045
MSRATLVEAFTAALPGLASGEHARTSLATLLHELADHRLLNLPTSRAHWDAGRPRLPEQVRLPATTQATPRAPREPVSWRPELDWAYTARLTAAQTEDLLACNRWFRDSSNAADRRTPIPLRERSYEIFRDEKRLDALISGALFAPGRLTLDQLATYRQPPPLAHHQVGDGDTLLVVENSDTYATLHDLLSKQPGRTRFVAFGAGRSFEASVSRLTELSGIHRILYYGDLDADGLAIPARASLTALQHGLPPIEPATDLYRLLLGHTPTPSALVADDHAETLTAWLPPPLSTQAHDLLTAGQRLAQEATNRNQLSIDSSWRT

SEQ ID NO: 40628 - protein, 543 aa, Selenomonas sputigena ATCC 35185; identical to SEQ ID NO: 40541

SEQ ID NO: 40629 - protein, 251 aa, Selenomonas sputigena ATCC 35185; identical to SEQ ID NO: 40542

SEQ ID NO: 40630 - protein, 1470 aa, Selenomonas sputigena ATCC 35185; identical to SEQ ID NO: 40543

SEQ ID NO: 40631 - protein, 325 aa, Selenomonas sputigena ATCC 35185
MKRVSLEQLLKGRSAAPYEEQYRFIMGLLAEGRIKPLKSPGTNGKRPALHLEYWLSEEAPDYAAYREELLYRTMPRLSVDYYLRHLAVYEKERAAVRALHDFLQLHAAKLGQEISCNERSFQIWGEEKFLLQGAGRSVLKHCGFELAQLNCYRTAEPFSYYAQHRETPQKILIVENKDTFFSMRRHLLAGASSLLGEAVGSLIYGAGKRVVSSFREFSVSAEPYMKEEANELLYFGDLDYEGIGIYENLAEALAAPWTVRPFLAAYRAMLEKAAGIALPQTKEKQNRHITGGFFAHFAAADVLAMQQILEGGRYIPQEILHLEDF

SEQ ID NO: 40632 - protein, 516 aa, Lachnospiraceae bacterium 9_1_43BFAA
MELHRDLLEEIRAEQGLRMESMKKYYPFFEIVSHDLKQFQNGKYKSIDIGYVLMAVLRMLIEENNFNNTGVTYTDYLNFVIPFLESEFALDCTPEEYAQLAGYVFDKIKNDGKPFSYEFYDPKEKIRKVARVWLMKSHFQEGNIYYYITESGIEFYLNTKEFKEESKISIQQLLLEKMIRTQNFKGGREIVKRICNEVLKLKMQKREVLQVLVHDLKNGLSLYREFFQESVCWFDEEHDLFMKNTRLIAGAMSMLSPVDQIKNKEEIFLLDSELKRAMAMHSELLSECMDLRRKVDSMVEQGTLNAIRPVVYFRQFLETALAKDDVEQLKLLAEPLFQAKKKKMFDLKRLDEMLALRRGMDEEREEIESEEEADYVYDDELEEQRISSNYRILVRELFAMLKKTDCFTLREWNEQLEVRYGQKIFANGDYYSFLVNLCQKHEIVIRDAVRHPATNFEAVLKQYFEIEGTEEELQMDFYLETLTDEEPVTFLECFSVTNIRVERMNGDDRADAGNRD

SEQ ID NO: 40633 - protein, 238 aa, Lachnospiraceae bacterium 9_1_43BFAA; identical to SEQ ID NO: 40619

SEQ ID NO: 40634 - protein, 1470 aa, Lachnospiraceae bacterium 9_1_43BFAA
MPHINRIRVNNIKYNVGTQFYDDLCLRFQGKNSLYDLANGGGKSVLMLLLLQNLIPNCTLDDKQPVEKLFRGSTGSSVIHSLIEWDLDRPDQEECGFRFMTTGFCARKKADRIKEGEEEVSSSAIEYFNYCIFYNEFNDYDILNLPLVNGKERVTFKGLKELIKRLQAESNRKLSVKIFENSKSEYQSFIAGHGLYESQWNIIRGINKTEGHVRTYFESNYRTSRKVVEDLLIEEIIQKAYQLQTGKEKDAEELAQTLLDIREQMVELSKKKEQISNYDRQITVIQEFLTKFEPLLQNFELCRENEQKTSVFYHTLLDERERIEAEAEQLEEALQNMQEQQQETERILLTLDLQELECHLDEANYEREQKEKQKEQLKEAVEELRQTVTEKESVQYFLNYAKAQSRAHTIEAEMERMKQGNEELYQSLLEMTAQKKRKDEQIFEQLNRQKDEAEKNRETSRREKEEADKKERESDNARAVLKSRLIENEKERTALQKEIGEGMKAFPFLLREQIKDTIIEKEKKEDAERESKRTLEQECETIKEQLQSDRLMAKDLEHEAKELHTKEEECQAQLAIYEELTEKVAQRMEVYGEKDVYRLLELLKEKQRETIILLHGGQNRQSELQKQLEQLQKGILFQVTPEAEQLKEFLYRKYGDGVLGTELLEQMQGEKKEEVLGRIPYLPYSIVVGHRIYEKILAEPKPEEWQNVSWMIPVVDQTYLEHGQFDAGDGVMFAGKETAYFLEKEQLEKEIHRTEEVLNLEHKKQEQLREQQKVLTADTDGVQEYVTNYFENYAGWLEEQQERKEKRAQVMEAQEQLKEKEKKLCARAAELERKIPESAAKIKKLAEEILSLQRLEDIFRKSDLVEANQREWKEKKAELELEKETLWRLVQAKEQEISEADGRIRQITAQIMERKMGWERYATYYKEEIPIQEPIPERLEEELDGAIAAFEKENKDVREKSETLQVIREQITSYLRELRSRKADVKMLEQLYEEQKLAEVSDEEIEAQKEHLMEEEKLLQRCEKKVSELVLACTRFQSQADVIAGQIRERFYRIERLPIAAGTIEIEKERQKELQQQCKRELAELFRKQKETGKAQEEIQTMIGKITWVAEEYHIKDMSVKTLPGFVILDWKETERQIMSGWQKMKARKTAAETAFGKAKAWCEETLTGLGAGSFALQMKEQIPVPQSFEEADKTIKRLEEACVMIQMGRDQIEESLRDIEKIKSSFENQCLQRCNTIRMELDKFPKLSSIMIDEKLTQIVRLKIPYVREEQQQMQISNYLGQVIENLKKYETEQEKKKYLIQELSMKRMFSAIVTDMNRISLELYKRERIKEQSRHLRYEEAVGSTGQSQGIYIQFLIAIINYIASIHSYHANEESLKKVIFIDNPFGAAKDTYIWEPIFAMLAANRVQLIVPTRGATPAIIGKFDVNYLLGQKMVGQKQQTVIVDYRSKIDVEEAEYVKMEYEQATLF

SEQ ID NO: 40635 - protein, 409 aa, Lachnospiraceae bacterium 9_1_43BFAA
MIGVRKSEGAKRMRKNLERYFAERREKKKTGNIRVTYEELLEQAAGNEERKLLEIRTGRVREFQQLLEAFVQEGVLSPVKRSKKPGYMATVYERYEIVGNKEKVVEDPEYLALLHSYVGTKVLEFYKRNRRAFEQDREAIGILYNYYCRTEKVWMTANELGYYLFGDEKAFEQPEGEKEKQVSDEQETSTEKDGRGRYRKKAGAYTHLLNRMGFDIETDLHAFYTKEPFICQVRPSFFEKNIRKILIVENKDTYFRIKNGIYGTEYDCVIYGSGWKIIRAFSLAEETGIMETDTIEYFGDIDPEGFAIYYELKTQYASYSIRLKMEFYEKILEAVRGSERKPEKIRGKIQNRAREVLPSALQEFDTETADFLQRMMLKDLCYIPQEALILVGEAEVENTTRRIRSNGVT

SEQ ID NO: 40636 - protein, 536 aa, butyrate-producing bacterium SS3/4
MIDKDFLKNFDQRMKCVGRYSVLCSNSFDKKLWKEYGIETRDEQMNMLFTLLLFIMEYSLREENCTMDEIASFVEDISYGYYGRKLNFEKSQEFARFMVEDILGNSGSSMYFKTFDYEKRTYQDINIRYIDNKVVYLENGVRRTSYYLTDEGYNMIFATMEMENNLKLSVHEMLFKLHMEKADYNRAVDDIKNIFGQLRKQSQKIEEAILAVRRNALSYSVEEYGKLVEDNISTVVETREKFRLHRDFIEEKIEEFEEKQMNAEEFTEKEKANLGNLRTIGRYLTQTLDEHQRILGQHFDLKKLYDEELENYSNMTLVQRFPFRSDVYDKILKDASLLKNADKIFAPLFRSRINKIFNPEKMMEYQKKLKKSDVEDESMELDFDEEKYNREKEQSRQERMKKYEGCVNVILEQLVIHKEMTLETLNISCKEEERERLLPTAEIFREAIIEFLTAGTIDIGTIQKEQTDYLMDASEGFVLNEMLLAILEDRRYRKIGKIHIFPMEDGKHVHFKNVMDEAGNRRNFKCSNVGFCYEER

SEQ ID NO: 40637 - protein, 248 aa, butyrate-producing bacterium SS3/4
MAYEAEMITYSQKIFYYLLCHGALSDLDAGVNDLYRAYVEHEEVMNLVKNQAEIADCKIERYGTTIYLMPDIDNKYLGFTKADLKKELCKPNATDRDYYLAQFVILTLLAEFYDGQGSTSKSREFLKLGELQNIVSERLKAGLALEQEREQDGTNLYTEMYETVLDYKSMSEAYESLKSVEAGSRSKYTKEGYVSIICNFLDRQGLIIFIPEDEMIKTTAKLDNIMEYKILNKENYARIMETLGETHE

SEQ ID NO: 40638 - protein, 1519 aa, butyrate-producing bacterium SS3/4
MSKISRIRILNLNYNNNTIKIDDETFDLGGQNTLISLRNGGGKSVLVQMIVSLFVNRTYRDFGDRPFKSYFTTNRPTFLITEWILDNGIDRFLAGMMVRKNQKEDNDTEELEMYTFTGSYSNGCKYDLDNLPIIRQDGNKKILKGFGECKNLLEEISRNEPGDFRLYDMASQYGRRQYFSTLRQYQINNKEWESIIRKVNQKESGLSELFQNAKDEKDLVENWFLRPIEDKLNQEKNKIDEFRKLAFQFIEQYRSNQSKILRKGIIEQYFEDTKPLKDMIDDYAQKDRDAVNLRTEMILYAKSLRKELDRLQTEIAAGQEKFEQIEREQRQIVYEQLSYQIYLSEDQKTEILSQRAQQEIEITRLTSLKNHLLRKIDTYDLHKIYLELKDFERQKAEVDAKLQVLLQKTEESKDEIEKIGCRLYALYSENAKKLKDQRQSEEETLAETERARENAQRERDEKEREIRKLSGDIGAKESRVRSYDEVEDSFNREFNAELRRNLLGLYEDGALEIFRKEIDAGLQEKKNKSVKYARKLMEQEQTRKKLSQEASDGTVTLNDIAHKFDHVSEKLADLERQKKERLRIMKYVNVDEEHLDRRDLILDQLDGKIRELDVARSRLIQKKGDQEKHFRQLKEGKTTELPENIRTYMEQNGIDLVYGMEWLSKNGRTAAENAELVKKNPFIPYSILMERSILERFQKNGEELYTSFPIPIIVKEELEQEQEHVDSRFAAYGNVHFYVMFNTHLLDREELEKILGKIRREIEDLKKAVEDKDADLETYRSYRSVVENQTFSTALCQQTEKEINRLKDERTAVKGRLEEIYREQSRLEEEKKEIETLADTVKEQIDGLKRMDVQFEILLKKYDQYETDRTSLERLKKENRELTEKQTALSVRLGELREQEMGLRALVKEFAEKIDREEKKQAEFEEIARTAENRDLSSLTQMTSEELEARYYALTKVISDSVEELRKSQTDWIGRISGKRTELKKKNEDSQIPEKEYQSLVCTEEQYDAWKRQKKQTERELNKANEENTALGRKEGALTTTITLYMKNLKKETGYEQPAERKTITDTEFEKRLNLKEYELTAHQKELSQLRERNIQIASQAAGVEEYVDEPIPAELISGDGLSSVDERMSVERSIASGGLIPENGADAYSETGENKILLAIQERIPDVRNEEMDVIKGYQKEIRRKITESSKALDRCRGDVSEMIRGIASGKTYADDYFKKTFESLLSQTASPRNLFRQFEMNRQAYENQLEKLKIDLAHIDDEQKNLEMMFLEYVEQINANIGMIDKNSTISVRGRSLKMLRIQVPDWETEKEHFRLKLHDYFENIVKLGIETIEKNGNLTEFLGRVITTRKLYDDVAGIQNVKIRLYKIEAEREVPISWSEVSANSGGEGFLSAFVILTCLLSYMRRDETDLFTSGEEGKTLIMDNPFAQTNAEHLLKPLIEMAKKTNTQLICLSGLGGDSIYNRFDNIYVLKLVESSIRNGVQRVDVTHMKGEETKRMVLSEFKMEQMSLFEMMEE

SEQ ID NO: 40639 - protein, 330 aa, butyrate-producing bacterium SS3/4
MKKHKVYLQELSAEFSEADYSKFYEVVMRRIENGELVPMKSAKNNGRKPALPLCFWEYEKEADYTELYEELKYRYHPRINTFYYREHPECYERDREKLQLLSDYLKDHSELLLVQETMNERSFEIFHREKYFQREGGLELCKRVAITPETLAFYETSEPLSYYSCSKQTPQNILIIENKDTFFDIRRYMNSGNDRIMGREFGTVIYGAGKGIWKTFEDYVNGAERYFLGKNALFYFGDLDFEGILIFEHLIEQKQYRESGIHIFKEAYEKMLDKAWQLGFSRLPDMKEKQNANIGTGFLSAFDAERRHQIRELLDMGKYIPQEILNEHDW

SEQ ID NO: 40640 - protein, 542 aa, Coprococcus sp. ART55/1
MALKYVMINDIIEEHNARMQNLRKYYPFFVLAETTFAQYKEGRYAQLDMGYITMAILRFFIQENSFNEREVSYDEYEEFMGQLLDRDFDVEIAGDDRADLIMYIFDKIKNDGRAFEFTFYDPGKKQRKTGRVKLIDSHIVDGKVLYFITADGIEFYLDTKEIKDESKINVQQLLLEKMIVGENFRGGIEVVRRINSEVNRLIREKDEIVNLLSIDVFKGAEEYENYMKTVGKWFADEQKLFAKNKALVDKAITKASYDNMGKGNLKAMEEISQLELELKRTIIKHGSLISSTMELQNISDNIIHKAKLQKLRPAFDFAGQLQSIIKEDRPDKILTILAPLFAPRIVKTFSMTSIDHMLTLKSEDNAKTTKVKKEQLDPNFRYEDELLDEQISANFTKLFHELLDQLNKWGHLSLKEFNGILEVKFGKEIYDNKDYYSFLTHLAQKDRYSVDEILAKPDTMLEGMLVDHIERIKKVDEKTLAASVSGDQAGGSRSGLSREMYAPELTLDAFRGMTFTLEFHPDEEIQIGEDMYVTGIQFNKTS

SEQ ID NO: 40641 - protein, 239 aa, Coprococcus sp. ART55/1; identical to SEQ ID NO: 40529

SEQ ID NO: 40642 - protein, 1491 aa, Coprococcus sp. ART55/1
MPSINRIRVNNVKYNFGTQQYDDFTMRMYGKNTLYDLANGGGKSILMLLLLQNLIPNCTLDEKQPVEKLFRAGGGNTVIHSLIEWKLDEADIKDGYRYMTTGFCARKAKDTADAGEVQKDTASIEYFNYCIFYREYNKNDIVNLPLSEGNERITFNGLKTYLKDLGHRDMSLEIRVFDKKGEYQRFISGYGLHESHWEIIRGINKTEGHVRTYFETNYRTTRKVVEDLLIEEIIEKAFATKTGRNGEEDTMAETLLDIKDKLNVLAQRKRDIANYDHQIELINVLEGKVNSCVGLYEDNDRICKGLADVYATGRACTQEGDTHMEELAKAKADAGEQMEQQNKRLANLRVTRDYLRLEDMNRKMDDTATQIEDNEKKLAELKNQIGYKESANDYLVYRENKRQYEESRLIVDNIRNNIGSSSEKMAVYAYNRRIRDEKKLAELMAAREEAQTSYDHALEEAEYCRKVMREGEIAQAVAENNIADATAKIDEISARISELAASVNLLVVGDVKDMMNKAQEESDRILAEMTELEIAIADGRTKLYDDRYRLTTVQAEYDALERSCEDARLDAEAYRQSGSQLDSIMAVYSVENPQDITGVINDRIRGTITETIKRQQEIDRLTKLAKCYEDGRPFPPSEGAETVINYISTRHGLMAMHGADYLSALPGDTKEELLQANPYLPYSVVTKGFDSLEDDINLGSIDTGSECVMVYDMDKLSDSAIVPAENMLIIGRDRKYFMSKDSMEDARKANADKIAGLTEEISLINEKLATYQEDLAFVTRLVDARYTGAEDRERELNQALLDKKDELEELKTSIKVTETELNNNTERYGDLQQSQQKESDRRQTFVMIEQLSDLARPEEQRLAEYKQRKSDLVAKLSGLQSDVLKWSTTVGETESKLAGLTRNIEDIQYKWTEYFEPYLPKSENAGVAENTDGVGVAAAAWQDGIPEEYKETLDISDERLEQEFMAMLAVSKEHAPDLEDKKKLMDALKKSMDRIQKTIEKRGFDMAVFAEAGELYPTSEDNLREMDDELARLTLIEASLMQQQKADQKAYSKLEGSIEYAIENINRTYGDSSYVREEISAADADTAIANGDAVLADMNRIFKEAEKAYSDYYKQYGFMVDLYKDVKRIVDTNDIDVSGGNVLDEDMDTLRQLFETSLMKYDRSMKALDRAKNEIMRFKGQTADTLVEMGVFEMANTIRQDVQVPDTYSQAKELLANLLQIIEFIKLEKERVEKGIEDMVAIKENFENQCVQRCMDVKTELEKLPKLSRITVGDDVIKMVDLTIPYVKDEFVKQRMSDYIDDIVKGADAYEDERKRIKYIRDCLGLKKLFGVMVTDMNAIRLNLYKRERIKEQSRYLRYEEAVGSTGQSQGIYIQFLVAVINYIAGMYSLAPEESVQSKTIFIDNPFGAAKDIYIWEPIFAMLAANHVQLIVPARGATPAITGRFDVNYILGQQMVGGKQQTVVVDYTSKTDQEELEYQELSYEQATFDFI

SEQ ID NO: 40643 - protein, 499 aa, Tepidanaerobacter acetatoxydans Re1
MDRVEKGLKDRLKKTQAIRMLGTGMDVGDLNDYAHEICLFLLLKVFRREITENPNRTRQDLIYMTEEILREMDFVASKEVVERLVDGVLWYKDPNRQDPFSCYIFDEETRTHELYKFRYLKPDREHSQWEKGGSTVYMLTEEAQEIIFITREILEEFGFDIEQFYTLQLIKSGNFNKAQNSVSNLIARVRTLIRREKDYRQDVLRNPQIIFMDSKNRRRKSEDEIKRQFEDEKKVFEDMFSWKNRLNSFPAEARAEAEQVFESLEVARALHDVLAKLVVENMAFEVEIRVKYPDSFWKTSNLTFKKDIWQNIIDKKGLANFDVLESLLNPLFSPEVDFIYPLDWAWEEQKIKKTEGDEEIYEDFGEEETWQPKSADWEIIVELWEDIFDELMKNNEFSITELQDIDSFKKQKWLMQKKNIELFMMFVVTEVELKLEEQETNDDRLELFRRLCDKNPKYKKLIGRRISSVNEEDKKPLRWEELYVSPYKIKLLPSKSNLE

SEQ ID NO: 40644 - protein, 258 aa, Tepidanaerobacter acetatoxydans Re1
MITHEHLQKGSEVFFSLLENRILPLTDARVYSYMEEPEIREVVKAMAQGAGLRILDTRENLHIVSQARDSIFATSYTHMKSKYKLDRKKHFYLANIIICIYLAEIDKENDIRVRWEEEGVTYYKLEEQVTKVLDSWKTRLDEEDGFAEEWGIAVEEIYDIWNNDFSMYKESKTGDVDVQRNKNTRLGFIYEAMRPLADQKLIINNVNELKIIPKIELYERLNYLYHQRDRYKEIMDLIQRTEEGITDAENNRNQDNGL

SEQ ID NO: 40645 - protein, 1495 aa, Tepidanaerobacter acetatoxydans Re1
MPRITGIRITGCKYDGFRKYHENSVYDLTRDGEPDHTLFTLKNQGGKGVFMQLLSQIVLPETRWGKQGGNKITGMFYDQKNRFRPYTFHVMIEWKLDTIPEKWLITGICVTAVRQNLNDDDEAEERAGLNYFLYTYEHDKNDIFTLDNIPAYDSRTGKVTEYNEFEQFINKYQRYFIKYSKSSVRRLDSDYYNYLKSQGIHRSEWEVLKLINRQEGGSGNYFSRAADNKTVFDKFIIPAITENMRNFSEGDQDSLKGIFKSNLSITKNLPVLIEREQDYRKLLTYIEPLIQLTEIGLRRQRILNNSIQEGNNLYAGLNNRLTTIENDILKWKDEREKTQAQIRELEYEKDNLEYAREYRRVEQLNSQKLALDASINEIKDKIEELKIDIKRYGISELLLKMSKLEDEKQSHINKREQLIKDLNLKDTEEKIQTLEINIRSKWENTINRWSKISRDHLSYEAYLDGKINELARDKKREDTAANDEKLKIIQFQSDRNALENKREELSRIFDPVRMILPEMLREELKGQDKAEKTEIEKLEKDMDNINQKIYDCRIHQNGKEKDIKYMQSEIDKIEAEIAKLKGQEDSLKLRIANELNLDALNETYRDSWLKDRLYDLEKLIQEKEIKLDQLKQSLWENNIDKSLNQEDYWVPNNDILSIKNRIKGLGINAQLGTEFLSSLGDDDKHRLIEDFPSIIHGIVIANLQDWELLKENLKENIFLRSSVPIYIRSAMQGKGKYAFEIIAGDELELVLNPSAYVKWKNNILDRDGKLKDALQVVSQNIHKLQDLMKDIKFQQDKESSEALYIKLKEKEEELEKLKFDDIKLKETISTLQEDLKKIGCRLDNCKKQNQDTAKKIDILSEFIGRLQQIRVREKEITEVEEKLKAINLRCERLEEQINEYRRLKDKDVQNHVTWKIQVESQLKEIKAIISDAKFVETGFKTKIVESTSEPVYSLIDEDFTLDISRWESLSKDMEIRNNDISLINKDIELVQQKLADVENDLKQIDKNWQEYEPIEGTADSLSLKKDFIEVELEKAGETLAQLSKTLVKVETKIEEAQKQLAKIQRQIKEEYGKPTQIWADADLDEKEYLINKGLKDNKSFLLETEDIIAAREQDRNNIKDVISDIKIYSELDFKKGKISEELMIKIRENSRRELDLWEDKFKRSKDQLLQNHQQAGQNFQEFIDIVKKEIKDDILKNLILSSLQDTQIEMYDSNLVSFYTMKDHFQKEINSISSDKSKAEEIRNTWAERASRHALAMVESLKEMVAGMNYVNENGYVFPLLKLKEEEELPKNEEDVFYTLRDYFVESIAEVMKEYEDIDDIEDEIIEKMMGDQAIFSRSVRGRYPTLMVYKMTEKNEFRYAKPHDYYYTTWEAINKGEGDQPEGSGGQTLSISTFVIMMLMNYKKRHFGNNNPWTVLILDNPFGSASGNHVLDPIFEIADKLNFQIIAFAAPEIIKAEISERFPVFWALDIGDEDSGKSGTVTGRVVHGGRVNKI

SEQ ID NO: 40646 - protein, 355 aa, Tepidanaerobacter acetatoxydans Re1
MYNLIKVFLNDYKQKNRKSFYLNDLEKFLLEKSGGFSAYHKKGGYHGLYEGLERLLQEGYIKPMKTVGYNGKYPPLKLRWYVTEDVITPRWKSEDILRLSDLLDLSTYIKYPRLQTDREWQFILRIYEFLQNRDWREWASCEERCLELFDNEKFLDPKEEPDNGVIKRLKLSYEDLKMKKYGQMFVYWNRGVRQIKTAIILENHSTFFTFKRAAAKGYDLFGIIPDAIIYGQGKDIISSFAFIREIADIGDLKVFYFGDIDPEGYMIYKSLKETYPSVNISLQLDAYKNLLDFGKSYPIKKAQNMNIENLNFVISEFTENNYHETVKHLKRLWYANRRIPQEFITYEYLRQPTNT

SEQ ID NO: 40647 - protein, 488 aa, Enterobacter aerogenes KCTC 2190
MSLGFLEQARNESMARRELTIQSHALLVVRTLDSIYSALQRNPFDGFKLDALAAIMYLFDAMLYYADRERQPGMTRKEAELCLVGHLNEAYPGQEASDYAQVASKIFAAIKDPFRLSYYDFSQRTHSEEQIVRLVRYDQLSGSDDILWSLTDEGMLFYTLRLDETPIERAAILAWRTLKTIRRGEIDKAVHQIQSTQRQLEQYLIGMRMKVRAAQSGDLSASYAHDIRPVLNDSFDKTREVLEHIQNSMSAITEMLVEGSSKLNPDKLNKLRKAQEIFAEVCAFTQRYQDCLLDVNKDFERARLKLIIPRDNTLFRETLEKGVLKPLLSHSPDTVEKEIDRLTARLLAPRRQDDDRHILFDPEALLNLYLDRFEQALPHEIQDPTEQPVAIETNLRNIPESVIKKCSDWVSDRLKNWGHVSFRDVFDAYECEELSEQEQQVCLLHIGSLAANSDPAIEVEIDDAIETTLWRADNIKLLKVAPLHPFEE

SEQ ID NO: 40648 - protein, 1478 aa, Enterobacter aerogenes KCTC 2190
MWLIKRVYMDGAGHEEAFYKDLTLDYIGLSQAVGSPVVEGLRSPVRNAKVVTSTYQQLVNGGGKSTYIALLLSIFEPSVSDFTQYLANHRQSEYHYRNYFYKELSVVLVEMVNESGQTLLLGHAHQRNGDDVDRTLFICDAPDSLMGAPFDEVPSYSRAERNSELRPYANSLRSFDSWLSLKASSEGGMHWRKTTRQNEWRAFLLEQQINVDLIKTMVTFNSEEGGLTRFIEYKTEHDFLGAFFACTMSKDAAERLRELVAHEVERQGELEGIRRNESFLKDVLANWLAFLEPAKQLESIQAQQQLLDDGFREAMRDLAAFVGDAQVEQTQLEDNMESLQTHIGQAMSLREQLGKRRALLEYDFVQYQFDKQKAIVDALQDEADTNQRQIEITQAAIDYKAYAKALNEYRQADEDLKVFQSETERPLQVIFERTAGEALGTLEWAIDRHRQQEATLEEELGQMDRESNTLKQSYDELQKMLGGLEADRERYKRDKRQGESQRGQLCEAGLIQKDETPVAAQYRLELTLRNAQQSEELAHTILHQKEQALEAQLNVVREASIEKSEAQQKLILAEQKHQSAVDSALVLAKTYQKLPTSMQHDLDIEDTSWHSELCGLQLDKVLNANSHTLNGMKERLLQARHELDELRMTGHELVAKQVNEALEAFYAAGIARDKLWTFPHYLASVYNDDAQKIAAVIDQNPGRYLSLVALDNVTFEQVHKISEILPWKKAPIAIYLLDEAQDLRRETSELVQVVLSNHDKHGYSQAAYEARLQDLENIVASQEVSVKAAKSAFKVLEYFSNEWRLHYEQYGKHWAGLLDQQEQALLILENADAVLKQAEHDEQTLRDEKRDALVRLNNARQQKIRAEKAHDKLSLFVETEWAKRETAIMKMEQLAAQIQRSKDTICTQKERLERLNEIEKNKLSEKTLLNIQMGNWSNLCNEPFYSEITATEGMVGRSPEDAHEMAAQAHKKLLEAASGDQVTALKQQLKDAEQAQRSASERLIAHPTYNTYPDEVKAAAINELTVINNRIVRLNEQQKQFTQNLINSQVTLQNFSQSCEEASKAIDEDFVWEEKPIEIETIQTSLAEIVNSLHEIEYQLKLHLEQKKLQLQKIENVKERLQNAKTAQAMIQHITPTSAAGLPGRIQSITEYADNLATQCQMYAGLNETLKQQNIRVSTVWGKFRKRIEEELAKDPDAQASQEYLRQLDSIATYHEVLGDLDRVGTGITQVFEAVQDSLEQFQRSIDLTVTHLTAHLEGAIKLLKRAMSVKIPEDCPVLPGRPIIKMTDRLNDVAADLRGFASSRLQQWIAKGQIPRAPNRDALTADLVQSVFGEGELEVRLLKTNASRPQWTPVTRLEGSGGQRLTSAFLLFVTVGKVREYDTGISSAGFLLADNPLGKSNADDLMRIQTQMAKAYKIQLIYLTGISDENAQSMFDNHLFLNKVQKLRRRDLVTVDKERHALWAASLAAKPQFDPVI

SEQ ID NO: 40649 - protein, 347 aa, Enterobacter aerogenes KCTC 2190
MIWLSRLESTATKHRLAVGKAARTVKANAVLDEVLRAHNQEALSQEAPDLLSQAVTLLLERDWRAQPKHKASWQRYWRGMSLPSTFVYEGAIVPTKTTSEIAWHPWLARRITGQLTQPIKARLQQLNTYLFRQTEGDKSLFPGLLGHRERSLLIFGDEKALDSLPPDGWKHVALTLADMGAFRRAPPLPYESSCCHDLPAIIVENSDVYYRLCQLNRVQTRWSLVIYGAGNKVSGQAECVSQLLEVEQVKQLLYFGDLDVAGLKIAHQLRCKLLSDYGISLHLDEWLYNELILNGLMTPEGNANNERFDFELQCRWMPQFVLREMKTLLANHRRLPQEGVASLGLVI

SEQ ID NO: 40650 - protein, 497 aa, Caldalkalibacillus thermarum TA2.A1
MDGRLASITAGYRERISRIALFDPLFELTRKTGTDANGKSIDYFGLGLLTLLFFFENMLMRNRRVGVKALSEYLYATTHDQYDLDLPAYEKIAREIITTFRPPHGKKRARSFFNWETKQEEHIQYAILKADQFDPITNSQYYTLDEQGLELVFATKEYYSEFQLSIHQLVLRKQLEKGEFANALRQIDEMRVEVQNLHQRMVKMRHEIQRNIVSEETYTRYKKILEDVYLRLEREHDEFNELRSFVEATRQRLHYEAAADTEQRSYQYIVQIARELDEVHHEHRQLLQESVELKTTALQAAQESLYYVGIDSFNFSQEIVSRAVSSPLPVKALKGLAAPFLFVHHERTWSPWTVFAEQRLDDEQDEEMETGFIDVQAGEEEEKHHVYQRENFSKVMEIVLTALDGQEEITLKEVVDHLRQTDQEDVLQHRSFYDFWLYLHQYSPVSAKQADDTGSGLMDKALSLIPGKKIMVREAAEVLPVVSRYTIQNMHFKLEDV

SEQ ID NO: 40651 - protein, 264 aa, Caldalkalibacillus thermarum TA2.A1
MVVYEHAQVMKAFEIYALLAQNGFGGAEEVREYLADDHVRSLVDQFARKVDCVVITAGDKLFLIPETKLSPFHVKNETLKRTFLGAKATNTDLYMMYFAIIVFFGEFYDSYTTMEATRDFLHMADWVSAIDKRIQALKEHDGATLREKEQEYDTNWQAVIDKWEAMDDIKETSKKQSGNTISRFSFVDSVRRFLEAKELAVNIGNNELQLTEKAKTIVQRYYMDLEYNRDILAFMYQHDQPSEETAHTTPSTQGNGGETNAGDL

SEQ ID NO: 40652 - protein, 1476 aa, Caldalkalibacillus thermarum TA2.A1
MPAISKIRFTNVVYEDGNKRYNDDLFLFDGHNGAVLLENGGGKTVFIQTAIQAILPHASLAERKIKDTLSLESHHAHIAIEWILNDRPRRYALTAVTLFLTPHGVDSYRYAYEYAEGDAHAIEHIPFVREGLDGKKRPASRQEMQEYYQRMSAQSVNARTFATIQEYHAYLEEQFKIIPAEWQRIVTINGAEGDVEAFFENCKTTSQLFEQLLIPTVEEALAGQGSKDFAETFERQREHFKTYKRLREQIEENERLEREISRLAGVYAQLFGHQQSFLHTQQRAKAYHQLIGGEKARAEQELEHNQRREKEWQQQKLALEKREASYRIAQLEEKLKELEQTCLLAERELEQAETELRLKTKRYHSLQAARLRQLIQQEEAQLAHCERELSRLDADEETAQLQEQLAKNSAALKGYFVKEEKRRKRVYQQILGQLDQQQHEIEAQKSALETVTNQREQRLTEKAKVEGRIEQTREEISRIAHSVLDRPDSETVEEEWSKWETAYNQLDQAIISDKEKLKQLEQQQKDKRNALHSVDSQISVRRASLAKLTEQKETIEAEHDTLLYKVQEMKPEWHHYESLYLRQASIVKQLDEKLVYLQQELEELLRLERLALRFVDDYKERSHFTADPLLAELVDKWADQFTVLETGTVYLQRAAGTMNITEEALLARHPLWPLTVIVSDAEYEKAKHRFEQQAEKMTHPVYVVTVEEARSMLQEVPEPEHPVLPRTWLQNINQQQFVAWKEQLETSARQQVTERKQKQQEIAAWEQLRHALKRFYERYPHEQYHQLLQEIDSTQEEVRHLEQQRSQLEWDLEQLEAELQATHKQMGEAQQQLQHLEQKLSTAQHYFHKKKEVARLEAEAGTLEQEIKILDSERIRLKQTVEQSERKAQELHQAAAHAQRDIADLRKQPFYTDVDDTQPLYTTESYEALKLERESLLGRLNQKQENRSLLDYKMKTAAEKIRTLQKELNDLYTETEEMDKGLTFPPNGLAEMDRLRQTIKTLEKERDQAQKKWEASQAAKIKQAEQVRIRKDDFRKTYPDDEITVFSASLAQVAQQLKDEQEQLAKEKNFLVQQRDTLTRRLNQINDSYMLLDKKHEAFHYLADDIQPAILTEEEQRALIYRHNHMVKEMIEQLEVLKKTVEQHLESVREARQRFMYFCHDQLRDIKLKEMALNGIQHKETYEEIAEWVQLMKKRIRHAIRMAEDDMRGHDQQVQQFITHLHTYLQTIAAELRYIPKKTRVRVDEQWKEIYLFKIPEWNEQEGKEELRKHIDWIVNQLDSDQFKDEAGKEDLAKVKKQIAKWLHPKQLLRIVMKQNEMKVSCRKVSNDGKVSNAPTSWEKSNKWSGGEKWSKNMTLFLGLLNYLAEKRQHLTPGSKRHRTVIVDNPFGKASSDHVLNPVFFIAEQLGFQMIALTAHAEGKFLQDYFPVIYSLKLRPSAAGDRQVMTKEKEIRHAFFRDHDPQALLRLGEVEQLTMF

SEQ ID NO: 40653 - protein, 343 aa, Caldalkalibacillus thermarum TA2.A1
MKEIEKLLLAYIKSYKKVMIPLSELEARVPGDVSYRQFAEAVHSLEQEGILARVQSHGENGKTPSLAYTYRIKKKALWQTLHDEIQRFQLTVHPVLKLGAYLSLPEEVWQQDRPYIEKIDAYLKTYGLPNEDVPAPERAYELVGDEKWIVEGNGKEVLERIQLWERLKIIPVADPLMLAVNPNAFQHEPHFHLIVENKTTYQALQPVLSDTFFTSLIYGAGNKIISSIIHLEAQLHLEGQAHRLYYFGDVDLEGISIWYRLHQKIRAEPALPFYRALLQKPFFPGKETQRRQNEALTAFMAYFSEAEQHHLREMLAQGGYYPQEALTTFQVRHIWRNASWTAD

SEQ ID NO: 40654 - protein, 463 aa, Sporosarcina newyorkensis 2681
MEEVDKQIISIFNTDEQQPEMARAMRDIISLAGVMKDLSSEAVFHSPLEMLRFLRIIELIHEEAYGLTEPIDSAETLYYRYQSRFRDEEPPSKSRVDQIVTILASNNWISKQTQQIKMMSVGKRMMHSLTRLANDSLAYYLEDDIGRSLFQARRDAEISEAYDDKGISGGNVIASMIRNVREANETLTERELELLADRNALPQLQVIHTLMEDLERKLHERFNQFETIEDSLVLSHLMQNGAGVLAEGTSLSLGMVNKYLQFMNVQQTPLKTAISPEKVRRFITKMFHPPVESEIPNAHQLFSFMEQGQYEGEELDGIWIPVKYASPLSPMDIESGIDFLENYEPVVADIEEERDIEFRRETLEVQSIDDLVDEAIWLLTKASIDTDKIEQYLAEKKEAGIEETMIETSSADWGDAIRQLLGIAAMEANKKVQIKLQQHVKELDKEWEWIRDDDRKFNIRKRE

SEQ ID NO: 40655 - protein, 229 aa, Sporosarcina newyorkensis 2681
MTTENSTFEKENSEDYSLNSLQSLRSILTTREEQTFMSILFSSSATIRANNFGLSRKEVEKLLGVSKEDAYFHSFLSRVNQAVGRYYRLIYDEERDQVVAMLRVPARSARHTLSEEALAVLLFMFYQQEVLKHEFTLLTQLLEAFGHEIKKGSRRIQLAIDTLRKIGALEIETESGKEDAYCLTAIGVHMFSDSFLHRMVEFSHSNQLSKEDVMKFFNRYNLYEKEGFL

SEQ ID NO: 40656 - protein, 956 aa, Sporosarcina newyorkensis 2681
MIPWRLRYSGIRDYDAEEMILENANEHILITGPNGAGKSTISFCMGAVLRSSKVEIEGLKSQNISEDETWRAAIHFLFKNEGLSRIDGPLFIEFRLICEQPPKQPIKLRYEVHDGDEMEQLELRQTYRSGDANKNNLSAYKRELQFKYKIHPDLYYLIWYQQEVNQFSVMAPEERFRIFSEMHGIDRIQKDWETSLEIVKEAREAYVIATNQQKQHEFTLSVARNNKDRFKNNQKRIVENGMLFASTTYALQLGAENERKEVEKYIEERKLELEEVDDQAQEFVEKLEEKNSNTQQLQEKQQEVGELLEESKVQSNEQEEKIEEVREEVDTLQSELSTLQEAYSKLPYPEVETRNRLAAANDQVETLTRKEEQLKTLTDKAGHSIEEYRQRQSKLQATIEQWEENSQIHTEIMNRYLSSYQLEKDLADLNHSLQERKQLLEQKQAEHRIFKDELAMLEKNQIESERQQEAIRHMKEQNIKAFTLRHFIKLMDQTPIENERLFDTIKYTIFYDAASCQPINDLYHVSLKKLIPNRVIIDLPNLGLQMQEGLSQKEQNHATRVLWWIEQFFTSEQPTIQKNWLVDTRGTRGPQERNTYILSKRALEERKKFLIRKIEEMQKEIDTLSLQSNEDNETFRVWNADVQKVREAEAFLSLKADQQYRIEQLVQLKTEQIHLVVQKKEYETETKEIWKEKIKQEGVVSVLLEYLAVYEQFGQHSEKIERLQKQQQLLKHLKQELIVLRNKVEAYEDELDRLQDSLRQLQREIIDLKDQAEANQRTKKQIANQLSEKEDERIALSKDETKQKEQLNDLRLLVPELVDQALMEEQLQESKYTLTVKQNQAMVGFENARNEQGIDQNAIENFLTLEQEVLRKEEELHSAKNLLEENEERAIQNEHRLETAIDMQVTKINLLFQQYMGEFQFEGQIKFEKFMDKKTGRSSNYLFMCVKKAIGESLKM

SEQ ID NO: 40657 - protein, 403 aa, Sporosarcina newyorkensis 2681
MQTVRVFLETHICKAGESIQQVGENEWEIQKWTARTYKTLGNVLASDEYDIHPPEDIVKMNLKPNSRRDSLPLSAELKQEALLKGWLVQEIRFKSDGRTPLSSTYRMGPGLAEYERLKRQGVMEADELLRQTLLGELEISKSVLHESFIQQAQKFIVEPKDEESWGKERVRKFTEFLIAYLQLKRQQSDMEFKEIGAVYYKRIGGSKVFDAYREPFIGRIEKWIDAPISEIGIVSTGSIVPIFFAGNLTGKFSQYSIGTVHATTEIAVTDESYVTTATVLWLVENRAVLTRMAKEVDFLKDTSSLIIGVDGQVRGAHRKLIQQLCRSSSIQQIVIWVDYDTAGRIIAKDIANLTEGLSVRFIGNDGNVFTSFQKYTEWTETISEAEQEMTLRGPAEWRKWISR

SEQ ID NO: 40658 - protein, 505 aa, Sporolactobacillus inulinus CASD
MEELDLREIVSGYKERIRRLALFDPLYELERKREQDHEKKDIDMKGLGLLALLFFFEQKLMRQYKAGAKQLAAFLEKTAEMQYRLDHEDYERLARSIIQTFRPTTGKKRRYSFFNWETGADDGIDYSILKASSFDLKTNQQYYTLDEDGLELVFATKEFYSEFQLSINQLMLRKQLDKGEFKGALRQINEMRIDVESLVERMTRLKHEIQRSIVSEETFERYKQLLEDIYGRLNRENDEFKELRAFVKETRQRLYAKDMHKKESRTYDLVLRIAHELESVHYDHTRLLQQTGDLKNTTLLTAQESLYYTGIQAFNFDQDVSAKIIATPLPLEAMSGVLQPFLKVEENKQWSPLTILADQKINEDRESADDQGFINVSSADESLPYRRILTQKYRELMALFLRASEQSGVRKLSQFINFLEENEHSDWVEQRYFYQFWLILHQRSPIRNGEIEDDDGAKAVLDEALALLGNRVLHVREGRGIIQTAKRFSIQELLIHVEEGNNELS

SEQ ID NO: 40659 - protein, 247 aa, Sporolactobacillus inulinus CASD
MNYPEQKVIQAFRLYTILARDGAAAEDAVQNYRADDAIRGLLDTFAREVDCVVISTSEQLFLVPETKLSPFHTSNDWIKRHYLRTGATNGDLYLLYFATMILFGSFYDTYQSQEPTRLFLRLDEWVRFIQERIDQLKTHDEEELKQLEQEFSYNWRLIIEKWDDMDDIKETAKKQSGNTISRMSFINTVKRFLTDQDLVQDIGNEEIRLTEKAKTIIQRYFMEVEYNKGIFEFIYGFEGDEPHADDQ

SEQ ID NO: 40660 - protein, 1470 aa, Sporolactobacillus inulinus CASD
MPTISKIRLTNVIYEEGNKRYNDELFLFDGHNGAILIENGGGKTVFIQTALQAILPHTDLADRKIKNTLMLGGAPAHIAIEWIINERPRRYVVTAVSLFTTKNALDSLRYVYEYHENDPNGIEGIPFVRDIRGGKRPADRGEMQDYYSGMHEKTLSAQTFKTIKDYKSFLEEQYNIISSEWESVVKINSSEGGVEAFFDECKNTSQLFDRLLIPTVEDSMVGHDRHLFADLFEKQLESLKNYQKLKETIEENEQISSALEEYSKTYEALHERELTYTKTKQRAKGVWKELTDQQHKQQAEQEANGAKLLEWKKDSFTHAVKAESYKIFTEQTALEQLEQAYKKALAAQTETEEQLQKDRHAYASLQWAKATAQHKEQIELLQECERQLEAMDQRADARELRNHFERAKRQLLGCLLHEIEGLETTEQQLKTDLFPVIEQIDEQEQMQKSCSENEKKLRDACANIEGRLQSQKEALAQLIRELPINPEQETVKDQLVKWTERDQFLDESIIALMQKEKGLRASQTELQKQKSALQDEKNGTMREADQLQNALAQMEKAERGIIKQLSELRAQWGGLETVFLDQDSIMERLRETMDRLAAEREELLYKERVARRFVDDHGDQEQFFGDAYLDKRLPTWKNQFAFLATGVEYLQMVDDSEQSRMLGYPLWPLTLVTTATEKAKLVKKLDQVASRLQYPVTVLSTEEALSADVQNAVQWVAPEQWRDNTNPDSFAEWKKRLGGEAAQATEQRVASERESARCQQTLHAFRSFLNEYPYQTVEEKRAKKNELQNNIETLIMSIRKSEQEEDDLEAELIRSKAKIDQFRDERSGLALYMEKARRALVIEKTIEAEQGLLKQAKENVHAAEQRLAAVLDAINALNEKRRSIDARLSNVSAELRILKRNDDYLALRALTPEKTDKSKAVIKEQIKNLEMRLNQINKTRGEWEEKRKGAASEIKHLDEAMSRLRLEYDAIDETQVFPGDGDQQLILLQSRIKQLAKEEKRRADAAQAARSEKDKQDGKLSSRKEQFQQHFPNEAVVSFHAYAGNAAQDLYDEKKRLNERKSYLDQESSRIEKELTAINQARTQLDKFEIAHHFTAPDIEAIALTSEEINDFTYNRKKSVSGITRGLEENQADVTAGKAEVGRAQQTFKTFCRTQISDVKLRQMAISGIETKQSYEEIVAFKKNMSLRIERISHYAREHIRQSDKDLQLFIDQIQTHLRTLAEELRQIPKKTKVKVKDDWKQIYSFTIPEWKEEDGKARIRNHIEWILKKLKDPSFLNEEGRQDSGKIRKALDTWLQSKQLLREIIGSDVLKVTLRKVASDSTVSTRYYTWETSNIWSGGERWSKNMTLFLGILNYVAEKKKHLKSNGQLHRAVILDNPFGQASSDHVLSPVFFVAQQLGFQMIALTALAEGKFLQDYFPVIYSCRLRGASDSGKQVMTKEKQISKAYFEDHAPQSLERLGETEQMGLFD

SEQ ID NO: 40661 - protein, 338 aa, Sporolactobacillus inulinus CASD
MDEVTKRIATFAKKTINLDELQQLLNPFFSSYTDFAEAVREFERHQVLVMIRASGRTIRTPALANRYRINKSAMSGDYHKELQHYRSKLHRAISLDSYYRSDPELWASDLPDLIKVDHYLKNHGFPQEAVPAPERSFELVADEKWIDEKGGRELLEKTGLYARLNILPVSDPLMLAINPRFIHESEQTHLIVENKTTYQGLLPVLKQTRFATLIYGCGKAVIKSIEQFSMQYPVRAAHRFLYFGDLDREGLSIWYSLNQKQAAEPALPFYEACLKKKAAAGKAYQQARSTAIDAFLTHFPKPEAQQIQSALQNGNYYPQEILKTNELQQIGREADWKN

SEQ ID NO: 40662 - protein, 489 aa, Brenneria sp. EniD312
MSLEFLEQARNESMARRELTIQSHALLVVRTLDSIYRILQRNPWEGVELDALAAIMHLFDAMLYYADRERQPGMTRKEAELCLVGHLNEAYPGQEASVYAQVASKIFAAIKDPFRLRYYDFTQRTHSEEQIVRLVRYDQLSGSDEILWSLTDEGMLFYTLRLDETPIERAAILAWRTLKTIRRGEIDKAVHQIQSTQRQLEQYLIGMRMKVRAAQSGDLSASYARDIRPVLNDSFDKTGEVLEHIRTTMSAITEMLVDGRSELHPDKLNKLRNAQEIFADVCIFTQRYQDCLHDVNKDFERARLKLIIPRDNTLFRETLEKGALKPLLLHSPDTVEKEIDDLITRALAPRSQDDDRHILFDLEALLNLYLDRFEQALPHEIQDPTDQPVAIETNLCGIPESVIKKCSDWVSDRLKNRGHVSFRDVFDAYECDELSEQEQQVCLLHIGSVAANSDPTIEVEISGDAIETARWWASNLKLLTIAPVHPVEE

SEQ ID NO: 40663 - protein, 1478 aa, Brenneria sp. EniD312
MWLIKRVYIDGAGHEEAFYKDLTLDYIGLSQAVDSPAIERQRSPVRNAKVVTSTYQQLVNGGGKSTYIALLLSIFEPSVSDFTQYLANRRQSEYHYRNYFYKELSVILVEMVNESGQTLLLGHAHQRNGDDVDRTLFICDEPDSLLGAPFDEVPSYSRAERDSELRSYANSLHSFESWLNLKAGSEGGMHWRKTSRQSEWRAFLLEQQINVDLIKTMVTFNSEEGGLTRFIEYKTEHDFLGAFFACTMSKDATERLRELVAHEVERQGELEGIRRNESFLKDVLANWQTFLEPAKQLESTQTQQQLLDDGFRESMRDLTAFIGEAQIEQIQLEDDTGNLQKHIDQKGFLLELLGKRRALLEYDLAQHQLNKQKTRVDALKDEADANQRQIEITRTAIDYKAYAKALDAYRQADEDLKVFQSETERPLQVIFERTAGEALGVLGWAINRHRQQEAKLAEEQGQISKESNALRQSYDKLQKTLGGLEADRDRYKRDKRQGESQREKLCEVGLIQKGETPGAAQYRLELTLHDAQQSEELANTAHYQKEQALEAQQNVVTNALVEQSKAQQTCTQADLKHQSAMDSAQGLVKTYQTLPASTQHDLDVEDINWHSERCGLQLEKVLNANAQTLNGMKQRLLQAQHELEELKLTGHELVTKQNNQALEAFYASGIARDKLWAFPHYLASVFHDEAESIAAVIDHDPGRYLSLVALDDATFELVHKISEKLSWKKAPIAVYLLDEAQDLRRETPELVQVVLSNPDKHGYSKAAYEARLQELENAVASQETCVKAAEGAFNILESFRGDWRLHYDQYGKHWAKLVDHREQARLMLENADVALKQAEHYAQTLRDEKADALARLNSAQQQKIQAEKAHDKLSRFVEMEWAKRETAIMKLEQLAEQIQRSEETLVNLREAQERQKELADNKRAEQTYISIQISEWNKLCNEPFYSEITATEGMEGRSPKDAHEKAAQAFKQLLEAANGDQVTALKQQRKDAEQAQCYASERLTAQPIYSAYPDEVKAAAINELAVINNSIARLNEQQKQFTQNLINSQVTLQNLSQNCANARNALDEDFVWEEKPVEIEAIQTSLAEIANSLHETEYQLKLQLEQKTLLLKKIENVKERLQNAKTAQATIQSITPSSAAGLPGRILSITEYADALSRQCQMYASLKETLKQQNIRVATVWGHFRKRIEEELVKDPDIRASQEYLRQLDSIATYHEVLGDLDRVGTGITQVFEAVQDSLEQFQRSIELTVTHLTAHLEGAIKLLKRAMSVKIPDDCPVLPGRPIIKMTDRFRDVTADLRGFASSRLQQWIARGQVPRAPNRDALTADLVQSVFGEGELEVRLLKTNASRPQWTPVTRLEGSGGQRLTSAFLLFVTVGKVREYDTGISSAGFLLADNPLGKSNADDLMRIQTQMARAYKIQLIYLTGISDENAQSMFDNHLFLNKVQKLRRRDLVTVDKERHALWSASLVAKPKFESVF

SEQ ID NO: 40664 - protein, 347 aa, Brenneria sp. EniD312
MIWLSRLESTANKHRLAAGKAVRTVKANAVLDEVLGAHSQEALRQDVPGLLSQAVTQLLEGDWRAQPKHKASWHRYWRGMNLPNIFVYEGAIVPTKTASEIAWHPWLAQRITGQLTLPIKARLQQLNTYLFHQTKGDKPLFPGLLGHRERSLLIFGDEKALDSMPPDGWKHVTLTLADMGAFRRAPPLPYESSGCRDLPAIIVENSDVYYRLCQLNRVQTHWSLVIYGAGNKVSGQAECVSQLLKVEQVKQLLYFGDLDVAGLKIAHQLHCKLLSDYDISLQLDGWLYDELILNCWVTPEGNANSERFDFESLCGWMPRFVLREMKMLLATHQRLPQEGVASLGLVI

SEQ ID NO: 40665 - protein, 521 aa, Desulfosporosinus meridiei DSM 13257
MFDLMEHLKDLDTRIDNIKSYNAFFAIANSISKDKCPYDPYVMVFGLLTFLFYEGKLALKKIDVSSIIDFYRKLIAETMDAELSLDDARDLTYYLLEKMQNKGSGFDLKFYSLKYKSEREKKTKLIDMKLDEKADKIYYYITNEGLDFYLKTKEFIDESQVTTSLLIFRAQIRSGSFGNALETVRELKIRVHRRLDQKNELLDLLLYGQGEESEKYRKYHNEVSLLFDEEAALFNDVSELLTKVREEYLDKINKKMLTRKDEDSLTTLTKIDQEMKETVFLHKTLLNEAASLPREKERIRLMRLNSAFSVRFGFEQELEKLISQNTNPEGLKFFFEPLLMPNVKKTFNILKVFASQKVTAATEDADDEIEDLEEKPYTEKFDDVVNARVGSNFTFYVMSLLNLLAETSHFDLNDWALNLHEIQGPEAVKNADFISFIIQLNQFEKQGKERVINLNAVRLKSKSETIEEKFDNAYLESLLSQLAPRSLAEIRILPEPENDIELGYGIKVTNLLFRGVSNDYE

SEQ ID NO: 40666 - protein, 248 aa, Desulfosporosinus meridiei DSM 13257
MITNKATLEKALELLKTLLTKQEISREDDRDLYEDYLYNSEVEEILNLVAEKLELDIYSYNEKIFLTPGINNKLFGYTHEDLRKALPYVTRNSELFMAYFIILVVITLFYKQSGADTNRGYVNMTEIVESTTQKLDALVEVENLEAVSSEYSFNFADIAKLWENKSFAKQTRFGEISNLASTTKMGFVHGVCNFLQGHKLIKVVDEQGLIVPTNRFKGIIYNFFEDKENKSKLLTFVENLGLVNREGE

SEQ ID NO: 40667 - protein, 1458 aa, Desulfosporosinus meridiei DSM 13257
MTQINRMRVVNVAFNGNRSHFKDFRLSYFGKSGTYDLYNGGGKSVLLLMLLQPTRPGSTLDKEQPLRNIFINTGSNHTSHSLIEWVLDEGSAYKYLLTGFCIRATKDTSGNSADHEDPSSDIVGVDYFNYYHLYNNPNEFDINNIELVREAENKTTYIGFDSLRDLLEEKQKTKNIDIYPMRKTKDYKRFLRHYGIYEAEWKMIMDLNQDENFVARYFRSNNTSRKLIENLLIMFIENMEHNTLQNVRDSQTSGMLLAKGLIEIRENLERLHKDKLQINDFKKIRGYYEQVKDLTKTLSQDFADYEALQKQFVMVANKINSVIDELELEASLIGLDISETDQKLQALYYKKDCLEVQAKGLAKEKVDFEISLLLDVIEDFKRKIEDAEQKINESMAQNSYCDYKDVESDIAVAETDLENLTKSGEEIDQEWNSAGYNYKREVEKQIQAFSLNLEDENHQLSSLLKKEKGLRDEKGGLAESRAKISSDIENKESQLEDINKELAKITAFLNESGRISQLLQPSEGIRKLSGEITDCQFALTTAADNISDFNLELEKIKDLLTESKHQVAMIDLEIVPFQKKFDEIIQKTSAYQGIALTHSFKGEPPDLQPLLERNKAELESRKYDLKAQIEITAQKQHLLAEKGYYVPNQEVIRLQEYVKAKLGDAFLGAEWLSDVEDKEELLQQNPLLPYSVLVTNKVFEKLKTNLATYGERFGDYAIPIQNLDAVRKGQVSPNGNMIFSSGRTELYTDKSKFTAYTHSLAQEQAKLEQELKTIVGDISILKASLKFLETYIPLLNQKEELETILTAKEEEKERVEASIKENSWRMKDQERLLGREQRTEKKLEADLDHLLKVIRRLETYQEKDEQASLLQKDIKSLRDRLSDINQDIEWKDHEINEIAAKIETSRQALQDIHLQWTLSSLEQKSLAHFESGIFLDYGYEQAKSRFESLNARKSGMVQQRETIEKKLKICRGRKENFEDTLRNFGFEAGYFRGLEDAGHPVKRISNESMALLKKQKDDLNRELKKQDKSQKELEKKSIALETSINEKMERIYASYRRAFEPDESLGLEEEIDLKIKETQNAIDGNEIRKKECVTKQNLAIEKKNRHQQEFFKFSVPIREFGIVTDEIASEILDFEELNGQYIGNKDRIKRHGDLLITKIKIFIEDAKNMSVQYAEPLQKFRFPGKLSESEKQLEEIDYCVGIISDKISEIDEEISTLKGYKENHVNLCLQRAEEIILELKKINTLPAIQINGQLENMVKIEFKDFSEEDKRGRMGEYITTLAQQEFEIKALSQKLAAKYLVDRITDLDRAKVKLFKVEADSEESRYLEWKNAVGSTGQKSSLYIVFLISLISFIRLIGNQADFGKSSKVLFLDNPFATFASPYLWDPIFKILKENNVQLIAFAHQINSRIVSGFDINYILGEEIAANRKKIIVKEVKTEVDMQQMDFERLNYVQETFY

SEQ ID NO: 40668 - protein, 357 aa, Desulfosporosinus meridiei DSM 13257
MQIYPILLGYVKSEQRSGKAVMKLEDMISFIKQNHPEFKIKIDQPDGYRELYDAINRLINEDILKKMSPRKTTVEQPPLALKYRICKEDDEDSTGLKKEILKLNRAFSLEYYLSNPKQYLQDKQYIQILGDYLHQEEKPLLSINELSYQLFNDEKFFKGTDESHGEAILRNLGLTYADLNCYYAYEPFIYHLFSQTNQTRKTGLIIENKDTYWSFVQLLSNHAVSLDIDFLIYGEGKKIISSLRYLEFLKIDLDYLWYFGDIDREGVHIYFNLREAYPRLNIKPFISGYEKLVNHTFDRILNRTPKAQAYRKEDAKDFCDHFSSLYRDRIRNVLDKGLYIPQEGLSLAGLIQEYAYV

SEQ ID NO: 40669 - protein, 466 aa, Paenibacillus terrae HPL-003
MENMDQRLVSIFDENADTPLVRESLRDVIKLSGVLNELREYFEEPLKVLHMLQLLNLIHEEALGLEQPLENASALYYRYRNRYGTEPPVSVDRLLNVLEKYNWIMRGKRRILMMDVGKRLMDVLIRLANDSLAYYMRDEIARSLFQAARDADLSEAYDDKGISGGNRLASMVRNVEEAVDKLQERQLEFLSDRHALPQVQIIVELMGQLDKRLNERMDKMKTFEEGLKWDRLFKKGTFVMLQGTQISLSTLQKILKFAHIRETEIGVQIDSMAFKQYVIDSFHKKPDSAQPNGTEILSFMEQDRDEGERLDGLWIPVKFASPIPERQITSAIEYLENYKPSIDPIESDIIEEFTDAKEWTEHELNDHMENAAWQMTKTMIRTEDVERVLSLHKQIGIEPLILEAGSEQWADAINALLAISAVVSNRQAEIFRESSEAEEPDLEESAREKEWEWLDESDRRYVVRTT

SEQ ID NO: 40670 - protein, 237 aa, Paenibacillus terrae HPL-003
MNQTDDMLFEQPETNDDNYVDNYQSLSAMASLTAVLKPEEEHAFMQIMFSSSATVRKDNFGLSRREVMRLLKLKPEEIEAFYQFIVRVNQSVARYFQLVYDERKDQTIVLMRVPAQQAKEMLSAESLSLLMFIFYHQDVLQNEFTLFKQLVETFGHETLDIRRKMKSNLEPLLKIGAITLFNSDTDEEAYELTAIGSRMFGNAYLKRFTEFSQSQQLHMDEVLKFFKRYNFGGGEAR

SEQ ID NO: 40671 - protein, 1070 aa, Paenibacillus terrae HPL-003
MIPWEMSISGIRDYPPTRLDLSGDMEHILITGPNGSGKSTLTFCMGAVLNSVKVELEGLRSKNIEQHQVWNAQIQLVFANVSPNPIDAAPYIQFTVQVEQKPFEPLKRQYWIREGEQIGVWDKETRFTSGDSVNNFKEYRFQLQHKYVVDPDAFYLIWYQQDVNQFATMRPEERFRIFSEMTQIDKMQRTWEGAKEQLLDGMKTREEAERNQIQHNFELERWQKERDKLLNRNRSRLDNLRIFVQTSTKLQDMYQHEQKLLEGQIEQLELEEAEHQEKKVILLTDMERLQETQTDRQLQKEELELRLQTVELQLIKIKSDIAEREQEHKELTVFLKDLAEEIRGIKYSAEEVNILLAEVQKGMKETEEKRSVANVEDLELQASIDKLLREMGRLSALTQQDREEEKRSREVLREFGESSHVQRQIEALDARHLLLQDESRQLSGKLENLKQEESSLNTDKFMSKRQEESVRMFKHLGIQVYTMQQLLEMNEQAPLEQEFALEAVKYSIFVDSKSFIPPNDLIHVELPSVVPERSLKRLEKLHIQVKEGLNDEMYAAAQRVMWWLYELEQGAHWTRIENGILREPYVRRGPQEEKQSLLHTRGILIRKGKVQEEIRTIQQNYDSCIIAWDKVKERLGVFRSVHLQVQQAETFLADSADRELRIKQLQQSDEESKVALERRTTVEAEIKRLNEIYAKQYQESVRFQEYADVYERYEHEREQIERLQQLDKELEELRGQEEELILADKDLDKRLHDLDTQIESTKRRLRDKKSQMLDIEGTIVQINRQKEKSIEQRDVFQRQQAEINLDLGKWHEKLDFLWDEIEQEKIETEDMKLRTEPALQAELEQARTRLQLACNERVNEFSIENYESTREAFERGAQDLQNARLLMEQLEEQLKELEDKLFNTVKNEVHRVNQKFINYMDLFGFDGEVTWHHQEGKHGELKYFLNVRARKQGHRGPLEEVSLKGRGNKVGKGVSGGEESLSSLLFALALLKTIETNPGYIILDEFDSALDESRKEKVFELYEQELARKMIILSPKSQNADYLQHFDKSFVVYHDSSIPKSEVIRIKKSM

SEQ ID NO: 40672 - protein, 468 aa, Paenibacillus terrae HPL-003
MNKAGIQRLEVLSFIQENYVKKGEELQNDVFTGSSFDIDVMKYSARIYKKIGNLRGSCPQGSFILSEEDDSPMLLTIFHSALVKKTEQQLYSLGTDITQERLSDWLQKGMIYRKTEYLNDGKTMKRIVYVMGYLLYSMQREKYGAELEEMLERLKGGISQTETLLNQLADVRSEDNYQGVTLNRLYKNIEKIRAALTVGYREQAFQPVSAALGMRWRESRVSKYIHFVLAVATVRIEHEQFDWKQIGAAYYGQIGGSKAFDMEKKDFLGKLEEDLGMPLHFIGLVSLGAVTPILFAGELAGSSGLYYPAGFMHATTDLTVFEMEFSTPCRVIWLVENRALLTRMCVDSFFLRSSGSLVIGLDGQIRSGHRKLIQDVMGNSPSITQVLVWCDTDHSGGVIAAHVRELLRPFQQVKVKWLLSEPMNRQVGTYSTWEQYEQALQQVLLEGRLMEQEEFLGGAELWKTWING

SEQ ID NO: 40673 - protein, 524 aa, Clostridium clariflavum DSM 19732
MEEKLIYEGAILDCLKDFRGRMQSLAPFIHLSRKLSGFQKYNEVDMVSIGFSVLLFILENMLIGREECSIDDIAGFLQTILKRSYDINMTQEESREMAFYIRDSISGSGGEVLEFKFKNLENNKDESIPIKLIDTSYYEIKKSARYKLTDQGMELLFKTREIYSEFRINITQMYLKQQIEKGVFSGALQTVNELNLQVRQLRERLENLLLNIRQNVLSINFEELKILFGRIKEQFESERREFQNIKRILKEQRDNIEKISYNDLEEKELKSLEQIKTLTKKLNITTSEHDRLFNDKLDILGEYLKTLELRLRQGVSEYIDFEKSIFDVLILKNKSYETLQDILAPLFVNTARNKFFNPFKAFEPQRVKSETEEERETIDIEMQVEMKEKKEREDREKRDLKVMAYLEAILLEAFHEGESCLSCAIKRLDEQLYKSTSYDFDFYSLIVILHQHKLIDFKDLEDVLSKMVRDTASYNINIYYLFDRIFAAKPELKALKSLILLSTEKKIVFENGNEITDFAIKGVK

SEQ ID NO: 40674 - protein, 237 aa, Clostridium clariflavum DSM 19732
MENLSADSVRKAFALYMNLIEKSKVTKKNNPEDFEGFDDPEISYIIRIFEEESGIMILRSGDTVYFTPRTDNRFFGFTNENLREKMGLANNTELYICYVVILSIIIKFYNGENYNNKIRTLLKVEELEEFITKKLEAYNSMENSEETDEALNFNFSSVAKLWLDIPAYDEKIKSFSQSKGTRISFIYRTLKFLQEQGLVNVDNDSEIYTTEKFDTLIIGYYPESTRKKEILSFLERI

SEQ ID NO: 40675 - protein, 1477 aa, Clostridium clariflavum DSM 19732
MPRINRFRIVNFKYDDDKKYIANELYEFDGKNALINLENGGGKSVILQLALQSVLPNTNMGSRNFSDYFKVNSSPTHIMIEWALDGVRSDYLLTGICVSKSADGLRFFTYTHNYTLPHDFDIKGMEVLTADKQVIGFSEFYNYLKRLSSEMRLNINVYSKDRQKEYRDKLYTFNLFKEEFDAIKIINQSEGGIDKFFENARKSRSVIEKLIIPNIPMGEGETSRILEDTFKKHLENLKNIPLYQHNIKMYEAFCDKAANLLSKLESYGAAVEEIDKVSRNILALSNLICLATDKLNKEVEELETKDRDYFEKIKELSYKKDSLEYQNKVIELQSLNKELEDILGSIEKIESKIEEKDKKIKYMESASLFEEVLNARKEINTYKAQLETASKKEEEIEREYQSCLFFAKRILVEENEKVLKLIEELKQQLEKLRKEQEAIEKELKEKDSERDSIRDRLSSIKTRLDDNKDRQSKLTSYFVKDMTLLVDSNAGLKNLIDERDKLSDKKRDLTEEIEKANKSCDDISISETRIKEAVAALEQNRKTKNEEIEVFEERFSKINREISMYEIDGDVYSKSALESLKAHKAKVDNSLSEVLGKYHELQKRKLLYEGIEYYIPDMELKKVYEFLKSNGIRCIPGSLWLKNQREDLREEFLHRNPLLCHSIVLEKAEFEKIISDSGKFSLKNQILELVESSPVTFIVDSEDGIFTPTGEDKHSSGIDRLGSMEAYVVFANNNTFALNSDAFADYLNTLAQNILRFEENCKAIKIDQERITGLIERCSEFVKLYPQGYLKEMQSQLDELDKKIYENEASLKELQENKELLKKTIKENENAISNIERLIDEKNTDIANLTEYIELSGKIKELEKGYREEELILVRVEEEKRNLNEELNSTSKKIEDTKRNLEAYVRENQSNKEKLDQISVKLNIDKPAMDIKGSLEEILSRAQGLERKIANSETERIQQFIESRMKDVKRRIKEIHNKGFCEADFEGRVISFSDEELEEEKRKLDLLKAENKRIRENERTISDQIKTLEGEIKEHKKNIEKNFKLEPFEFETFESVDAETFDSQIEAFNRKRQKNSKKLEEIKKRRERLLQSGGRIEDYININKITIRSESREYMDSLVHNGESISMWDMLQLPVERIDVIINENRDIYKNLLEELKQIESTVEKSYDELYKDADWAENVTIRMIIEKIMNNDKYNYTYVKGLFKDIIDSVENMKKGAQLQLEESLRDKNEIVERCYSKAEAVYEELKRVDTYSKINIDGVNRKTIVIEMPQLHPEEGKALMTKYIEHSIEEIEKMKADGKYDPAKIDGEISKIMSPVSLLDAITNLNEYSIKVFKPEATGASRYIPWEVVINWSGGEKLAGFFAMFISIISYLRVKKTGWPDSSKVIWIDNPFGQANAGYLLSYIFELAKGTNTQMICLTGHMQVDIYMQFDVVYSLIHRQLTGMNMSVIQSKLVKSQEGLESAFYKVKSEQMTLF

SEQ ID NO: 40676 - protein, 348 aa, Clostridium clariflavum DSM 19732
MENIIYKIIESQSKKVFETADILSNIERKLGSENFELKGGYRTFAHVIEQFCEEGMITPVKASGTNGRNPSLYNKYRILIKDKKQLDDELLHELQSLHPKLDKSYYYKNPEAYREDRDYVLMLSKYLLEDFENKSLKFRCTMNERSFEIFNNEKFLESRGKVLLKRLGLSFTDLNCYKTLEAFFYILFQPKDKLNILIIENKDTFYSALKYLERRPDKDLCGVNIDMLIYGEGKKIVNSFSFINEVATGTSIDRVYYFGDLDFEGIGIFNSMASKYGTHLIVPHVNLYRQMLAEAKNPPKIRTKQSDICLDLFLMYFDEESKKKISEILYNGRYIPQEAVNFGRKINI

SEQ ID NO: 40677 - protein, 535 aa, Desulfitobacterium hafniense DP7
MSVDLDFLEGFEKRMGIVAAVDSIVNRTNRRMDLERLFSAGQLDNLIFSVLVFIMERTLAEDEECTLESITLFLRRILPAYGVELPGDGIRQVAEYIIKDILQNGGEARYYPIMSYGQGMSETRIRLVEDKLQDGDKGYIITYQLTDQGYDLLFRTKEVEQEISFTIEELKLRELIKRKNYKKAISQSSSLIQMVRQKKNDLRQFMEKIRGNIYEVDIREYEKLTASTYALLEEEYGMMKEILGMITLSEERLREEEQARGDLDEEMRKARREIALIRRNIHTTINEQRELIVDRHQLAALYKDTLEDSFMMARRKKFNFEQEILQRLEQCDERHIPLLWQLFNPLFKPNPERTLNIFSLFEAQSRLRQEEPGGDEIEIEELREDRERLKVEEINGLNTALIRFILEFAARHEEGFRLSQLLGELKHQVELYRRLVEGDLLFHTLLKLYDFGPLQIREWKEEAHEVVANPTGELDLDFCLMGIAYTDPDLFGVASLQLLKPDEAIIKEEILLSQGEEHFSKSIQISDFLFVVEVT

SEQ ID NO: 40678 - protein, 235 aa, Desulfitobacterium hafniense DP7
MSSLNTALKLLKKLLEKGQVDRETDSDLFLEFRNPEVRQALAEMEEELDFQIIEASSTLYLVPAGGNSLLGFTSKDLREWVSSDARLADAYLLTYIAMFIFFLFYGGKNQNPKQREFLRLSKLLEELDQRFAALTLDGEQALALEEKYSLNFIGIAGLWESKQGYEEKSRKTKAGTVLNVWRLLEREGLIRILDNEREIRPTRKLDDLMLNYYLNDNRVAEIIGLFQGGEEYAAP

SEQ ID NO: 40679 - protein, 1480 aa, Desulfitobacterium hafniense DP7
MPLLNRIRIINFSYNNDTRLIMDECFDFHGGESALLNLANGGGKSVLVQLFLQPIVPEVRIQGRKMAGFFRKQKQPTFILLEWKLDGGGGYLLTGMGIVPAQAATGEEISGKIRYFTFTCKYHGANAFDIRHIPLAEKKENLLHLLSFREARELMRDKQQKDPYLFGYFPQDEGADYGRHLAEFGIIQDEWRNVIAKINDSEGGIDEIFQKYKTSGQLLDEWIIKNIEKSMSKDQAELHRLEDMLEKLVQEVAENESYLLEREVLAGFLKVYAEQSKGLATLLEGLEQQRELGEKLTALHGYLRHQGEGLVQKQEENDQAQAFTRREEQRIELEERSQDYLLKKNAHIRSQELLQGVQERLRSTEERLAEAQAAEKIQQAARLWGDIRHKEGKRSGIEEILTARQTDFDQDRRIGELEYTLKTLLEKEQANLAEEERRLQGEQTQAGASLQEVQQSLKDAESRQRALAQEKGRLSERKKQLENQNGAALKKLNLQLRRNILGELNQAETEKIKSRLDQDLADLQRIEKELTTEHAANVQAITGLEGESRSLQTRQTEENNTLLSLRRDIREYEEREAEVKSIVTRYDLDSAWLFQRERLDQVFGQKIQDLADRVEQAGITWHEAQENLLSLKSGRLHVPAEVAALLAEAGIQYDTGEAYLRGLSPELSAKMLRSNPLLPYAFILSRQDLQQISATLESLTLSRIIPFIPYEDLNLTMVSNGRLVQGESGVTLACLYEGRVFERSAMAKLVGELEEKSVQASREREHYSEEHRRVVSDQAVCAKFTYPADHRYNLGRAEQEAEVRLSGLIEQLAQASQKVSGLQERNETINRELRRNQSEQATAQTRIELFREFLLKEAEYQECGKELTKVGDELQKLEAQKNHWVEEQERLRGKLAEISRELWQNDDTLQKILKQYELYRQSPVAPLVAGSLEELTARLQALKSQYGSELEQLEQQKRELTMDIQQLKGELRKLKLQEEEYASVPYREEKADGLRAEIEDLASAVRGLRPQEIKAAREEAAAKTALDMALTEVKRLGWENPLGPEEISGDFPLRRRQAQKRLQELGQESRELQRKKALYERLQDQIDQTLDTQGLKAAPDFSPGEDLEAQTKDLQQGYQKQDRQNRQDVRGLRNSYGRLKEDYREKNLNIDTIFRALDHLWEDAQGEEDEGDRGLLSFDRFYFLFESMSIHQEKLADLLQVYELQLANLERNKKDMVEQSFLHGLRICEEIQWISDHSRIRLQGRSRPVQMLKIDLVTDSSENARERMQHYIEAGIEKVRQEIRQNKRPEEIRKSVIKLMSSRELLNTYLGNSHIPISVYKIDLNPQNSGLKLWEDAAHQNSGGEKFVVFFSVLSALMSYARTRAMENLGGVAEKESSSVLIMDNPFGPISSEHLLNPLFEIARKHRTQLICLSDLKQNSIMNCFNLIYMLKIRTTAMGNKEYLKFEEIIRDSADFQEDERLEKAVFRSEVRQMAIFGEE

SEQ ID NO: 40680 - protein, 352 aa, Desulfitobacterium hafniense DP7
MPKQTSAERLSQWAKRRSGITVLELQKLLEEPDYPSFHQLVTELLAGGRLTPIKASGLNGRVPSLANKYRIIQPREDYGECLEPIRSLEPTLNIAAYLQKPHYYVRHQEILQGLSRYLWYQAHLLEQPMSRKERSFSIWGKEKLIDEQFSLLWEVFRFNRLPENFLNYYDTPEPFFEYVHGGALPRTLLVIENKDTWFTLRKLMRETGKNRLAGISVQVLIYGEGNKVTKPKALENYAQEMFGREVLTEGEFLYFGDLDHEGIQLFFRTQRENPKLKLRPFQALYWKMLDLAAERELQPSPDGRNITVRVREFTRLLGLDPDEDKDKLAFLLRGDYIPQEILNYQVLAALLE

SEQ ID NO: 40681 - protein, 488 aa, Escherichia coli E101
MSLGFLEQARNESMARRELSIQSHALLVVRTLDSIYSALQRNPFDGVELDALAAIMYLFDAMLYYADRERQPGMTRKEAELCLVGHLNEAYPGQEEPDYAQVASKIFAAIKDPFRLRYYDFSQRTHSEEQIVRLVRYDQLSGSDDILWSLTDDGMLFYTLRLDETPIERAAILAWRTLKTIRRGEIDKAVHQIQSTQRQLEQYLIGMRMKVRAAQSGDLSASYAHDIRPVLNDSFDKTREVLEHIQNSMSAITEMLVEGSSKLKPDKLNKLRKAQEIFAEVCAFTQRYQDCLLDVNKDFERARLKLIIPRDNTLFRETLEKGALIPLLSHSPDIVEKEIDGLIARLLAPRRQDDDRHILFDPEALLNLYLDRFEQALPYEIQDLTDQPVAIETNLRNIPESVIKKCSDWVSYRLKNWGHVSFRDVFDAYECEELSEQEQQVCLLHIGSLAANSDPAIEVEIDEAIETTLWRANNVKLLTVAPLDPFEE

SEQ ID NO: 40682 - protein, 1478 aa, Escherichia coli E101
MWLIKRVYMDGAGHEEAFYKDLTLDYIGLSQAVSSPVVEGLRSPVRNATVVTSTYQQLVNGGGKSTYIALLLSIFEPSVSDFTQYLANHRQSEYHYRNYFYKELSVVLVEMVNESGQTLLLGHAHQRNGDDVDRTLFICDAPDSLMGAPFDEVPSYSRAERNSELRPYANSLRSFDSWLNLKAGSEGGMHWRKTTRQNEWRAFLLEQQINVDLIKTMVTFNSEEGGLTRFIEYKTEHDFLGAFFACTMSKDAAERLRELVAHEVERQGELEGIRRNESFLKDVLANWLAFLDPAKQLESIQAQQQLLEDGFREAMRDLAAFVGDAQVEQTQLEDNMDSLQTHIGQAMSLREQLGKRRALLEYDLVQHQFNKQKAIVDVLQDEADTNRHQIEITHAAIDYKAYAKALNEYCQADEDLKVFQSETERPLQVIFERTASEALGTLEWAIGRHRQQEATLEEELGQMGRESHVLRQSYDKLQKTLGGLETERDGYKRDKFQGELQRNELCEAGLIQKDETPVAAQYRLELTLRDAKQSEELANTILHQKEQALEAQLHVVREASIDKSEARQKLILAEQKHQSAVDSALVLAKTYQKLPTSMQHDLDIEDTSWHSELCGLQFDKVLNANSQTLNGMKERLLQARHELDELRMTGHELVAKQVNEALEAFYAAGIARDKLWTFPHYLASAYNDDAQKIAAVIDQNPGRYLSLVALDNVTFEQVHKISEILPWKKAPIAIYLLDEAQDLRRETSELVQVVLSNPDKHGYSQAAYETRLQDLENTVASQEVSVNAAESALKVLESFRNDWSRHYEQYGKHWAGLLDQRELALLMLENADAALKQAEHDEQTLRDEKRDVQVRLNNAQQQKIQAEKAYDKVSLFLEKEWAKRETAIMKLEQLAAQIQRSKNTLCTQRERLERLSELEKNKRSEKTLLNIQIGSWSNLCNEPFYSEITATEGMEGRSPEYAHEMAAQAHKKLLEAANGDQVTVLKQQLKDAEQAQRYASERLTAQPTYNTYPDEVKAAAINELTVINNRIVRLKEQQKQFTQNLISSQVTLQKFSQSCEEAGKALDEDFVWEEKPIEIEAIQTSLAEIVNNLYAIEHQIKAQLEQKTLLLRKIENVKERLQNAKTAQAMIQPITPSSAAGLPGRILSITEYADDLAAQCQMYAGLNETLKQQNIRVSTVWGYFRKRIEEELAKDPDARASQEYLRQLDSIATYHEVLGDLERVGTGISQVFEAVQDSLEQFQRSIDLTVTHLTAHLEGAIKLLRRAMSVKIPEDCPVLPGRPIIKMTDRLNDVAADLRGFASSRLQQWIARGQIPRAPNRDALTADLVQSVFGEGELEVRLLKTNASRPQWTPVTRLEGSGGQRLTSAFLLFVTVGKVREYDTGISSAGFLLADNPLGKSNANDLMRIQTQMAKAYKIQLIYLTGISDENAQSMFDNHLFLNKVQKLRRRDLVTVDKERHALWAASLAAKPQFDPVI

SEQ ID NO: 40683 - protein, 347 aa, Escherichia coli E101
MIWLSRLESTANKHRLAAGKAARTVKANAVLDEVLRAHNQEALSQEVPDLLSQAVTQLLERDWRAQPKHKASWQRYWRGMSLPSTFVYEGAIVPTKTTSEIAWHPWLARRITGQLTQPIKARLQQLNTYLFRQTGGDKSLFPGLLGHRERSLLIFGDEKALDSLPPDGWKHVTLTLADMGAFRRVPPLPYESSRCHDLPAIIVENSDVYYRLCQLNQIQTRWSLVIYGAGNKVSGQAECVSQLLEAEQVEQLLYFGDLDVAGLKIAHQLRCKLLNDYGISLHLDEWLYNELILNGLMTAEGNANNERFDFELQCGWMPKFVLREMKTLLAIHRRLPQEGVASLGLVI

SEQ ID NO: 40684 - protein, 471 aa, Bacillus sp. 1NLA3E
MGPSLISIFQATESAPELLQSMKDIATLSGVLSELGSQSSFQSPIEILRFLKIIQLINEAALGLDDPIDNAETVYYRYRNRYRDPEPPSKKRVEQVINVLVKYNWISKQSRQIKMRDTGKRMMDALIRLANDAMAYYMNDDIGRSLFQARRDADLSEAYDDRGISGGNKIASMIRNVEDAIQLMKERELEMLADRNALPQLELIHQLMQELEEKIQERFRQFQTLEESLVLSNLMQKGTASLAEGTNLSLGMINKYLKFTHMQKTPLSSTIQPEKVREFIVKMFDPPLDSDIPNVYQLFSFMEQGQYEDEARDGLWMPVKFAAPISPIAIDEAVNFLETYEPVVMPFDDPEEEVEYESEHILEQELNEIMGESQWLMTKSMIETAAIEAFLEEHEAAPMEQVVIEATSTKWSDAVNAVTAIAALVGNKKITISNPTEKIDIPKYERSWEWMNSDDGKNIIRKRNARREQSE

SEQ ID NO: 40685 - protein, 233 aa, Bacillus sp. 1NLA3E
MHEENKVSNPNDLQAEENFNPLNVMQSLKGMLTESEEFAFMNILFSSSASIRSGNFGLSRKEVEKLLQIQGDDQRFFSFMTRVNQAVSRYMKVIYDDRRDQVIVMMRVPARAARSTLSKESLSILLYMFYQQEVLQHEFTLFDQILEAFGHETTKANQRILINIDPLRKIGAIEDYETNSQEKAYQLTAIGVHMFSDSFLRRTTEFSQSNQLNKEEVLKFFKRYNLYQKGEAE

SEQ ID NO: 40686 - protein, 1067 aa, Bacillus sp. 1NLA3E
MIPLRLTFSGIRDYPPTLLDLSGADEHVMITGPNGAGKSTITFCMGAVLYSSKVDVEGLKSRNLPLDQTWKAKISLLFQNEGIMRIDAPSFIEFTLKITQDPGQPMKKEFIIATGDLIDEWEDTVRYTSGDRVFSFSTYKKDLQYKYKVDPDLYYLIWYQQEVNQFAVMYPEERFRIFSEMHGIDKVQRDWEESMEKVKDTEESLRSAESNVKIMKQELSMKKTSLDRFLDNQNRLNDGGKLYIQALLQLEEHYKKEKDRLGELTSQLIDDMEEAKDDLTLKIALKERNLEELEEYKIQQHQLNHEIDSNTIKRDELSFKIMELQARIEELDQELDAITKRKNQISRTEEEVKAALVKLAGEEEIANAELEKNQQLLKVRENDRQEKIEQIARLDLQVENDEQGHSLHSERLRQYQSSHAVQSTIDALNAKVSANRENLFVKNRKENELAEELVLLEENRDLSLRQLESMKFFRAQQMKAYALRELLELDEEASIKAEQLFNAIKYTIFFDGKFVLPPNDLYHVPLRSIVPERMMTSLPNLHLKVKKGLGENELVHGMKALWWVEQFFIEGTVSIKNGILMDPMGLRGPQEKNRYILSFKALMARKLEVKNVLVALRQDLSQIEQDIEMDTRQIQELNSIIHQVKESEAFMTIEHERMLRKKNLAEEKVEKGKIEDEIQHLEAEEKKLVRLQLKQEQDRGILEEEEAIYAELGKMKDKYEERNRLQEQLLEVKEQLKLQKTKVEKLETDFDEIKQTINKLDRNLDHLDDAIAAVNRKILMIDKQKGSSIEEQDGAKQELVQIIKDLEEMKQMIPTLYNEVSMNFSIEQLPSVTNIKQACENGKVRFDHARNETGIDPAAPENYETVKQEYERLDNDYKRTKILLDQDKERMEGLKDQLETTINMRVLELQQRFKSYMGQFQFEGDISWESYEDRKKRTQFKLFIKARKEGHRGKMEDVSTKARGGRVGKGVSGGEESLSSLLFALALLQNLQSTPGFIVLDEFDSALDENRKVKVFELYAHELRRKLIILTPKSHEETYLNKFSRAFVVQHDPTVPKSRVVGIIKTV

SEQ ID NO: 40687 - protein, 439 aa, Bacillus sp. 1NLA3E
MMNLEEQSFIEKYILKSGERLNPIPTSLANNYLTDIQIVKKTERTFRIVGLLTLSKYRNKSGHAEDELLKANLTPTKKIHWNDHDPNTIRWFEQGWIMKEIRFKKDGRTPDSQHYRMGYRLYQYLQDLQRAKENEWELELNRIKSKFIQINQKPSFPISEQRENGIKTCISVINELFNQDAPKLQNSHLFPIHWPMIKNIKFLHFNVAFLQICLQKLEFDWKEIGANYFKEIGGSKEFDKNKDDFIEILEEQSQCPAALLGLTSLGKITPLYFSGQLTGNFSSYSYGPVHALTDLSISQEQYSTSATTLWLVENRAILTRIASQKQFLHNTHSLMLCIDGHLRSSHKQCIIQLLKNSTIQQAIIWTDYDPDGLQISKEIYETIFETKTKLQPKWITAEQEVLVTWQDYQLYMQAFLKIKKMEQEEVLGGADVWEKWVRH

SEQ ID NO: 40688 - protein, 454 aa, Marinitoga piezophila KA3
MFKTFHERVFTIGEFAALYRNLTSFKKISPSRSFSIGILMLIYIFNKTLEGEKEVEVKSIIENMKNIDNKISEDLLKEIFERLIFENGFKGLSFQYYDYVEGIEKKIKYNFLDILPKRDISGIKTVVSLTKSGKDFMLKTLEVYKELQITMELLFLQEQFRKGTFINARNSAEKLKLVVSSELENIEKLIYEIRRAPWRVEFKKIEETYDFTLNQLQNEKQIFDRIFFLIDEYNLDTLSEEKAKNLNYIKKILLESREMHSRLLTKYQQITTEIMRAGEKNFWEHIINEINIEKKYLDKLFLYKELNPFSIYIFSSLKPKKSIAFNVFFNNSYEHNQKSSIILDENEVENIDEQKMIEEMQISFLKKLLKALKEVENKIYLSQIIEKPNKIILDTVLYMHQLKTINITREPLFKKALKDFNEIFEFKKIHIIPLEEEITIEDFTFTEYIFKKSR

SEQ ID NO: 40689 - protein, 248 aa, Marinitoga piezophila KA3
MKILHLQNTYLKNQGEKMESIENAIQIITKLIEKTEISEEENRELIHIYFNDEEVKKIVEIFAEKANLSLYESPSENYICIIPRSVRSIYAYTKDDIYKRYGLEKNSYMLFMFYTFCILHIFNDLQEISVKVDKVYEIAEEYINKIKTDLSKENINQKYNWNFEGLIKIWDEMKEISRSDLTKERSSIHNKIGMLKKTINILSEEKIIEYIGESINAIKMTEKTHAIIFELSKNDTYLTLKKYFEERD

SEQ ID NO: 40690 - protein, 1396 aa, Marinitoga piezophila KA3
MPKIDSFRIINVDYDNKTKKINDLYIEMSGKNTNIIIANGSGKTFIISLLFQTIIPGQISAEGRTFETMLKDIEGTAHITLCHILDNNKKLITGFVAKKAERINYYNYTIEIPYDYTLKDIEYVKENGEVVEYNEFREYLERNKKVYNIRIFGETLKSEYRKYLETYRIFKSEWEMMARTNRIEGGVSEFISSGARKSTEKLLSQFIIPNITYSLKRKKSNNEIAEAFKKQIDNIKNLPIWEKQIEDSKRVENLFKVQVEKLEKLYQTQIEINKKIYTLFEINRLLKIQKEEYKEEYVKNTAIFENLQNEINFIYHKIENIKNGYLLYQLKNNEKKLKKIEDSKYEYERLIEEEEEKISLKKALDEYLEYCELENEINVIDEEIKNKSSNKDLKREIKKVSSKLYDYYDMQIKELNKKLRDLESNIYKLEVRRDKVIKIISEKNNRIKTLVNDIKYLERKLSEINKIIEIKKIKTLDIQIEEIKNKVNVIQEKISEININIKTIDNDLIGNTSKKENLVEKIKELKDEYEKFKELYNDIDALKKLYGVKTFKVLYIEILENSKKLLIEKESISKKITAIDILMDRIKRDNYIPIPESIEKLDNYLQEKNFYDYTTGYKLLRDGIEHKNPILLNSIIVEKKDIKKLSEKLRKYRFSNDIIFIQNRENLANYEINDSIYNSGIQIIMNDYHKFVSGEISIEELYERYKTDKEKLEKKLESISEEYNRIKEYQDIVIKFENLYGKNDIEKDNEFQERIKVLEKDKDNILLKISKLNSEKAELINEKSRLETEIKEISNKLNQLLEKQMKIRDIRNTLNDRFGIDIFQINEFNKKLYREKESIDLKLLELNKELEKLKEEKRYISAEKDETFLKKSEYKSYLNIYEKGIWKYENEDIYELSSRYEYLIQQIDTKELYKRKEKLQKKLNNKLQKIKRYKYELETLENLKNAELKDESYYRSNIRRYRNEIGEFNREIGKIEAEIKLLKKDITNFEVEEIPEEKYIILKEKFEKELSDKKENLSVIENQINALEKNIERLEMNINDEEKLLQPYEFPGKQIITNLSVFQKEHLHNNFIAVFQELKDLENTEKKKREEISDGWQKIKLLISEEGFDLIVNMGFLYERNDFQFNYETAKNLYITVKDLIEKKINTLKSYKEKAMRFKNEMIKNILSEVSIYMSALKKLSKYSEIYVEDRKIETIKIIFNKYNEEEAYSKISEYIDEIIKHITDKNNEKFKSEEEITKYINISFSIFNLLKVVNNGPIKIKILKPDKTFENPRWYFLENVSAWSGGEKFFAFFSIYISIVKVLKNNIGGNMVVISDNPFGKASSEHILSPLMILMKKNNAQFITFTAHNDMNISRYFNYNYSLVLVKNKVVSNNILKIARKEHKETFEKGYYVEW

SEQ ID NO: 40691 - protein, 319 aa, Marinitoga piezophila KA3
MWNGENMNLKKYLESYKKKYITYEELEKISNNEYEEIYKKITNLMNKGILIPVKNKKENGRYPSLPAKYRININNKKDELFLLHPKINIDYYLNHINEYQKDREIILKIDNYLKNGDKKYVAMRERAYEIFDNEKAFERDREVLNVLRNIKINIKEDLYTFDSREPFYIFAFNNNIKKVLISENQTPFYNFYLLHQEGINPFDAVIFGEGKKILRSFEFIYEYVPVNTIFYYWGDIDYDGIFILNKLIERYNKHHIIPWEKGYKAMLNQKSKKSKERKFSIKSENNLIKELLNIIREGKNIPQEAINYQLLKKLVSESV

SEQ ID NO: 40692 - protein, 503 aa, Kitasatospora setae KM-6054
MFDSKNPSPKNSWDEGLARRMKALACTAPLQALDENKGSLRWADAEIYQLAEVALHTIDQVTVSMDFDSGADQDRVLSQTSRFVALQAPDRSDDEHHKIALHVLQRLINVGTVDRSFSQVYGTVDNNGVYQRFTFEFNLLVERAGSDNRIYLRATDEAINVLVGALDTDVQSAQVAAEVKLDNLIKRGRLAEAKMAAEQARYRTVQYGEMLRQLLEATTRNVRAVDWEHEVPLLLGEALDHIEQRYHAEHHILTNISEARDRSDDEQHKQRAAELVVIVRDCIRRHMQLQKRLLTAGELFRSEQDRQQFVEPPRTATIDLHGQLLTPMLGLPIRDAVELGTSFFRDAGGLKRTSALGLPSFVTRLLRPAPERQHLGIEIPDPEIQRTEDHAPFSVDDWNTTDALLSLHRRPRRLSRLLAEAEEISPAAAALLLHRAVHAFSPQIGQHVDRGDPHALIAVRTGDEFDTPRFGGDDLLLQIALLGLPDDADSHDTDGLADEENPS

SEQ ID NO: 40693 - protein, 1488 aa, Kitasatospora setae KM-6054
MYELSRVLLKSVGPAGARYQDVLLDLSGVGRPVADDQLAFFGTGTTARRPSPATVLFLENGGGKSVLLKLIFSVVLPGRRNALGSAAGGVLERFVLEGDTAHVVLEWTHVRSGRRLITGKVSEWRDLRPSSDSRNLVERWYHFRPTAALGLENLPTADDNRYLRLTSYLEALKIADSDPGMEYDQFDRHREWTDRLTDLGLDPELFRYQRSMNADEGEAAEAFSFTSSAAFVTFLLNAVLPTDPPRHLAELLDTYAGQVSQRGQLVLEREFVEGSVGILAELAQTRSDAEEARRHKRGAAREMAVLLKGLEARAAAEAETVRRLDTEIGQLVVDLAQEQREHSGLCAVTAELERLVAGLRLEEAVGDCAKAEQDAALAARTVKAWEVMPTLLDHLASAQRLKDMRAVVEAAEEAARPALIARDHAASRLAAALDTATRTLARQAETAEKSAAESIEQAGTAQESHNQAVARAARHDSAVAATEKLIREVREAIDAATASGLLPVATPVSAALEQATAAAEANAVRISVLEAEDDQLEQDHRQALLALQAGQARHAEQVRRRDNADRDFRDASARTDALRTDPAFTELLGYPADALDTAADTLITALVEAHGRAAQTIVKLQVADEQDEPRRTALETNELLPAGPDTVQARSALADEGITAWTGWQYLAAIPDVGRRRALAEKLPHLAVGVLLNDPAQLPRAQELLGASELHPIGYLPVSTTAAMAAEFSPPGGVDFVVPPHPALYDEQAADAERRRLQQQHAHRQQLLAERSTYRDSAAALLVRLREWRKTFPPGRLTELQAELDTATEQAASGELEVKTLQGTLDQIGERRTAVKAAVKPLRSAQPGLEKTAAQLAELAARETKIPAWQEVVVREKTAAEQERGIARAAEESAVRFRARAADLVRQADGHRASVSRLTEESTTLGTVAPVPADQQPTEPLEVLRSIHASAAETYLRASVGDQLLVDLRRAEQESTELESKLKRRPADVRKRAHELLASPEGTDHASREAAYRLAELAAPELAKRAAELQAKLTIRREEYERFPVPAEAVDLSPFEQPRHISHGVRQITEAKSARDAAAQTLREMEAHRIQLGHALAAAKESHRSFTVFHAEWPEFAAAEPAELIDAHPFEGELEVAQSRHRTVRGVYDEAKRRAAVAQEAERKQADSLARHAGQQRFLLLGTASHQIMLNTDRGELPGFAAEWAAAMTRRLRSLTDDLSKIDRHRTQIVNQFAQQVREALQILKRAQRFSRLPKGLGDWSGQQFLQIRFKEPNEAVLHDRMGEIVDDLAQETVKALESGRELRRSGTSMILRGVASAAAPEGFTVSILKPDAVLRAERVPVSEIRSVFSGGQILTTAIILYCTMAALRANDRGRLGNHHSGTLFLDNPIGRASAAYLLRLQQSIATSLGVQLVYTTGIFDTTVLNAFPLVIRMRNDADLRAKRKYLSVEDVFGRYLDDQLIRSDGHSIISAARYFSKEKSVGDGGAE

SEQ ID NO: 40694 - protein, 373 aa, Kitasatospora setae KM-6054
MLEALRTRAAEAGWAGTRRTTLTTNDLLAAARKLSLPPELQRSYRRDPLMEYLEELKAHEKVVYSASRTDREKSSLPLRTHLMPFRSTVRIVPPEPVWHSFMSWASRYWGMHYTTPPIRAAYSAMNSWFLGGQSGLALPVRERALKIFGRDPFFQQAKHPGEKVFDDLKPKPMLSDPAELMPLINAFHVDPPLLTRAFDTVPLDEESGYHRTGPGRGLLVIENATTYWSLSHMLKHIDHGIGHVAWGIGNTFTASVGSIGPQDGISHVVYFGDLDATGLRIPLGALRRRLPWLDSIRPAVGLYDMLLRHGHPGKAMPKEARITPAEARRITDWLAPQHRAKAEALLLRGERLAQEWVSLDYLSTETSWYADVR

SEQ ID NO: 40695 - protein, 492 aa, Pelosinus fermentans DSM 17108
MEEYLKDTTKGFGERFRRLAIFTPLFSLKGKRKSAVLPFDIDWFSLGLLTLLFFFESKLHRQGRKGRQELADYLYEATQGQIGATRAHYDLITETIMDTFRDPMGKRHNEVFFNWETGTQEVVQFSLLKTDAFDQDNNRQYFTLDEAGLELIFATKEYFSEFRISIAQLLIRKQLEKGEFASALHEIHEMRIAVQSLRDHIQRLGLEVTRNIISDDTYGKYAKTIENVYERLTREDEEFRELYGFVKETTAKIQFESQEQVDEEARLQIAQVSIELGEVHQLHHGLLYNVMQLKNKALEAARQALFSAGIQSFNFDQEIVSRIVSSPLPEEAVKGLVHPFTRLHQQTSWSLLALLFPQRLQRSDQEEETAAYPEMEEEEYRQHTLQQEENFSRIMEEVIQVMDGKDSMELKDMVSGLPGELLQHRSFYDFWLLLHQRSPVVKGVGEGKHVLDKALALLGDDILEVGEKPELLQMTEQYTLQNMCFTRRRKDG

SEQ ID NO: 40696 - protein, 320 aa, Pelosinus fermentans DSM 17108
MTAGSHQQLQQEMEKWQKLITKMETRNGKLEFLTEAVVVTSLTGEEVQSFPYESIGMVAALLEAMEASYEELAASKRIVEQAKLHFEKFCHHSNFQNEKMRQSILNGIRQKQSYQQLVIWEKELRHHIQGANRVAEQNMQAYNEDIKHFINQLHLHLISICDEMGLIQKMTGVKVEEHYKTIYEIKTPVWEESAAKEKLLEHLEWMTEQLAADSYKQEDGMEDSKKIRKNIENWLSPSYLFTRISPNKNFTVGVRKVSNDSRISNYPVDWATSNSWSGGEKWSKNMALFLGIQSYLVEKRQPSRQSKGHSRTVVLDNPFG

SEQ ID NO: 40697 - protein, 344 aa, Pelosinus fermentans DSM 17108
MRVVTEELVLHFLQKYPRRTISLVEIENVIPGGIEYRDFADSMKRLMADGVVVPISSQGTNQAQPPLPIRYRIHKQKMQADFFERIRKRQLSLHPGINIEHYFKGSEAKWNREQVWLDQLDSYLKAFGLPKTETSVWERSYEIMGDEKWIRDGGGGAFLQQVGVYEKLQMMELAEPLRFALNPRRIQDAQCYHLIVENKTTYDALVDILPETDLLTLIYGAGKGFLNSITQLEKQLHLEGASHTLYYFGDLDFEGITIWHLLNQRRPASLALPFYQALLDKPFHQGKENQRKDLRAYEQFLQSFLAADQEKIQNLFAKQGYYPQEALSIQDLQHMGRTTQWKSI

SEQ ID NO: 40698 - protein, 492 aa, Pelosinus fermentans B4
MEEYLKDTTKGFGERFRRLAIFTPLFSLKGKRKSAALPFDIDWFSLGLLTLLFFFESKLHRQGKKGRQELADYLYELTQVQIGASRAHYDLITETIMDTFRDPMGKRHNEVFFNWETGDQEVVQFSLLKTDAFDQENNRQYFTLDEAGLELIFATKEYFSEFRISIAQLLIRKQLEKGEFSSALHEIHEMRIAVQALRDHIQRLGLEVTRNIISDDTYGKYAKTIENVYERLTREDEEFRELYSFVRETTAKLQFESQEQVDEEARLQIAQVSIELGEVHQLHHGLLYNVMQLKNKALEAARQALFSAGIQSFNFDQEIVSRIVSSPLPEEAVKGLVHPFTRLHQQTSWSLLALLFPQRLQRSDQEEETAAYPEMEEEEYRQHTLQQEENFGRIMEEVIQVMDGKDSMELKDMVSGLPGELLQHRSFYDFWLLLHQRSPVVKGVGEGKHVLDKALALLGDDILEVGEKPEFLQITEQYTLQNMCFTRRRKNE

SEQ ID NO: 40699 - protein, 422 aa, Pelosinus fermentans B4
MSVNQARVEEELAMTAGSYQQLQQEMEKWQKLITKMETRNGKLEFLAESIPITLLTGEEAQSFPYENIGMVAAVLEAMETSYEELAASKRIVEQAKLHFEKFCHHSNFQNEKMRQSILNGIRQKQSYQQLVIWEKELRHHIQGANRVAEQNMQAYNEDIKHFINQLHLHLISICDEMGLIQKMTGVKVEEHYKTIYEIKTPVWEESAAKEKLLEHLEWMTEQLAADSYKQEDGMEDSKKIRKNIENWLSPSYLFTRISPNKNFTVGVRKVSNDSRISNYPVDWATSNSWSGGEKWSKNMALFLGIQSYLVEKRQPSRQSKGHSRTVVLDNPFGQASSDHVLEPVFFIAEKLGFQVIALTALAEGKFLRDYFPIIYSCRLRSAVGGETSVMNKELHVNHAFFQDKYPQTLTRLGQVKQIELLS

SEQ ID NO: 40700 - protein, 344 aa, Pelosinus fermentans B4
MRAVTEELVLQFLQKYPRRTISLVEIENVIPGGIEYRDFAGSMKRLLADGVVVPIPSQGTNQAQPPLPIRYRIHKQKMQADFFERIRKRQLSLHPGINIEHYFKGSEAKWNREQVWLDQLDSYLKAFGLPKTETSVWERSYEIMGDEKWIRDGGGGAFLQQVGVYDKLQMMELAEPLRFALNPRRIQDAQCYHLIVENKTTYDALTDILPETDLLTLIYGAGKGFLNSITQLEKQLHLEGASHTLYYFGDLDFEGITIWHLLNQRRPASLALPFYRALLDKPFHQGKENQRKDIRAYEQFLQSFLAADQEKIRNLFAKQGYYPQEALSIQELQHMGRTAQWKSI

SEQ ID NO: 40701 - protein, 492 aa, Pelosinus fermentans A11; identical to SEQ ID NO: 40698

SEQ ID NO: 40702 - protein, 422 aa, Pelosinus fermentans A11; identical to SEQ ID NO: 40699

SEQ ID NO: 40703 - protein, 344 aa, Pelosinus fermentans A11; identical to SEQ ID NO: 40700

SEQ ID NO: 40704 - protein, 508 aa, Methanofollis liminatans DSM 4140
MDYQRHFKDINERMEHLVCFYPFFKAYAQKRDYDAPSLALGVLTFLIEKGRLQGRTVRPDEIRGYIEGMMKEMYPGQTFDYQEVTRTVLGDLETTPGGELYHFQYLDTVRKQQVDRYVHLVEYNVSEGAYQITDAGLEFMITIKELPEESRVTVALILFKKQIESGSFRNALETVRSLNLEVHRKKGKRQALIDSMIYGDPDVVEKFTAYTRDIISQLEQEEELFRQVQNTLQEISEDKKRITDHSRSLGDEEDFITIKELADELDRGYRLHNKLLEDYTTIPSEYERIKNVRLHSLFERRYQFQKTLENHILANLPNDVHVVEMLPLLLPGPRKTFSICKLFEPQNIIGKKAEVAESRVKEEWGDAKPPDEIVHERQVKTFTAYASVLLEALSEGGHLDLPAFLDLVLARYGDGGMDHIDLIPFLIELNKGARQEEKEAYETVFDLHTPEERQGAIEKVLVSVATEKEVGIDTIRVRSMPEIRVPLTDERDVYVSYLDFMGERQNEV

SEQ ID NO: 40705 - protein, 249 aa, Methanofollis liminatans DSM 4140
MKFDEENLGVALEIFYSILKNGSITRTDNPREFLRYDQETEVREALEVCARKQGLVLCRYHDVFYLSPGINNPVFGLSNTEIKNGLGYGFKNPEMYTAFFIMHILIAEFYRDSTREPYLEKVHKTRLLEVVEQKMKAMEALEDLETTSEGHQFNFKVIAETWNKLPSAELRPDECDEIKQRGISSKNALVNSTIAFMEKNQLVREHDGAVYLTPRCKAIIAGTYSNEEVQADLRAFIEGLGDAAEEDDA

SEQ ID NO: 40706 - protein, 1467 aa, Methanofollis liminatans DSM 4140
MPKLQRVRVVNAQFDDGRGIYEDFTMPFYSRNATYELRNGGGKSVLLMLMLQCILPNTSLDPNHPFKDMFRGGDQNRTTHILAEWELEEGIAEKKYLLTGFCAKRRSDQDEGEKNDGIKYFSYIHLYDRQNDLDLKNIPLCWRERGDFVVRDYADSQRMLREKAKAGYDIWATDVRKEYLEKIQTYCLLEPEWEFIKQINRQENFLKSYFREFRSSRTLVEKLLIKTIERCLQHKQSLRTGEETGGSNEKSLADALYQCQEELKRLQEEQKCLHDYEHLLDGITTLQEANQEMIGSFQAFEESKQRAASQYAAHREALARKEEEIRDLQERAAGKEAALHSIETDIEMTGLIVQNVRVNLLRQSLEKVGGEKTHLEEAVEAQEHEVKCAWAVNKYLRYREALAEVRKNEEYIENTTRDHLEIFTRLQRLGKTLLAHSLREKQRVTDDLQRGEDEAEALKEANTKLERALGGITTRIEENRLAIDNLERQIAELDEEEADLHQKHKQCPRVDTGLSDQIPTLIEATERRITRENDACALLSAEIDERKRRLDRNEVSEKGLREQIDLRNRDIDRVKREVEAYTAEEQAAHQIAGLYGTDEVETCRAHLNDRIGELQESLRDLKDRRTSLEKELEGVLHYGVALNRDTLDALDTLREKYAEVMSGAEYLKDLPPDEREESLANAPWLSKAILLLPQDYETIVHSPSVLPALVQDASVVITSYGYLREKRVLTLGDVYIPSRPPKHTLRVLDSDREAERLRKEISRINDESIRTGEELEGARKNEEALRSFVLRFPPGYQEQKEAEIRGYAEARDEKVALHAAVQKEIEDDRDALPEIEARLEKKREEVNLFERKRLLLLNIQEISGKKKEASKGLQQKIQYGKEYEAALEQTEAGIARGTLDLKNKEQSNRQLNAHLRTVTGACAEYREYEKDEVDLLPDTDISRLTTDYHAAKDAVDGVNKNIGHVREMITRDRREAEEALADIKNLQVSIAEIEARKPHEPVPEEAIEVLKEGVQTLRGPLKRATERYNAVEKEHHFESLGLEKAEGAFNSHAPEPYLRNPALLDASPFEADLEGLEDVRVRTRSEIAALHGAHTEADDERRDLDAQYRNYEVLDGVYHFAGKTPLPARDLVPYADLRQELASNDARVKKSRKNFEGRKNMVIEDLSRVTVAVEFVNEIRTKLRAAENLDEAYSTRQSLDESAGMIRSDIAITREMVDGLREAETKIVAQALGIARQYRDYLKKFPTASKIEIDGRTYEMVHINFETCEYSSEVAEGTMHQYIQDLTHQIQTGEIGRKELEKALMPDQLVGRVLDMEQIIVKIRKIDIASHPLQEWEKIKASDGQENTMYIIFLVVIMSAIREVVVDRYDMKTAKVLIVDNPFGSTGAHYLWEKIGSILERNNVQIICSGHNIGADVREFFPVNHILTEEMSASGRTRIGIRFEGVGKELDRLERQKQEDVRAWLGS

SEQ ID NO: 40707 - protein, 364 aa, Methanofollis liminatans DSM 4140
MQNIIRAILLRHKNKRIALSYMKRILKDDGINLLADTEWQKQFICTIRYLIQKGVLVPLKNARPLTGYGGLPDRYTIRRDLIAEKEAPLSAEHKNELFSLPAPMSIDYYAHHADTYRRDRDAIIRIRDLIDGDDHEVLTVNERSYEIFGDEKAIDEPQHAAVDGSAVLRNLGLILADIRAKKVFEPFFYIEKGFGAEQGKTKRNVLIVENKDTFWTFQRAVIAGEFDGINLIIYGEGNAIQKKFEYIETVGGTPDDLYFYFGDIDREGIAIFNRLQARYPDYGIKPATSFYTAVLRKAGYRNARPLRTEQNRGQIPLSPFIDGFDEESRAAIEWIITEERYLPQEVLTAVDLRRMKALGLSETF

SEQ ID NO: 40708 - protein, 500 aa, Brevibacillus sp. CF112
MEHERLESVLEDYKERIQRLALFDPLHKLDAKREKDRQERPIDMFGLGLLALLFFFENMLIRNKKTGVQELAAFLMQMNQEEIDLEDEGFEKIARTIIETFRPASGKRNHRSFYNWETRQMDKVEFSILKAERGDIAANKQYYSLDEDGLELVFATKEFFREFHLSINQLLLRKQLEKGEFGGALRQISEMRIDVEALQERMVRMKHEVQRNIISEETYVRYKQVIEDIHLRLAREHEEFHELQGFVDETKERLLYERKGEKEHRAYEYILRIDRELGEVHFAHTELLKDSIVLKTTALQAAQETLYHVALQSFNFDQEIVARLIASPLPLTATRTLLAPFLSLEQHTGWSPLAVFEKQRVGGELEEEGQGDFEEVTDEAEQEQTIVQQQNFGKIMRYVLTVLDEQGEATISQVARHMRENGHEHWLQHRSFYDFWLLVHQRSPLQKAHEEEDHHLLGEVLALLQPGQRIEVIELEERLQLTKRFEIQDMKVCRKESSHV

SEQ ID NO: 40709 - protein, 243 aa, Brevibacillus sp. CF112
MYDNEQVLTAFRIYSQLSRDGQADTESMRMYVGNDVIRGLVEQFAREVDCAVIPAGDKLYMVPLAVSSPFHLKNASLKKEYLPAKAKNIDLYMMYVAILILFGEFYDSYHSTEMTRDFITLGSWLESIDARIQTLKEHGPERLQALDAEYEYNWSLLVEKWEAIDDLRESSRQQDGRTNSRLGFLSIVQNFLREQGLIADLGNQELTLTEKAKTIIQRYYMDVDYNRGILDFISGQEKQKEGA

SEQ ID NO: 40710 - protein, 1481 aa, Brevibacillus sp. CF112
MPVISKIRFTNVIYEGGSKRYNDELFVFDGHNGAILLENGGGKTVFIQTALQTVLPHQELAGRKIRETLSLAGTPAHIAIEWIINDSPRRYALTAVTLFLHNNDLDSLRYVYEYEEGNPHAIDELPFSREGAFGKKRPADKGEMQEYYTQMSSRHMNARTFATIREYHAYLEEHFQLIPAEWRKVATINGAEGGVEIFFDDCKTTDQLVSQLLIPTVEEAISGNNGQAFAEIFEKQREQFKQSKQLRMQIQECQLLERSVQQYKQVFATYQESRELLEREKEWTKALFQHARNELLLVTAEAEKIAGQLSELQRKKHTLNWKKASRDIAAQEAVVKQYGAEWREESRKLEKMTLEAERAERHQYTLEYAKYQSQKQVAEEKLTLAESQIARLDEEQDVSQIKEALGRTNREIRGYYDQAEKEWKQQESMIRSQLDSVLQQKKAKRNESEQERERLEANKNKQAALRERMEGASKEQQRIAGNILSNPLRETVEEFIPVWQEELRKNQENQSLYQQHIKECEEQQAKLESRLEETRKELMAWQEQANQWILRCTEAEKQQKSVLTSLIEHIPRLSYLDSLYTRQESVTQTVMDKVAILEKEKEEAFSRERQVTRLSDEYAESGVYAADPELAALVVRWSESFHYLETGPQFLQEVLQRGEIALEALTARFPYWAAALITTEQEIEQLAARLQKHADQLRSPVILLSLQEARKWLEAGEEYAFSYRQIVPSHWQDNLDHERFEKWKRELQEKAAAVIQARKDKETEYQKLYQLKSELLCFYADYPQARYADWTRQRDECQAQKERCQKDIANHTEQIKKIEQERKHYTEKLSEEKGLEQTLGYRLQEANQYMLQKKVWEEAKRQEDELVREAELLKQNLQALDRALKTLEAQEQELQEEREEKTTALAHLRGEWLYEQVREFPPATPRFSFERLRAEREQLTDRLRERQASRAELEREAERLAKEIEANQRGMNLVLAKLDQPLEHPVVYPVDGDVQYERIVRKVAELKKGVAAQRIVTEERSNRLSEQNGRLVTLMEKYGERFGDEPLERFEGDLNDALKRLNQEEADTAAKQEYLLTQEQGFRQTVKELEDTIRELEAKNEVYRFAEAAVTDVPVREEELLAFPYQRLAVARKRIRVLSQKQETEQQEWRKVMAEKDRFKQFCERQIRNNKLRYTAMAGIQNKQEFSEVQEWADTLTRTIATSIRVLEDNLQGRDKELQDFITIVHTHLQRIAVELKTIPKKTSVQVESGRKEVYSFHVPEWKEEIGKQLLRQHVDWMLNRLDGDEFKDVEGKEDAGKMKKFIYASLQSKSLLGIVMGNDSIRVKCRKVSKDGQVSGALSSWEESNKWSGGEKWSKNMTLFLGILNYLAEKRQRIQQTGKRYRTVIVDNPFGKASSEHVLDPVFFIANELGFQLIALTAHAEGKFIRDYFPVVYSCRLRASASGDALIMTKEREIKHAYFRDYDPYSLLRLSEHEQLTLFT

SEQ ID NO: 40711 - protein, 350 aa, Brevibacillus sp. CF112
MYDTFIKHLKSYKSTKISLGQFETWADPQTTYPQFHRAMQTLLDNQILIPVRSSGTNAKNPPLPMAYRIQKSVLSQPIKQAIKQAQLCFHPSIRLDVYFRLAESRWSKDLPYIQQVHDYLTQRGFPQSEATAPERSFHLVGDEKWIDEKGGRKLLEAIGVWEQLKVTAMPDPLMFAVHLQQVGEQQGIYRHLIVENKTTYYAILPILSSLPYATLIYGAGWKVVSGIDGLSEQLGVGRDARHQFEYFGDLDHEGLAIWHALSQKCGAVPAVELYRALLRQQASTGKGGQRVNGNAIEQFISFFSEEERTQVSALLKNKEYVPQEAIPAEALRNRLLDSAAERREEKGSGA

SEQ ID NO: 40712 - protein, 464 aa, Bacillus cereus BAG5X1-1
MEEMDQSVISILQTDPSHMGVRNAMKDLNKLSGVISELGESEYFNDPLKTYEFLLLLNILNEEALGLTSSIEDVRTLKFRYRNMYGGDPSIRLEHFINILDKYGWISKGKSKITMMDVGKRMIDVLIRLANDSLAYYMQDEITRSLYQANRDADLSEAYDDKGVSGGNKLASMIKNVEEAVERLKERELEYLADRYALPQVQIIHRLMNELNVRFEERFQKFQTFEESLVLEPLVKRGTSVMFEGSQVSLGTIKKILHFTHIQQSTVGANIRHEALRRFIENCFTKQNMELPDAHEILSFMEQDRREGERQDGLWMPVQFAAPLSSAAISSGIQFLEEYEPYTDHIEEAVQEEYEEIEEMSEAEVKKLMADQQWSMTKEQIQTERLEEFLLEQEEVDMEELVLEAGSNTWGDAVNALIALSALTANNKADIMDDQNVKERNIEKEWEWGSDDDKRKRVRSRTRN

SEQ ID NO: 40713 - protein, 229 aa, Bacillus cereus BAG5X1-1
MTMINENEFEAGQGINPLAKLGELRYILSRDEEHTFMQLLFSSSARMRATNFGLRRKEVMKMLGLNSEDIEGFESFVKRINGALSGYFQCVYDERRDQVIVMMRVPAKQAREVLSSESLGLPMFIFYHQEVLQNEFTLFNQLLSALGHETLQARRKVQTNLDPLLKIGAITKYDSPSQEEAYALTAIGSRMFSDSFLHRAAEFSQSQQLHMDDVLKFFKRYNVGGGETI

SEQ ID NO: 40714 - protein, 458 aa, Bacillus cereus BAG5X1-1
MIPYRISFSGIRDYKPRTISLMGKRDHILISGANGAGKSTLTFCWGAVMASTKVNVEGLRSKNLPDNRVWRAKIELVYENDGFVDAAKYVRFMLVLEQEPGHPLKKEYYIAEGDQVDEWEQETRFSSSDKHFNFREYKRMLLQKYKVDPDAFYLIWYQQDVNQFAVMKPEERFRIFSEMTGIDSIQKSWESFKEQERDKEAILQTARNNQIQYKFELERWEKEKNRYEDQQNRMKKGILQYKTALCTLENHYYTERMKYKDELEDVKENLDEKYEEAQQGEKHFTQLETELIAKQASFQSVEKEREIAEERQLQCKKESKDKEREWNAVKEEIKDVTDRVKNIGISEDVVRAEKSSKEQQLQEAEKEKVYTEQLIRETSHNVNELRSEVAKLEVQVDNDEAAVVSAKNYIEQYKSSFYMEEKHTKVESMMRQTKDLVETVKKDLQQKYEEKKQLELNR

SEQ ID NO: 40715 - protein, 354 aa, Bacillus cereus BAG5X1-1
MNGIQFVQLYVMKIAEKIDDLYIRKEQGITILPIIKQTPRKIIKTAELLFSEEEVSDVSTTITKNFYSPNVRKRESDVLKWLTIHEMIDCIERGILIKEVRFEKDGKTVHSIFYRMGYGLFTYMEKKQQLEKVREEEALHQWVKRKKSMPNATNEYTERLWNVLERVENDIESALPAVDEKRWSFQKTFLFLEFLLATYKISCEKRRFDWKEIGAAYYEVIGGSKKFDQHKKEFLNKLEDLLDAPPHCLGLVSLGTVTPIFFCGNLYEGNTRYECDTVRSLTDLVVFRHEYKTDAKVLWLVENRAVLTRMAAEDDFIVSTGSLVVGVDGQLRSGHRKLIQSVLNHSKFITKIII

SEQ ID NO: 40716 - protein, 470 aa, Bacillus alcalophilus ATCC 27647 = CGMCC 1.3604
MDHSLTSIFTANQSDPEVSQSMRDIASLAGVLKDLGSQDAFQSPGEILRFLRIIQLINEEALGLDEPIENEETVFYRYKNKFNDESPPSKKRVEQVIRILINNNWMSKQSKQLKMRDLGKRMMDMLIRLANDSLAYYKHDDIGRSLFQARRDAELSEAYDDKGISGGNKIASIIRNVENAIQLMKERELEMLADRNALPQLELIHGLMEDLDIKLKERFRQFQTMEESLVLSSLMQKGTAVLAEGTNLSVGMISKFLKFTHMQETPLSSNIQPEKVRDFITKMFAPPLDSDVPNAHQLLSFMEQNQYEDEAMDGLWIPVKFASPLSPIAIEEGIHYLETYEPIEASMEEDEEELIYSTELISEEDVDELMNQANWLMMKEMIETEKIEKYIEKQEEAPIEQVVIEATSVNWSDAINAMTAISALVGNKKISIMNGKKGAKVPVYDREWEWMKDADRAKVIRKRTTNKSAE

SEQ ID NO: 40717 - protein, 246 aa, Bacillus alcalophilus ATCC 27647 = CGMCC 1.3604
MQTEQKSSENEQRISQQNDHSSVTEEHEETNVNPLNVLQSLKGVLSEKEELVFMNILFSSSASIRGGNFGLSRKEVEKQLEIQGDDKEFSSFITRLNQAVSRYFKVIYDERRDQVIVLMRVPARAARNTLTKESLVILLYMFYQQEVLQHEFTLFDQLLNAFGHESTKANQRILVNLDPLKKIGAIEDFETSSHEKAYALTAIGVHLFSDSFLRRSTEFSQSNQLNKDEVMKFFKRYNLYQEGESE

SEQ ID NO: 40718 - protein, 1065 aa, Bacillus alcalophilus ATCC 27647 = CGMCC 1.3604
MIPWRLTFSGIRDYEPTQLDLSGKDDHVMITGPNGAGKSTITFCMGAVLYSSKVDIEGLKSRNLPEQQTWRGKISLLFKNEGAMKIDAPTYIQFSLHIVQEPGQPIKKEFFIYAGEEIDQWETPIKFTSGDRFNNFTAYKKALEQKYKIDPDLFYLIWYQQEVNQFAVMNPEERFRIFSEMHGIDQVQRNWEESMEKLKDTKETLGSAEVNMKHKKQLLSLSKNALDRFLDNKKRLESGAKLYIESLLQLEVHYKKEKEQFEDIIEQTRSEMEEEQDQLAAKENEREQIKLELKERKRENEELAQRIEAEEEKENQLAQTIKENEATISGLEKELAVILEQRQYIRRTEEEVQNELEALNRDQKETTEFFDLVKNRIDEVSGEWQSVVEEITRLKQEIQVDNEAAVIHQERLATYTSSYVVQNSIERLEKELKENRNEHIDIERRLAELSEELKQLEQNRDLSERQIDSLNFFKMKRIQAYPLRELVELDEQAKLKDEHLFDAIKYTIFFEGKSIKPPNDLYHVPLMKLIPDRSVTHLPSLHLKIKSGIGTKEHLAMKALWWIEQLFAQGEVRIENGILVDSLGYRGRQEKDRFILSAKALLARKQVVIQQLKSAQEDKIKLSDRMEHSTKTLQELNSIIHRVKESEAFMTLEEERRLRLEKLAEKTERKELLESEQKELDVKKEKGIHQKIEQENCLNELKKEEQFYQELGQMSDKYEKLHSLRERTASDRNDLDEQKQRNKELEQQEEALDSKIRKLERKGSGIQDKIDSVHDGIRVKEKQLQRRQEDLELNKEQMIKCIQELNEMKGLVSEIYDECTSELTGGHLLTITKLLHNRELGKTKFDRARSEDGIDPAAEANYETIKEEYDRLANEYNRTKLLLEQDTERAQDLKNKLEITINMRVLEIQQRFKMYMNEFQFEGDVSWESYEDRRQRTLFKLYIKARKEGHKGALEDVSVKARGGKVGKGVSGGEESLSSLLFALALLQNLQTTPGFIVLDEFDSALDENRKVKVFDLYVKQLQRKLIILTPKSHESTYHNRFSKAFIVKHDPTIPKSNVVGIVKT

SEQ ID NO: 40719 - protein, 475 aa, Amphibacillus xylanus NBRC 15112
MEEVDRRLISVFETDVDQPELLQSMRDIVSFSGVLKELSDKDYFQSPHQVLRFLRVIQLINLEALGLTDALEDEEQIFYRYRHIYEYDEEITLGFVKHLIYVLGKYNWVTKTSRRIKMRDLGKRMIDSLIRLANDSLAYYLNDEVARSLFQAKRDAELSEAYDDKGISGGNKLASMIRNVEEATELLIERELEYLADRNALMQVEVIHQLMQELEVKMEERLAMFETLDQELIFSTIKQRGITAISEGTKISLGTINKILKFAHLRETDVIRTIQPDLLRQFIERTFNPPVDSDIPNAHQILSFMEQDQYEDEAMDGMWVPIKFASPISPETVDIGIDYLENYQPTTEPIEVVVEEFFPELDEVMEDELDDLMGEAKWQMTKQMIHTERLENYLDEVEEASLDELIVEAGSSSWSDVLNGLIGASALIGNKKADLDEKANKKIKQDHENRDWRWIDDEQGGYGISKRRRGGSGKS

SEQ ID NO: 40720 - protein, 222 aa, Amphibacillus xylanus NBRC 15112
MENLNPLTAMQSVKGYLTKLEELTFMQILFSSSATIRRGNFGLSRKEVERLLEIGNDEHAFQSFLKRVNGAVSRYMKVIYDKQRNQVVALMRVPAKQARNVLSKESLAILMFIFYHQEVLQNEYTLFSQLIQSFGHESLQITRKIQANLDPLKKIGAIDDYDDNKGEDAYQLTAIGAHLFSDSYLRRYTEFSQSNQLHLEDVIRFFKRYNLKGDIADDPLET

SEQ ID NO: 40721 - protein, 1062 aa, Amphibacillus xylanus NBRC 15112
MIPWRLRFTGIRDYPAIDLDFSDKSDHILISGPNGAGKSTITFCMGAVLYSGKVVIDGLKSNNLPTDQTWHAKIDLLFKNDGAKKVDAPQYVQFRLDIEQKPSEPIKREFYIEEGDVIDEWERSTKFTSGGKYNFTEYKQQIIHKYAVDPDAYYLIWYQKEVNQFAEMHPEERFRIFSEMNGIDKIQKNWEESKALVKETELTLEEAESKQGLNKLQLQQKKGELDRYLDRNRRLKRGYIEYRVALKWLKTYYLDQINSLKGQIEQLEESRVETNDLKRALESKWHEKNDQDQLLEEKINELNKQNESLDHKRKALINQLKDRQAKRDTISSEIDHISKEVDRIGQSRKDVEQQLTNAKTTVNQLSKTIDDLERKIKVINAKVNEDLNQTIATLNEQIKQDELKYHQVKDLIDTYKSSALVQEEIEMNDNNIDRYRNDLIDLRRKQIELTKELEALKKNQLISSRQEQSINYFKNQNIVVYPMRELLELDSSAKASDEQLFDTIKYTLFVNKKIFNAPNDLYHVSLPNIIPDKSLTHLPEQRIKVKAGLTDDLYAFAVKALCWTRTFFEEEKPNIDRGKLIDQRGVRGPQEEKRLILNEKMVQVYREDVEKELDQTNDRINQFEKKVKQLNQQNMTLFNRRESLKHAEAFLTKENERELRKERQRKLVAERKDLLDQKDDLEAELDQARTDRAKWQQELNTYQMYYETYLLYEQEQDKIEEVQRLDEEIKQLQSNRQKLTKQLTEIDEALEDETQKRRRLNRSIEDIDDRIQSQAREIDQIERQIQDRTEERFTNEEVFSKTKQDLDRLESSASYELEDEEPKLTRSQAEEMRERGKATYELALSITDIDEAAPENYQKMKEEYDTSANEVKKSKILLDQYRERMEHFKEDLENTISMRMLGVNQKFVHYMSLFSFEGNIEWDYLVDRHGQTRYRLYIKARKEGHRGKLEDVSEKARGGKVGRGVSGGEESLSSLLFALALLQTIESSPGYIVLDEFDSALDESRKDKVFELYEQELKRKMIILTPKSHEEEYLHRFSKAYVVYHDPSVPKSKIFKVKRQVT

SEQ ID NO: 40722 - protein, 437 aa, Amphibacillus xylanus NBRC 15112
MIKVMSKAWLDYINEYILLKGETLHQLDSEDNHDVIHLDVIKRTARTRRIVAKLTIGIKESGVPPETLISTFPTPNVKRQLNDKEKAYEWMRNGWVIREYRLKKDERTIDREQYRMGYPLFLFLQKLTTKMLEERNDSMRSWLNKWQKTKHPEQGLSLERLDLLRRLNNVLSKLASDVILAIDHNLDHIESLNVGWRFKKQLTYLHFLLALYQISSDQQQFDWKEIGARYFQYIGGSKVFDSYKSDLIQEAEVLLGRPLHLFGLTSLGTITPIYFAGEMKSPRANYRYGSIHATTDLAVFTDRFETTADVIWLVENRGVLTRMAYEIDFIKASKSFILAIDGQLRSSHRQLIQYLMKNVKQVIIWTDIDEAGLVIAKDAADLVRASNTKIKWVVPPLDVTTNQMEFEDKYQIAMKINREEQEQEMGGVEWWKKWIDD

SEQ ID NO: 40723 - protein, 501 aa, Bacillus bataviensis LMG 21833
MNESWEGFGKRVQRLNPLFELGRGMEVGELKPHIQTILMQVLLSIFYRELNDDDSRRKSDIKYMVEDSVKQMKLLADDKQIERMTSGLLYQGKEEYSKPFEALYYDEIRQSWETQVFRYVTMDELYTNLEIGGSIVYKLTDVSQEMIFMSREMAEEFSITIEQLYSMQLIKNGNFRKATRNLDHLISRVNRLMANEFTFQKEMINNPKILLIEEEWQRADNRVEIEKQFEEEKNHFRTITSMIDKTKRRNEEDDYIQKELILLQEKIGHTRQLHDRFAKLVIQNISYEMKLKAENPSLFWENSLVSFREHIYENWFMKEGVHHFTDIERVLSPLFSPKNEFILPLDWIWGEQEFDEKPLTEAVIEEEAEESITRQHVTNWNSVIKAWSYVFQFLQTNKEFSLTDLKSMPLEVQDLWFEESETIDLWMMFDKKPLMVQVLHRKEETLSDEREILLYKLMKEYPQFELFEGLKIFTMFDHRAEPHHWYQMKMTPFKICVQEEK

SEQ ID NO: 40724 - protein, 248 aa, Bacillus bataviensis LMG 21833
MNAENIKKASAVYFTLLKNKVIDENSEHFQTYFDPEVRQTVLLLADESGTYIIESPKRIHLVVQPTGSVFATNFTHLKEKHRQVETKKHFHLISVVIMSFLAAIDRNQAAKIRTKREGISYYALERQVNDLILKWDSILKAKPTFGDEERIDMKDVVTTWKYMEVDTDDYGLKKGNRRTRIGLIAGAMRLLDTEGLIVILDRDDIPKVIPKQELFERIEYLYHDYDRYEVLKKLMTTEEDQHAENPSH

SEQ ID NO: 40725 - protein, 1487 aa, Bacillus bataviensis LMG 21833
MPKIHRIRIVGLKYDGMQKQYKDTTFNFHNDETSTNGLIAMMNGGGKGVFLQTIFQILKPGTSWGKQNNRYYQQFFFNNKEQFIPYTFHVLIQWELDGADSRHLITGGMFSAEQRISMSDESGNESKTLEQEAKILPNITFYTREFERKEEAALEHIPLFENDEVAETESLKDYLKWNGFDVYRDTKKHYRILDTYGINRKDWDIMKDINKDEGGVGKYFEGAEDDHSLFQKRIIPTVSQVLQRTEHQKNDLVEIFKSQASIAKDLPVLLKREQAHKEFLEDILPFEEHLSKGVKHKEIALASIQAGRQLLGALEHLKQSEEETLLTIEKDMEKLTIRQADLRYQKDNLEFANAHREVMNWDKKLVAEREKHTSLQAIVKEKQERKEQLAFQLLVKEWSENEQSIRSLSQQIATLEQNSGLEQVNQRMDEIKLEARKQWEHALLSIKEGIKQYLGYQKFLNKKAIELSQQDKKMTKDIAKLSSEIDFLYTQMHTFESKEAALIQEFGDRLTYDLKGLTESFLKQIEDKEARLVELQAKDKESIEKQNQLANSHGTHVQSIQFSEEKCEELKAANDVQKQKEAKLLDKLLGLLDDVTAPFTHSSLSKYAIQIEEIMGNNRQQAEQIKKELWETQLDHSLNNEPFWIANKDVKELKEWIDEKTGIDVFYGTQFLQSLSTEEMVNSLMTDPLLPYGLVVNGQQWQKINQQVLTGRMYKSPVPIFLREEMNSQKHQSSFVIINGTEKELLSDKNQFTSWKIKIAKQIEEKKDTLIEIEKTETSLRHILKELDRFLSSELSSDIEKAFSQEQNVLFSLQTKLQEVKTQIEKEKETELQLKEQLEKTKSKVEKLTSNVETLEDFIQEKTLHQENKRVKLEKEKQRETFDSEQQEIGIEHQSTVELQNQWNQTYVEWKLTTEQNIKEISFFIKEAVFPTDNKADHCEETSHLSLHLLQEINGSIEELKLLQKSKEEQARELLVIQATKESEQKQQKKLEKKLATYDQDWNQAPEPDEPIGILENMLQTAQREAKTAEKEEREQGTAVTVAETTLKHANEQRDKSGKKIAKHEKLPEEWEDLDLEVKAVEIKDQMKITNEEVKQAEKRHKETETNIAVFEGDLLTLSVILKEEAAAFTNDDIEKIKSQGKTCILSWSEEHQANQEEGQEKHAKIDQSLRNLKLTIEGKDWEIRFKNEVITTLDHMDTRHYTHIQSIVKNMKRFSQSGLEQLERDKERAEKAQNFWASRASMKVMSISEAIRSMIAKMKLKNERGSFPLVQLKEDILPKKAEDIEPLLRQHFVSAINKITKQFDMIDNHNQALDQEIKQLISDEQILFVSLRNRYPELLVYNMRTDNAFMYGKPQKEHYSTWRTINQGSKTKSDGSGGQKLSARMVMMMMLLSVKSETDQSWVPLVCDNPFGQAASAHVLDPIFAVAEKLKFQFIVVTPPELVKTEISQRFAAYYKLDFIREKGKEIVSDTIVPAFRIYQGEEVVH

SEQ ID NO: 40726 - protein, 365 aa, Bacillus bataviensis LMG 21833
MTIRVCKQVSSIDIIETRVRGFIADIQHPNKKKKINSNDLEIQLRKLLEDYFEMDGYSLFYRAIETLQAEGQLIPVQNNQYNGRTPALPLYYWVNIKEKANKWDRLEMMKLGNQFDFSFYERHPEWQTKEEWERIQNVYAFLKSSQERKMVSVEERSLELFGHEKFLLDTDSFPEGKGFLCRIGVSEEQLKMVNYGEPFVFWIKQGKEIKDIQRVLIVENLSFFHTSIKLVEANKLDYEPELIIYGEGTKIERSFSFFFRMFPLKPYLFYYAGDLDAAGYGILIRLIEKYPECCIQPALKIYCKMLECLEQKNNQKQGQLSTLKLRDAFFQWFTEDEQALLMQLWQENKRIPQEVLTIETWRRWQ

SEQ ID NO: 40727 - protein, 505 aa, Clostridium sp. Maddingley MBC34-26
MKINVSNVVENYRERIQRLALFDPLYALNEKKLKDRSDNKVDYFSFGLLTLLFFFENMLIRNRKVGVKNVAEYLQIVNEGQFDLEDGDFLKIARTIIETFRPPNGKRNFKTFYNYETRKEDIVQYSILKADKADLETNTQYYTLDEQGLELIFATKEYFNEFQLSINQLILRKQLEKGEFIGALRQIDEMNLDVKNLYDRIFRIKHEVNRNIVSSETFERYKNIIGDINDRLTHENEEFEELRSFVNDTKEKIANEMNKEEDKKAFELIIKIDKELDEVHYEHRKLLKESILLKTSALQAAQESLYYIGINSFNFNQEIVSRIFSSPLPLNSTRRLIEPFLYLGKEKTWSPISVFSKQRIENTEEEETSDEFLNILSKEKLKEEIEIQSNKYRQVAEVILKALEYKKVNSITIEDVIEFIKESNEEEIINQRPFYDFWIILHQKSPITMKREDNEEEELMGKSYDVFSAKGYLLYVEELRNVLKVTKRFTIKNMVLKLEDRDDNL

SEQ ID NO: 40728 - protein, 244 aa, Clostridium sp. Maddingley MBC34-26
MITYRNEQVIQAFKIYSILAKTGYGEKDELRQYISDDMIRGLVDQFSREVDCTIFLAGEFIYLVPISKDSIFHVSNEVIKKDYLPSKSVNLDIYLMYVSIIVLFGEFYDSYQTIEPTRDFINISDWLESLNDRIASLKEHNSDKLKELDKEYDYNWSLIIEKWLDMDEIKETAKAQNARTISRKSFLNSVKNFLEDQELISDIGNEELELTEKAKTIIQRYYMEYDYNRGILDFMYNLDKKEVK

SEQ ID NO: 40729 - protein, 1442 aa, Clostridium sp. Maddingley MBC34-26
MENGGGKTVFIQTAIQAILPNQELAERKIKNTLMLENNSAHIAIEWIISERPRRYALTAVTLFMNKGSVDALKYAYEYEENDDETIEKLPFKVKNANGNYRPANKDEMEDYYSNMSKNRINAKVFKIKREYNRYIEDRFKIIPREWERIATINGAEGGVESFFDSCKTMGQLIDNLLIPTVEEALAGGGTKEFAETFEKQREHFKEYNQLKARIDESRQVENQVGTYIDHYKEFDEINTKVMETKEALKALYELGKKEHNLNDEKLSKISREIQDANDDEKNLKQKEASYNLALLEKDMQLKSGIFKIKEDEYNKILNRKMEKDKRYSNLKVLKFKKEIKQEEELAELNKVQIDSLDKDEEVVDIKDELEENACEIRGYYLEEEDKLSRQVQFIEGRIYNANLEITEKKVLLQEKLKDDKILENSKSSLEGQSKIVEEDIEKIKKEILSDKRQENIEDKIIEWKNILSELEKKIFNAQKKKSELNNEEIQVKNSLYNKREEYDGLKLQSIELESKLNKLKDEEEVLVRRLKEFKNSFYGVETLHSKEVVIIDQLENFLEKARESKEKAILEERISYRWLDDYKESEYYTADAVIEKWLISWRNQFDYIESGTIYIQRAAKNNELPEEVYLDKFPYWAVSLVVSEKEKEKLNEKLSKSLDKLINPVIVLDEKEAREILTGHKDFNRDNIFVPTPWKDNISQNFFETHRKEIDKKAEEIKKQREERENEYIITDALLKDLKKFYHENSYEKFSNMKKLLEEVNSNKNIAEGTIIQFEKRLEDISIELKKIDSELLNCREGKSDLEKKLEKANEYFIKNNKNKKLIIDIKKLKNEIAILEIEIKKIQSDINYKQDFVEGLKIERNDADYNKRIISEKEFYEETKANTPKSSNKSIGALAQFRKSLKDKLDNKQKSRKSIENELNERIKRIKTLNEDLENYKNELDFDIDDSFNDIISEDELKRLIKERRELKKILETKKDEYDNARDSYKNGENTYKVKMKDYNEIYENLITFDKALEEVEELLNNEKKVLEEKSKKLQAEEKRLNEEKTELDEVIKKLEYCNAGYPFLNEAIKEIQLNEEIKNNFSYKRKEIINKISNQLIKVQKQSDAKFEETKEQKEKFLNFCENKILDVKLKKMAVDGVNFRKSYKDIIEWQNIMSERINRTIELLERDMREHDEEMKQFINHLHSYLVIMAQELKAIPKKTKIKIEENWKEIYLFNVPDWNEKDGKLELYNHINWILKKLEGEEYRDENGVENGEKVKKSIEKWLQSKQLLPIVMNHKKITVKCRKVTNDGKMSSMPFSWEESNSWSGGEKWSKNMALFLGILNYVAEKRKQIIPLKSHYRTVIVDNPFGKASSDHVLDPVFFIAEQLGFQIIALTAHAEGKFIRTYFPIVYSCKLRSSENGDSQILINEREIKKAFLKDADSEKLERLGQVNQIMMFEF

SEQ ID NO: 40730 - protein, 332 aa, Clostridium sp. Maddingley MBC34-26
MYDKLIEYLKSYKKKTIKLSELEKLPDGSMNYENFVASIKKLVEDNILIERGTKINSLALSYGVNHYKLQKDKIDAINNYILKFSKEIDLGDYFKLSEETFYKDLQFIQAVDEYILSNGIPESYVTSQERSFNILGDEKWIDEKNGKRLLERIKVWDKLKIVNDSDPLMLAINQTGFGKPVHYHLIVENKATFLALVDILRETDYTTLIFGCGWKIVSNYYMIDKQLNLKDKNEFMYFGDIDKEGISIWNSLNEKMKVNIAVNFYRELLKKDYSIGKKNQKRNDEAINNFSKFFTDSEKEILLNMINNGGYLPQEGLNKEELKRIWSEMCED

SEQ ID NO: 40731 - protein, 480 aa, Thauera linaloolentis 47Lol = DSM 12138
MSSSAPLDVLLDLTPQQRNLLLMRPLLQLELTKNKFSDSTADGRSLFDGVDTHYLSLAALTHMMEGTAVAVGYTQEEVVQHLAAIVSRMKPAATAGQSLRIAEIVVDALDNASNNYLEHSYEYFHAPSGETRKVSFRLTTYEPDLEDEYRYRPTAEGYLVLMGMLDLKVEDHQILVERMLQLLIERGRFDQAYEFARRARMLSIEHRQQIRDFIHQAWRAPGSVAWARDIAPRLNEARVHIHARQEEDRRMEESVREQLIQVTDSQAREQLVRLHDVLKSASGVRAHLQVDVTGAGDKFMDAQAGAFRSRRPSSFPDLETRLLPEALATAQTALAGSVDALLLSFYPAVVPKAPDLSNLLALLFFRREYDEPGEDESEGGELMPFKKYLDPFPEDMAQFVQGWVSAKFAIGGSWKLDELLAHAEDEGLTLLERQCIVYVLYRSYPDSENLFKSMRAHADGEFVADVAAGDNLRFDPVETR

SEQ ID NO: 40732 - protein, 1445 aa, Thauera linaloolentis 47Lol = DSM 12138
MQRISRIYVSHFGSPTAWYDSHLFGLDDPDTDSPTDTVFNLENAGGKTSLLSYIFSCFEPKLDRWLQHLQTRNHHFHDYFARDGRPSFILIEWRMPGRAAGSPDYSLLIGQAVTIKDSVERNNDVERWFFAYEVAPGLSVEDFPAPGLGPTPVRTMHEFVHWLQEAAARSKGDFFRTKTQDDWIKHLGNVRGLDIDLLRMQVDFNSNEGGMEEGFLTFNSEADLIRRFLLLTLDPERSATVRAGLAQTADKLKARPRYEQQLQQLTKLHTVMVPFVDAAAEFQAASEQHGSTRRHAASLAAALCRGGQEKEAAAVEKRTYAELQEGVAKTAEKNAELHGADVVALKGLQLHRKVVAAKAAEELAVEKLAAGEKRTRMLRGAKALGHWEAKTEAAKELEGLVESEEQGLQSVRQQAEIQGALLDCALAAAEASDRSKMAQAAAQEMAAQQQVTAIGQQEQQINGSLGKIANEQGQIEAFLETFKLQRQRLEQNGLVLPSDLRVETAIERVQLQIEELEAQDQVLGEHILGLQEQEQQHRNGAADQGVKAAAAASDQRALEDFLSKGRSMHDELAQMEVMRAAADAELADPDSTTLLDDLGALLAEADREISERDVRLAQLSSDRGSIVETGLAGRSADVDAAVRQLHALGIRSARAANTYVADLVSDVEKAAQLVLSDPARFLGVAVAQGDWAKLEEKLDDVKVKLRMPVTVAQASLDPQHAAAGKIVFAPEDAALFNKEAAKVALGHLDARIASTGEQRDAYLKRRADGNAGRETLLRYQREFGAARLKQADADLDDLKVQESTAKERQKELLLLAEQAKQDRVQAESQRKPLPGRIEASKTALRRLVEFQHDYEEPSGAKQRRSDELASQAELEKARLVDLAVQRNEVDKRRLGFINDKVRHENNARVHSTNRAGIAYIDRKYPAEQQLEARPRALEVLRATYDDAAAALEAQERDKLGVLADRLKTARLERQSAETAYKEDYGDLSPDELAPLRTLDFETEVREQNIVNQRLGELSNEAGNNHVSATTEHKIFWKSQKQHLPPTLQMEALNDVELAEQISATEDDVVKATEMADRARGEAQLARRQAEDAQLAASKLSTLLASLTAAVPKMDDDFDLLDLPVEPEQYTTELIRRHGEAKERVDRQRDKALTAFQALVAAAMARDLIEVEAELARDISDSNFDLACSDRLRVLELILDRIAAAKDTLDTMEPDLQNSVGELYNLTFEGIALLTRACNKTMPMAAPYVGGKPIIKMKANFKGIPVEARKEAIRAYFNGLIKVGTVPAKGADLVVQSLVAISGRSDLGVDVLKMEQNEAHQYQLASELKGSKGQGSVIAMFLYLLISQLRSDTQATAKRAGGGPLILDNPFAKVQTRALIDAQRLLAKEIGVQLIFFTANADANILAGFRRVIRLRKSHMNSRSQRSHIEMISATFEDLTASELPA

SEQ ID NO: 40733 - protein, 333 aa, Thauera linaloolentis 47Lol = DSM 12138
MNESFLNQLRAHPRKRVTLAELRQAWLSVHPEQVQHPERDALMLETLIAYAEQGHLALPAANSFERLGHPRMPKFVTLIACGQRTPAIDWAALPWLPELGFWPLLTNSEKHAAFAINEWMRRPKGRRLFVPLRERALEIFGDEKFLDLRVRNDALFAGKLPLSALGAFLVSPPLPHRKADAPGRPVVIVENHHTYWSLGEWNVRAKRYATVIYGAGYAVSSTSRALDEVLREVQGTSVLYFGDLDPEGVAIPLRIQSAGAGEICPDVDLYQLALAHGRRRDGVHRVFDDVPTLRRWLPSLVSEVEAMWIEGQWIPQEGIGTELLHERGDQLLA

SEQ ID NO: 40734 - protein, 513 aa, Paenibacillus popilliae ATCC 14706
MGTLGTVDVTQIVSGFEERMAKLALFDPLFELQRQRKSDRNGEPIEMMEMGLLTLLFFFEQKLMRNPKAGVKDLAKFLQEAAADALKLDVAAFEELARTIIQVFRPSSGKRRSFTYFNWETRQQDTVYTSILKASSFDSKTSTQYYALDDDGLELVFATKEFYMEFQLSIHQLVLRKQLEKGEFQGALRQINEMRVDVESLQERMIKLGHEMKRSIVSEDTLKRYGVLLEDIYSRLQRENQEFEELRSFVKETKERIYSDTLQMKEHHAYESILRIAAELEKVHTEHTLLLQQSIELKNGALHAAKESLYYTGMDSFNFDQDIVNLLLGTPLPLEAARGVLSPFLGLEQHACWSPLTVFAEQNITADGEEEQREEGFLELAEGQEAGTFIHWRGRLFKSIMENLLIRLKEGQTIRLNEVIEACKRGEETDDWLSMRAFYDFWLILHQRSPVQAGREDTDESKPTGMEEAIRLLGKHKLTVKEAGQVIEVNERFSIQEMDLTLTLGGRDDAISE

SEQ ID NO: 40735 - protein, 260 aa, Paenibacillus popilliae ATCC 14706
MMQYQNEVVMRAFRLYAELARSGVVEREGLQQYLADDEVRGLVDQFAREVDCLTLTAGDQLFLIPLVRLSPFHVSNEYLKRTYLRGQAVNADLYLMYVAIIVFVGAFYNSYLSREPTRDFIRVEDWLLLVQERIDGLKEHDPEQLREYEKQFSYNWTAIIEKWDAMDDIKETAKRQSGNTISRFSFIDTVKRFLLAEKLAEEVGVNELAMTEKARIIVQRYFMELQYNRGILQFLYQFEEERQAHIGREEERSDAIHSQN

SEQ ID NO: 40736 - protein, 1482 aa, Paenibacillus popilliae ATCC 14706
MPSIAKIRFTHVLYEGGNKRYNDVTFQFHGHNGAVVLENGGGKTVFIQTAIQAVLPHEDLAGRKVKDTLQLDNGPAHIAIEWLLTDKPYRRYLVTCVTLFQSGNGIDSYRYVYEYGEHDEHRLENIPFAKVHMGKSRPADRGEIHDYFQTMTHRHSLHAKTFPTMKEYKAYLEQQYQIITGEWEAIARINDTEGGIERFFDECKTTKQLFDRLLIPAVEQSIEGYEQGTFARIFEKHREGFKKYKQLTEQIEENRRIQQELNNYAALFEHLDREERKYQEARQEAKAYWQSAVELREAVEKERLQLQLQAEEHGERSKLLRRKQKSYLIAWEIQEQEAIAEKLHLIEDEAEQMRERLYGAEHQYYSLQYAEIRDRCLAAEAKVFQLSAQLERLTLTEDERKLEEHWERNSGQLRYLYDVKEQSLEEQRSLFECRHRQLEEQAEAIRGSLRRLDEERLQAERSIVEKTAGIQAKRDHQKDIANSLLSNPQLEQVEQLLPLWMEEEQQLEQSRMARLQEMKRLKEEAAFKEQQRREVSEDSRRLGEEFAKLTARHERHQSDLEELKQELCRLRPAWDKYSSLYEKESSIREQLAEGIERCRQQKQRLLMQERLAYRFVDDHGQQPLFFADAAVAKLCEQWSHHYSLLQMGTDYIRGLSEESKREQASRADQLWAVTLITTMHEKELLQQRLRQANGSFAFPIRVLGAQEAADMLQGTGEPQSPSSSWIVPQHWVSNEEADAYEEWKAELVRQAEQAKQERERSERSLLEWQSAQTRFRAFLAKYPLVAQQEEDQRRMRLQERKLERTRELERLEHELEVNRRTADQRRRALEEMGSRIQQLQYQLQQGHRYTLLGNEASKLEEELVPVRNQLGLLGKQREQEERAERLVQEELQTVQDQQREMALRLQVLKQDEGYREVREHAALSCQATLEELKAERKRLELERHRIMQEQTQLESALASERKRVEEYHRLMEQLRTEHPGIDAELTLPLDVIERQEQLWLRIEELRHQLKRIEEEYVRTRGELQAKEGACLKLRQQFGEEFPDAEPERFAEPLHSVQNKLQDEEQRLTDEAEQLARHQQVNRKRLDEIERVLNVWNKHLIVFALEDVRLQPAIIGEAERIELPYKLSHYADRCIEKLKDRQACMEKERRSVKDGRTRMKDYCLYSVQDTKLRYMTIQGIESKEQFSELVEFKQSMEKGIRTAIHIMEQNLQTYDQELQQFIVHIHSHLKLIVQELKEIPKKTRVKSAEGWNEIYSFTLAEWDEQDGKERIRKHMDWIITKLDRYADEQDQADWQEQQALIRKDLEKWLDSRQLLQIVMQGEGMKVACRKVTNEQQITRAAFSWEQSNRWSGGERWSKNMTLFLGLLNYIAERKQHIQAQMKRHRTVILDNPFGKASSDHVLSPVFFIAEQLGFQIIALTAHVEGKFLQDYFPIVYSCRLRHAADSGKQIIEAAQTIQTAYFRDNDPGALERMDSHVTQMELF

SEQ ID NO: 40737 - protein, 352 aa, Paenibacillus popilliae ATCC 14706
MKDIKEMLVDYLRSLRKATVYTEQLERAAEGMPITYEEFAAAILVLEQSGLLEEIRSGGRNPRPPHVAYRYRIHVSSLRSGLQQRLHQLRLELHPSISLDRYFMLGESVLDSDLPFIMKIDRYLQTCGLPADSAAAPERSFALVGDEKWIKEKDGQALLERMGLLDKLKLNSSPDPVMFAVNPSRGIHPGHEESHVHLVVENKTTFLALLPALSETIFHTLIYGCGNKIVGNIDMFAQQYPAASGAHRFYYFGDIDYAGIHIWSSLSRKVPMIPALPFYRACLEKPAVPGKTNQWPAESALHQFGMFFASAERERMARNLTSGHYYPQETLSAQHLQQIGKEATWEPWEPLT

SEQ ID NO: 40738 - protein, 354 aa, Streptomyces ipomoeae 91-03
MAEIALHTIDQVTIAMDFDAGAEHAKVLEQVKHFVAAQAPDRDDAEHAAVADWVLQRLINVGTIERGFSWHYGLVGDEGTYDRFEFDFKLLVEQSTPDGFSLRATDEAINVLVGALDTDVESAQIAAEVKLDNLIRRGRLADAKLAAEQARYRTVQYGETLRRYLDATRRDVRTVDWERVVPDLLLDALEHIEGRYSAEHAILTNITAARDDSDDPRHKQRTAELVEIVRDCIRRHMQLQKAVQEAGDQFRSEQDRQLFSGEPQRAALHLHGQLLVPLLGLPVGKALGPVYDFFRGAVGPAPPEVLTLPSLVERLLQRPSEPERFAGEVRDPQFDPVPEQELFTPEHFRLRVVP

SEQ ID NO: 40739 - protein, 1499 aa, Streptomyces ipomoeae 91-03
MYELSRVLLQSVGPKAARYENVLLDFSGVGDPIADRPATLFSVRDEQPVRRPSPATVLFLENGGGKSVLIKLIFSVLLPGRRQVVGTRDPRTLSGFVLDNDVAHIALEWTHTRSGRRLVTGKVAEWRHLKATQDPSNLVERWYHFRPTRETTLDTLPVAEDGRYLRLADFIGELDEAQRADPELEFNHFRVQSEWTERLTDLGLDPELFRYQRAMNAGEGEAADVFSFASDAAFVEFLLSAVVPTGPAQDLANLLNSYGDKLGRRGALTLERDFVAGALDFLEPLAGIHITALTAQEEQRAARKTLDTFVRSVKVRAFREVEAAKASEEVTKRLGGDLRRAVFHHEKLAAAARELGRLTALLKLTEAEEEQQKARAAWNRAQETERAWKVVPRLAKSLEATANANRLRELVRRTEEAALPALQARDAALEVLVGALRTMSRRLTEQAETARRQAESERTLSEQAQTEHNAAVGLAAEHRAQAKALDTRIQEVRNALADAVRDGLLSDGVTARDAARQAEEEARKNAEEISRQESAAEDAAGLHDASHRACRAAEQTLAEARHSLDLARRDWTRADERTRALEADIQPLALLDIERLDLEVDAPRLVGKLAQRRDAADVARTEIRIAMVRDERARLALETNELLPPAPEAAEACETLREAGVDAYTGWDYLAGLPRVEQRRTLIERVPHLVTGVLLNDPEQTARATEILVSRKLWPSTLVALGTTTDMHEPDASLAGLDFVVPPHPALYDERAAAEERLTLGRRHDEHRARIAELDARQRMFLSLLNRLEEWRVDFPEGKLAELREIVTVRMQAHDEAQEALTEQTEKREVAAARLKAIREAIPPLRTAQSALETRKSTLSGLAIQEERIPDWQTAVDQARTAEARAREAAQQAETAAESHRAASAEHVRTMDRLTGSAHRMTAELNELPGADAVAENKTEVPAEPLPVLRRSYEAAAIEYERASVGADLLLDMRQAEQREKQAAQELGDDSPETRAAAQALLNGPDGVDGASRAAAQRRAEQAVTDCQTSLSEADASVAEHRAVLKDFPEPLTDVDLAPFGPPLHVIHGMRLIEAAEHDRDEAERIRREIAYHSERAERTAAALRSSAKNFTDLITVLSRSAEPREDDIPYEGGVSAARDRHTALKTEYDRIGTKVETALAEERTLTDQLVGFAADARFGGLPSPSRTVIQSCPRAELPARAAEWSDSLRPRLRSLTVDLDSIERHRRQIVLQLCQQVQEALRTLKRAQSLSRLPRGLQEWSEQEFLRIRFTEVSEQALEDRLGTLVDETAEAVIHGKEIKRDGLALLLRGVTEAVAPKGFRVRILKPDAVLRTERVPVSAMKDLFSGGQVLTAAIVLYCTMAALRANEKGRVQHRRNSGVLFLDNPIGRASAGYLLRLQQSVARALGVQLIYTTGLNDLAVLDSFPLVIRLRNDADLRAHRMYLTVVGDRRKHLLEPLEEGENPVITSIRYHARADAENNHHQDPEEESVDRSESSRA

SEQ ID NO: 40740 - protein, 380 aa, Streptomyces ipomoeae 91-03
MTDLSRPARDLLSALHEHARSQKKWDGTRKTRVSLPELRRVFRTVPHPKVEDELESVVLSRHLDELYECGAITAMKGDDGERIPLPKGVWVLPTHQAAMKVREPLPPLHPNMRKVAGYWDNAAPRTRIGYRAVNNWLLSEPDMKPAPKRERALDIFGSRTYSGWFDAEEKAFDELGGPFFSDREALYKLLQMYSAPPQILTERLIAESDGYYGRIGDGDILLVVENVTTCWSLIEALDGMKDHAVGYVACGMGSSFLASLAGVKMLRRGKIAEIRYFGDLDPTGLSIPAAAAKEAAKDNNLPAVLPAVGLYDALLGIGTPLPRKERRLTTQQATGRVRWLDPSHQAMATALLCGEDRLAQEWVNLRHLKSNSEWLRDMHR

SEQ ID NO: 40741 - protein, 500 aa, Brevibacillus agri BAB-2500; identical to SEQ ID NO: 40708

SEQ ID NO: 40742 - protein, 243 aa, Brevibacillus agri BAB-2500; identical to SEQ ID NO: 40709

SEQ ID NO: 40743 - protein, 1481 aa, Brevibacillus agri BAB-2500
MPVISKIRFTNVIYEGGSKRYNDELFVFDGHNGAILLENGGGKTVFIQTALQTVLPHQELAGRKIRETLSLAGTPAHIAIEWIINDSPRRYALTAVTLFLHNNDLDSLRYVYEYEEGNPHAIDELPFSREGAFGKKRPADKGEMQEYYTQMSSRHMNARTFATIREYHAYLEEHFQLIPAEWRKVATINGAEGGVEIFFDDCKTTDQLVSQLLIPTVEEAISGNNGQAFAEIFEKQREQFKQSKQLRMQIQECQLLERSVQQYKQVFATYQESRELLEREKEWTKALFQHARNELLLVTAEAEKIAGQLSELQRKKHTLNWKKASRDIAAQEAVVKQYGAEWREESRKLEKMTLEAERAERHQYTLEYAKYLSQKQVAEEKLTLAESQIARLDEEQDVSQIKEALGRTNREIRGYYDQAEKEWKQQESMIRSQLDSVLQQKKAKRNESEQERERLEANKNKQAALRERMEGASKEQQRIAGNILSNPLRETVEEFIPVWQEELRKNQENQSLYQQHIKECEEQQAKLESRLEETRKELMAWQEQANQWILRCTEAEKQQKSVLTSLIEHIPRLSYLDSLYTRQESVTQTVMDKVAILEKEKEEAFSRERQVTRLSDEYAESGVYAADPELAALVVRWSESFHYLETGPQFLQEVLQRGEIALEALTARFPYWAAALITTEQEIEQLAARLQKHADQLRSPVILLSLQEARKWLEAGEEYAFSYRQIVPSHWQDNLDHERFEKWKRELQEKAAAVIQARKDKETEYQKLYQLKSELLCFYADYPQARYADWTRQRDECQAQKERCQKDIANHTEQIKKIEQERKHYTEKLSEEKGLEQTLGYRLQEANQYMLQKKVWEEAKRQEDELVREAELLKQNLQALDRALKTLEAQEQELQEEREEKTTALAHLRGEWLYEQVREFPPATPRFSFERLRAEREQLTDRLRERQASRAELEREAERLAKEIEANQRGMNLVLAKLDQPLEHPVVYPVDGDVQYERIVRKVAELKKGVAAQRIVTEERSNRLSEQNGRLVTLMEKYGERFGDEPLERFEGDLNDALKRLNQEEADTAAKQEYLLTQEQGFRQTVKELEDTIRELEAKNEVYRFAEAAVTDVPVREEELLAFPYQRLAVARKRIRVLSQKQETEQQEWRKVMAEKDRFKQFCERQIRNNKLRYTAMAGIQNKQEFSEVQEWADTLTRTIATSIRVLEDNLQGRDKELQDFITIVHTHLQRIAVELKTIPKKTSVQVESGRKEVYSFHVPEWKEEIGKQLLRQHVDWMLNRLDGDEFKDVEGKEDAGKMKKFIYASLQSKSLLGIVMGNDSIRVKCRKVSKDGQVSGALSSWEESNKWSGGEKWSKNMTLFLGILNYLAEKRQRIQQTGKRYRTVIVDNPFGKASSEHVLDPVFFIANELGFQLIALTAHAEGKFIRDYFPVVYSCRLRASASGDALIMTKEREIKHAYFRDYDPYSLLRLSEHEQLTLFT

SEQ ID NO: 40744 - protein, 350 aa, Brevibacillus agri BAB-2500; identical to SEQ ID NO: 40711

SEQ ID NO: 40745 - protein, 522 aa, Brevibacillus agri BAB-2500
MALQASNVFQGYAQRVKNMAPFQVLFALEKRSCLHMRGFDVALGIILYLLENMLTYGKKNTYDDIVKFFHEQWADQNLSYKEVYDAIVDLIYNHLRNQGRKLEFTYFNFETLQEETVYWDLLETEKPSFEQLKEKKMRLVLSNACIDMLFKTKEMFIEYQISITQLFLRQQIQKGVFDGALRTIDELNLSIRTKLGEMEHLEWDMRRDVLDFSRKALWEKQLQKNAEQFAREKEVFADLMKISKDSIRRHENDNLSDRERMTLQKAYEVQRRLHASTTKHDSLFEMQQRLQFLLTELITERVFSVFSTTLNIEQELLAPLTEKPERFAKAREFLLPLFHPKVPRWLMANQFYGPQKKQKRKEHIKETLELLDPEMVEEIERREKEEREARRELYARFFRFLFFILLQQGRCSYSELLHRADPELADNMQQPSFISFLLFLFQEKEVLLGLDDSIVASLPLYYRGISDALTYDMEQAFRSFEMVPIGEKTVRLPNGIEVAEFEFCTIEREPQYNTWHGEEVDL

SEQ ID NO: 40746 - protein, 239 aa, Brevibacillus agri BAB-2500
MSQYSRDALEKACLVLKRAMLQGRVGIGEAEFRMYQETDVKEVILDVFQPVFRVHVFQEDEVLYVVPSDAQSLIYKSDQVRREAMKLRDQDELHLADFCAMVLGSVFYNSSAHSRPTRAVIGLSEWFHEVDRNIEKWTQEYLTGRKEELEAQELQTEINITGIVEKWHRMRLKEGAETYRASRSEKISFLKKVAQHLQEEGLVQFYDERELAPTEKWSAIMSKHYGMLERKEYITNLLA

SEQ ID NO: 40747 - protein, 1448 aa, Brevibacillus agri BAB-2500
MPSMHRVRLANIKLENGTRVIPDQTYVFLALHALYILENGGGKTSWIQSVLQTVLPNVMLGSRHYKDVVQTKSTGHIAVEWRIDGVLERYVCTGFCFYNSVDSKHELQYFNYVYEYSPRDNFNISSLPFVSEHRSVMGFHELRRFLKNQTEWQVYLPENNGDYAIHLGKYGIHSQEWKSIQEVNGRESSMDKYFENAKSVEMLMERLIVPTLEDAIYATEEAKKSLIQSFGVFQKNLMEIPQIKNNLEEAEKIETHAKRLLAELETLHLYAAAYQGAVDRKQRWLTAVSKAKEDVANLLEKLEHDLASNQSESMELERLQHAQQIQMEHGKTESLQRDMESAKERLRQQEQNLQAAEDAYRFARGNLYFQAYQKAQGDYRGAEVQMQARKAEHDEQLEMYLRKKTQFEQAIARELRGTQSQSDEVEASIQENKECQRENALQRQKLSVEQARLDAVREELETWVEETEAERERLLPIIGPKLSFDPKGVEMEFKTNYRDREASFEQHRLDLDEAESRGRQIAKEERETLALLQTAEESRKDVVRKQEAFEHLSGLTSSAIDPWFRVHTSLYDQETSITLRLKGAEEKASARVQQTRNAVDTLRRQIARYTNRDHIITSDELMSVHDYLEERGVSAEYGVKYVKAQDERFRDQYPHLTRLLPFGLLIREEEWGRVQQLMHRAPAPLKELPTWFFLLERLGSDVPFGDEGAFVRVTSSFSIFQPHEVLSLVEEEVIRQKVLQLESQLQTEEAADAEAKADLAAVQRALFTWNNFLSRYPTRPDFESELAGFNAAIAAHNVVLQEIKEKAQACLSCQNDLRAKMEQWLHDKGSLMTLVRDVEHYAARAALWPEKETRLTEALIRLEEITEQLPLLTDAFAQLERAEKLLSERRDQLIQSKAMLQSKKEQYELGTSDDLCFVPLPTAESEYVAIRAEIQQIGLGITELQKNMDKAKADMESAQQQIEFLKYTIMDMEAHHEHTTPLMVQEREQEVEESRYRKEQASTVYIRHETEHNRQSEQEAVLTKKFTGTYGVDPLAVETPSVTELKARMLLNTQQREKAEVEQKKQNDLWHELDKIVDGYDTVMAQIKDRGIAPMVEEERLTFGPTWTFQHKRLKDDESLAEREKRNAEWKVESVYDAFRKDLQSSANAYVSQMLRQIDTLTATPKRYDFLYVNARFQESFEAVEAYRRKYELDLEQRAKDREEMIFRFHTRVKEMYDAIMEIPKRSRIDWNGKRVRVVEIVYPWREDTIVWEKLKFHLDALLQDLSAMKKQGETEQKMEAYIHAQLRTSVLLSVVSSFSTCEFKVAKPLNDENIVQPISHHSWENVHVWSGGQKYFGYMAVFVSLLSAVRMKLTGSDQSWKVIVADNPFGSASSHHILEPLLAVCNANHVQLVCLTAIRDEGIVSHFDIVYSNRYFHTGSVEIMQSKLENKSPSALRSIHVNFSASS

SEQ ID NO: 40748 - protein, 351 aa, Brevibacillus agri BAB-2500
MKSIIRDFIGGLTTKRFSVVETEKYVKGVMGERYYELGGYSVFHAAMTELIAEHHVKPVGKAMFGFPSLHAKYAVIPRTEAPEKSEFYALHWALSLKSYYHNAALWEQDRRYIHAISAFLHDRSLHPTVITANERSLKLFHDEKWLVQKGKPVLQRLGITLSDLHCEETNEPFFYLSWDPTPKNALIVENKDTFHTCKGWIGEHRALFGIPFEAVIYGEGDKIHRSFAFAREVWPSCTDDIVFYYIGDLDPKGIWIYDKLASEYPFLLRPFVPMYQKMLEMREAVPNESSRRLAKPPVKAPLLQYLSTDERSAIERLFSQGLRIPQEAISKEELITWHCKHPTYFKDTRSE

SEQ ID NO: 40749 - protein, 664 aa, Saccharothrix espanaensis DSM 44229
MNPEELFRHERQADTSPADDLAVRRWMNQVEAEQRRRSTTRGADDEAHAEVKRFAHAERALAEGRRAEGRGDLVEAAAQLTLAAEEGVGDAVLRLAGVLTRSERYADALEWCALAEAEGFEEAADLAARCRAALGLPAPTRTDRSGPTEPAPPPPQTEPKRGAGRGLRPTASADLGLTRRLKALACTVPLHELDYHKAKLDWVDASIYQMAEIAMHTIDHITIAMDFDTGAVHDAVRERVVPFVAAQAPGRSPDEHRRVARWVLEKLINVGTVDRVFRHAYGEIDVNGEYQRRTFDFKLVREVPGARGEIYLRTTDEAINVLVGALDTDVASAQVAAEVKLDNLINRGQLADARVAAEQARYRTVQYGEMLRHKLDATRRDVRVVDWEHELPDMLDKALAHIEERFKVEHAILRNITDARDGSDDPDHKRRAAELVDIVADCIRRHTQLQSRLQSARAVFREEQDRQHFSGPPQRAALDLHGQLLKPMLDLPITDAVGPLEQFFRAASGIESPDIPSLPSLVSMLLRPVADRDRTAGPVVNPAIDEAPDDRRFTDEHRRMADTLLELTGRVRPLSAVLREAADFDDDLPVLVALRATNAYSPAIGAAVKHGRDKVLLAVAAGYSVEPSFADVAGDDLLLTTAEVVDLPSDAPVEDVVAAHEESA

SEQ ID NO: 40750 - protein, 1485 aa, Saccharothrix espanaensis DSM 44229
MYELSKVRLYSVGPPGARYEDVVIDLSGAGTPVRDQQLMLGQPEVRRPSPASILFLENGGGKSVLIKLIFSVMLPGKRQVVGTSNTKVLEKFVDRKDVAHVVLEWMHTRTGRMLLTGKVSDWRRRGPQSGEDNLVDLWYSLRPNSVVDITTLPFAEDGHNLVATEFRSRLDDFAEEDPALELEWADKHWKWGQRLADLGLDAELFRYQRDMNAGEGEAADAFTFTTDEAFVDFLLKAVLPHGDAEDLADSIAGHAEKIAKRNDLELERAFVAEVLELLDPLAEQRSATVRADAVAAEASTELDAFVTRLIARVVHENGLLDQRKQHIGELTIAVSNAAGALRRAQDIHAALAHRTETLRLDAARSAEHAAAGVKEHAERVINGWAATRKLMDHETTAEHAAALREVVGQREDAARMALEARDTKSRALARALLVTADAAIAEAEHEDAQLEKLKEVVEGTTESWRTAVAAAAQATALAAQLNERVAGVDAEVEAAVEAGLITSVTSLYEDAVSLADRVRTDSAEIEENAGRLNALEAQVGVAQTELLQAQGKQVAARSRHENAVTVLNRAEVAAEALGREPRLIELLDTDDVMLEYDVETLLDQLAKAQADFDQQRTELRVADAADEPARLIWEETPEALLPPPHEVAHIRRLLESEGIACGTGWDYVADHSDESTRAELVRHLPHLAGGVLVNKPEHLDRAREVIAEHGYHPSGIVTVATSHSFDMVVDAAFDLSLRSTAGFVAPPNPALFDPAAAKAEQTRIANEHAARKARLAELDATYSADRALAARLSAWRAEYPSGTLAGLAEAVTSAEAALRDADQAVEHRERVLVGAVEARDAHKKLLAELRQALDLLKERSRSLTELAGKSRESDIWKRNAAQARGQVEAETTRAEEFFKHIGRLRGDVAVRQRRADDQRALAARTRDEIDNIQGDTAVNPDAPVPDQPVAVLRDVLREAQRVYDKAEVGDDQLKELQAAEVKATTARREWEDEPSVIRDIARQLLESTDGADAASRASAVAQASSRLQSADRDYRNASNKAAACGARLEQLPAPTVVLDRSLQPRDAEHGEVLVTEATETVENTGESHERRIADLEAARTALGKAEVVADAFRTIADAHRAASDDQSDIDTAGVEPFRGDVDAARSRYGELRRATAVAQKVAQDAHRALRTHAERLDQRARDSRFESLSIPARTQIPGVGLSAMADHAAEWAQQLRPRLRSLTDDLEQVDRHRSVIIERLTAIVDGALRRLRTAQRLSKLPRGLGDWTGLEFLRIGCTPVEGDLLAHQLGLVLDDAVERHKTNGKRDGLGVVLRAVRAAVPKGFKVTMLKPDAVLRAERVRISEVRDVFSGGQHLTAAIILYCTMAALRANNQGRTRHHHSGVLFLDNPIGRASAGYLLDLQRGVAAALGVQLVYTTGLFEEEALGGFPLIVRLRNDADLRAGRKYLSVHERIALHLDSLAVPNGTGVLTTTRVVLPERRRGEAD

SEQ ID NO: 40751 - protein, 377 aa, Saccharothrix espanaensis DSM 44229
MAKRIDRLGDALYRELLKCAAVRNWPGTTHKEVPIVEVRRCFGEVYQRREGDDGVTAMIRASLSVLVERQLVAPVKATDLERIDLPTKVKLVPTAAKTPKIVPPMPRWHRLLYDLEDFWPTVTDKQRVRYVAINRWLLSNPDTATIVPLRERALEIFSLFGAEEDFESPEKALDGMRTGPLFGDQERLLHLLRAVATPPPLLSRQLLEEVTPSHLTRVGEGDLLLVVENSATWWSIVKALPALHNLGHIAWGLGASFISSIRSIADNHEIRRIRYFGDLDLSGLRIPDSARRTASVEGLPSVRPAVNLYAELFALGRSWRANDKAVDRARARELVGWLPAEHHDAAVRLLTEGRRIAQEWVGYRHLGQTSKWHADLM

SEQ ID NO: 40752 - protein, 499 aa, Tepidanaerobacter acetatoxydans Re1; identical to SEQ ID NO: 40643

SEQ ID NO: 40753 - protein, 258 aa, Tepidanaerobacter acetatoxydans Re1; identical to SEQ ID NO: 40644

SEQ ID NO: 40754 - protein, 1495 aa, Tepidanaerobacter acetatoxydans Re1; identical to SEQ ID NO: 40645

SEQ ID NO: 40755 - protein, 355 aa, Tepidanaerobacter acetatoxydans Re1; identical to SEQ ID NO: 40646

SEQ ID NO: 40756 - protein, 541 aa, Clostridium pasteurianum DSM 525 = ATCC 6013
MDLSFLDVQHIRMKKIGAYALLFRNSIAKGTWKKYGFEEGYEQDNLIFSVLLYIMEQSLKEEICTIDHIAAFIDELNNLHFKKGIIYEECRGLGEFIVNTILCDEGNAMYFKAYNFKEGQYKDININFIKNKMEYIEGVRRVSYSLTDDGYSLLLSTLEIEENLKITIHEIVFKMHLEKASYDKAADDIKNIFNMLRIRVQSMEDAIRKIKENPLAYSTKDYKSMMEGNIDILNNTKKQFIIHREMVNEKINEFIEHDIHIKELNKEEEENLNNLRIIEKYLSRTIDEDQRVLKKHFDLKDVYGKELENISKMSLIERFNFRKEVYDRILDNPNKLEDIDIFLRPLFKMHLEKYYNINKALEYQKVIRKAEIEENEEISFDEEGLIEAENKKKLERLEKYKGVIEIFLELAIGRDKISLGEINSLIKESETLMITLIPTVEIFREVIIEMLKNRTIDIAEIREERKNFVESGEIEFQLNKSILEIIDANNSFKKITKIKVEKILDHEDIKLEGLRNENGDIKNFICSDISIEIIKSGGLRL

SEQ ID NO: 40757 - protein, 235 aa, Clostridium pasteurianum DSM 525 = ATCC 6013
MAYTTEEIKISNKIFYHLLKHGELKEGAEELYKIYSENENVTELVKELGEASECYVKKYGGVVYLIPKEDNDFIGYSKGELKKILCKSGANDKDYYLSQFVILTLLVEFYNSQSVTSKSREYIKVGEFLNIITDRLKDGIERSHNNEESGIAYENILERFEALKSSEKKSMSKTTKEGFINAILDFLDSQGLIYYIKGDDMIKTTKKLDSFMDWNLLNKNNYNRVLKALGEEINE

SEQ ID NO: 40758 - protein, 1461 aa, Clostridium pasteurianum DSM 525 = ATCC 6013
MSKINKIRFVNLNYNYNTMKIDDEKFYLDGENAMLNLRNGGGKSVLVQMIMAPFVNRRYRNTKDRAFESYFTSGVPTYILIEWKLDDGAGYLLTGMMVRKREAASDENSKERLDIINFIHEYREKNEYDINSIPIVEEKNERKIIKSFTNCKSLFEALKKDRQLKFNYYDMNNPVTTKNYFNKLEEYKINYREWETIIKQINIKESGLSELFTKSKDSNGLVKEWFLPAVENKLKVDEDRIDNYRQLLDSYIKQYRQNKANIDKKAKLELFNELSKDILTCCEEFIHTTEKREEIKNYIANVIAYLREKLEDKEKEEAALEQLIESLNDKIIELQYEEESIKVYKKQEEIDTLEADIIKQQELVSESECRKNSLIRKGNILECAKIHRQYQKISKELQENEIELAVFSKKNEDNAPHINNLGFTIRGILQKELEITKTQKLDKLQLNKNLEEEKESINNLLKINRNEINSLTERKGCLSAEVSSFDKLEESFNSRCGFNLFRNIEAYFDEERLLIIDKEISDEGNSIDKERKNISEKILQNEEKLKSKESEKLRNFAKSSAVKNKLSNKNSEFEKAEEEIERRKEIIKFIDFEEDKVFDYENIINAFDRKIEMLKEDEAKLKKLLDNLNSELIKLKTGKVLELSKDIEEKLREKDISIIYGMEWLKKNGYPLEKNEKLVKDNPFIPYSLIMDSKEIELFEKELLDIFTSSPISIINRRELETSTNIMNGDIAHLNGISFFISFNNKLLNESELLKLIDAKVKEAQAVQVKINEKSENIAFYEEKRNIIKYSALTLEVYEGLKKEISNLKVEASELREREIALEKSILSIKDEIKNYKERVQLLEKDIQKNIDKAKAFKELLEAYEKYKKNKISLARVLEGLSAIHNQIEKAESRISDIEKGIKECSSAINFYNIEEEKASKGLAEFNIYKSGILIEKDREDLISEYNALTKDITSSEKELKNKINKLNEEFNGIHSELILKADKYEVKEVEYTNETFDTQKEFELKDELQKENEKYNNLKDEHNKFDKAHGIAVSKLEDLKGKLKAKFNKEEPKTKSLLIDKNFKLEIEKLKLEIVETNSKKSDVNKVKAKIENNLTSLNEFNNLNVTDKVDVNIDLNELDSAVGKLKRDLNNVKAQENEREKNLTNLVVDTEIKDEFKQESLFKEPIQTLKSLIGKPREFKEQLNLVVNSYGLIMEKLMADIELIEKEEGKILESILEYIKDVHENIEKIDGNSSITIGTKRLKMLNISVSAWEENKELYKVRLKEYIERIREQSIKALEQNEDIEDIISNNININKLYDGVVGIGTVNIKLYKIEEDKQRQISWDEVSKNSGGEGFLSAFVILSSLLSYMRKDDSDIFSRKESGKVLIMDNPFAQTSSAHLLKPLIDIAKKSNTQLICFTGLGGDSIYNRFDNIYVLNLISSKLKSGVKYLKSEHAKGEEEKEEIIASRFKIEEQIKLF

SEQ ID NO: 40759 - protein, 335 aa, Clostridium pasteurianum DSM 525 = ATCC 6013
MKDLSSYSKKVIELDEIERIYKTETYDDLCGVVSDLIKEERLLPVKSSGGNGKNPTLYKKYKILEKNADNSELLDEINYKLSIKLSVEYYKKHIDKYKEHREYILKLSDFITNEQHLLSEPVSMNERSFQIWGREKFLQKEGGKTIVKNLGMELEELNFYDTSEPLAYYSKSKETPQKILIIENKDTYYTIRRHLIGGGENILGEDISTLIYGGGKNINKAFNDYKISVEDYVSDSRNTILYFGDLDYEGIVIYEGLYKLFSKEYDMIPFIKGYKKMIDKAKAESICLPKTKEGQNKNISEIFLREFDKEYRNEIEKMLKDGYYIPQEIVNITDL

SEQ ID NO: 40760 - protein, 509 aa, Amycolatopsis azurea DSM 43854
MGRAVFDEAFGGRVRALLRARPVADAADNASRQSWGTHDYDVVTLALAAIDTVISRQGFEEEVTYDEAVSGLARLAASACPEQPSEEHEAVARYVIDALLNRREREAPFAYQVSDFSLEPDGSVQHRAIAVEFRLLSEHEDQQRGVNVLRASADAINALVGGLEFDVEDEQAAVELMLDRQLKRGAFGQAEKAAERSRLLSVRYSDELRTLLTDTVRDIRTVLDRWARDVPAQFERNRVHLEERLGAEGRLLDHVRSALDTAEADPAITAAAARIAGLLEECRRRHTELHGRLVGARTIFLDEQLRQSFRPIGGLRNPDIADGVFLPLLTMAAEDAAEPAEAFAVFAAGPQVPRIVRFADLVDDLLAPRREPRIDEPPLDDEELGDPDPPAVSPEILAAATAVVDSVPLPARLSVLLLAVRATDLPGELDRGAVERLVALAALWTYAPESAEDFSTAVDTAARILGPAAVVDADGTLIDVPGWSGDDLIVAEDEETLARWAATSVQEVS

SEQ ID NO: 40761 - protein, 1464 aa, Amycolatopsis azurea DSM 43854
MTYQLSSFRLANVGDRAARFTDLTLDVSTAGERAPVDSILWLRNGGGKSSLLSLFFALLLPLRKDFMGKTVKRHIEDYVSSGDTSHTVAEWVAQPGSDASRPARLVTGAVYEWDERRKPADPDRDREKLKGWYYSFFAVPGVLDLLGLPLRDESGRTRTMAEFVNVLKEIAAANPQQFRFVITRQRGEWTDALTARNLDPAVFAYQKQMNHSEGGVAGLFEFATTDKFIDFLIDLTVDSTQPDLVANNLRKVVDVLARKPGLLVDREFCGELEGRLERLAERHMLAKAAAEAAAGARSSASQLAGAFRTAASSREGDREWLAEEADRLGNSARTLDRERSRVNDIASELYRVAANHRKKTAKAEWERATTTAGEANNKDLAWQAVVHLADRVEAHLHAEDVRQQIAQEDRETAPLREARDNAAVTLKARYAQLSGEEREAKTIADTAAGEAQADAKTEGAREQQNRKLASEAGVRAETARGRLIEIRDEVAVAVTLGDLPDDQVDPATVLAETKQNRREKEDLRGRVRKRREARPPVRGGLEKQSRKLATDRAAKSAERDRLDDDRRKLVARADALGTDVRLAELTQLAAGARLDLWTEAADLRAALTREASAAESAVVATRVDAAEDNRALDGLQADDFLPTTRDAERAAEVLVADEVPARPGWQILRDLVTESERASVLKNPGVAELAAGVVVADGDAENARRALASMPWHAVAHIAVSTVTQFERAVTATPPAHSVFPSEPALYDRDAAEHARADREERRRDQDRRIAELQEQAKSDRALLATLESLLEDCPAGHLDALEKAVEECDEAISGMSDADQVVRAQIEELDEQEAEDAATEIVLSDELNLLAQRIERLNTLAKRTAERPGIELAIVQLDKEIEVHTGIADEAASRVSELQEAERAARALASQHQANWKRYERDSTQVTLLDGDREAVVTGDGDPLSWLSSRFAELDSQWQSVASQSVLAERLTAHLERGKRADRALAEYPESARELAQQLLATGDGQDMDRRAAARKRSRDVANEAQQKLSETKTELNQASEEVKQRTPRDRLRHAPLDDEPATEAEARERAAAEAERATEMSSEVTRLNREAEDAGKLASEADTAAQVFAQQAKRLAGAATPVEVPEDVPAYAGDEPEAELDSLLSRLNMANKEAEETAGRVTRSVAEVRRIAAEARFAEVPGAIRDRLTGDDADVLADRAEARAQEMRVRYRTIDGQLAEIGRDQRLVVGEIAGLVKDVLANLESAHRYSKLPGTLGRWANEHFLRISFLRPTGDEDLHARIDAVVDRIVADKKTKPEGLAVLKKCVHEAVAPRGFTVKVLKPNSDLAVEPVDVTHLGKFSGGEKLTVCVALYCTLARLRAVNRGRGRAAIGGTLVLDNPLGTASHVALLRLQRDVAAAHGVQLVYTTGVEDLGAVGQFPNVLRMRNAPGSLRNRRYVVLDQQATADDDGITRARVLREDDS

SEQ ID NO: 40762 - protein, 349 aa, Amycolatopsis azurea DSM 43854
MNALAGRLAEHVAASPVQRVELVDLYAAAVAFDRSLATTPSARSEIREALDELVAAGQVAFPVSRQHFDTREEPPLPKWVRLPPRRRPGRAPRDVRVWPAALEAAGRIAARDDEIGVLEIAAVFLRDKGASRPSVPVRERSLELFGDEKRLDRLKSTRLFTSGALTMDLLRCHEVPIPFVSQWVAGAPDPRGTALLIAENHHTYTSLLEATRFSAAAGGPARYVGYGTGSQFPSAVLSVPLLSPPPDRIVYFGDVDLNGLQIPATASLNSQRAGLPVVEPAYSLYNLLFATSYRRPTEPVAEHVAAQVAGWMGPLAGQAQNVLTVGTRIPQEAVGYELLMARLPALDAA

SEQ ID NO: 40763 - protein, 502 aa, Clostridium ultunense Esp
MDISIKNITENYRDRMERLALFDPLYALERKSGKDNSGEPIDYYGLGLLTLLFFFENMLIRNKKAGVMELAQFFSNLTQEKLDLTFEEYVKLAREIVKVFRPPSGKRNSRKFYNWETGQEEIIQYSILKASHFDAKANTQYYELDEQGLELIFATKEYFSEFQLSINQLILRKQLEKGEFVGALRQIDEMRMDVRNLQDKIYRIKHEIQRNIISDETYRRYESIVDDIHFRLSRENEEFEELKSFIKETKERLEHEIHEDKMKKAYGLIIKVDKELGEVHYEHRKLLSQSIDMKTTALNAAQESLYYIGIDSFNFKDQIANKLMSTPLPLEASRRLVEPFLYLERGGFWSPLAVFGKQRIEKRGLEEENLTFASPLEDWEIKEEVKIQQENFKHIMEIILKAMEKENCITLRELIEFIKENGKEDILNYRSFYDFWILLHHSSPIKLEVEENQNHMLDKVIELLERDYTSLIVVEIPGKIEPNERYTIRNMELTLEGNKDAI

SEQ ID NO: 40764 - protein, 250 aa, Clostridium ultunense Esp
MLYEQEQVIQAFKIYSTLAINGKAFKEDLRLYLADDSIRGLVDQFAKEVDCTLLLVGDLIYMIPLSINSPYHISNETIKEKHLPSRAVNADIYMMYVAIIILFGEFYDSYQTTEATRDFIKMEDWLNSVNDKILSLKGYDEKELMELERKYEYNWLAIVDKWDALDDIKENVQQTARTISRMSFMNIVKRFLEKQELIEGIGNNEIQLTEKAKAIIQRYYMELEYNREILEFIYSLEEKEGDVIASHIQD

SEQ ID NO: 40765 - protein, 1478 aa, Clostridium ultunense Esp
MPAISKIRLTNIIYENGGKRFNDDIFEFDGYNGVILLENGGGKTVFIQTALQAVLPHANLGERRIRDTLSLEGGASHIAIEWILNDRPRRYGLTAVTLFLGPEGLKSLRYVYDYSGGDAHSIENIPFVKKNQEGNNRPASRQEIQEYYQYMQSHKMNAHTFDTIKDFHQYIEENFHIIPSEWKSIAHINGAEGDVEKFFEHCKTTSQLVDQLLIPVVEGALVGNGTKDFIQIFERQREHFKKHRELRRRIEESKNIEQKIAHYVSTYTRLHEAEEKMLNKKREAKSIYEFLVEEEDKTQKEISHVEELKELLSKDKQELRRKEASYELALLDKELKNARDDYEIIAEEHREIVSRLEGKEEELQNLEIAELKENIKKNEEFSNILKEQLEELDEDEDIGVLKDRLEENSSILKGYFEREKENLEKQKELLESQKNRYEDELQKIHEKIVGLQKEKQSLIEIRAGYRGEIKGIEDNMENIRKDILANPINEMVEGEYPKWRQRVEEIEGLNTSYKEQLNSLKSRKEQLSIEIPNIHDEIQRLIKDTTIREKDLRSIEEKHDKILSAVKGLRLEWNYLDSIYLKQQSIIEYIEERLERTRNQREELLEDERLSYRLLDYYGGNEYFTGEPLLEEWLYSWRNQFHLLETGTRYVEKAAINLNRNVKEIYREYPLWPLAIITTERELEKLWQKIEGQRQRLTFPILILSQEEAINILLGKVSIEERYIYPHIWQDNIDKEKFQQWKRELEELAKKAVKERKEKEREEREWQNILRITNEFLFAHPYDEYTQLSEELKVLKDRLDRYENLLDEKQGENVSIDREIDDYENKLKDLEQESNYLGRKMERALDYFEKVKYKERLSNQLYQKNEELVFVDKKISFNERHRERKEAIVQGIKAGIRDLSSQISIILEDSNYREVKHSKALYRDVNKDNILEERKYIKDRLSEKQKGRSEIERQLKETEKNIERDGDLLKRKYAGANYPIDENIKFPFNGKILIEGLLTDIRELKEGLEKILPSLRKKEKFYEKKANRYELRLESFHKEFYDIIYFTQPLPSVKKQIFQERLEIEEKEKYLDTNYKRLKNQLEDIQNNIQNLEIKNGKYEFLLENIQGTVLTADIKQNLPYNREGTISKLICEMEDFTKNLETHKAMVDSERNQFVQFANINVKDIRLREMAVSGIKNKRVFHEVLEWEKNMGKTLNRVIRIHEKNMMEHDKELNQFIQYLYTYLSTLADEMRTIPKNTKVKIGDDWKEIFQIQVPSWEEEEGKEEIRKHVDWMISKLEKEEFLDEEGKEDQGKIKKAIENWLQSKQLLNIIMGGKEIKVRCRKVTNDGKVSNMYYSWESSNQWSGGEKWSKNMALFLGILNYVAEKKQHILPNQKRHRTVIMDNPFGKASSDHVLSPVFFIAEQLGFQFIALTAHGEGRFIRDYFPVVYSCKLRPSVEGDTSVLTKEKNINYAFFKDNDPMVIERIGEREQLSMFEI

SEQ ID NO: 40766 - protein, 340 aa, Clostridium ultunense Esp
MENTIFEYLKSYKKRTIPLSRLENLLTGSQAYENFASAIGKLVEKGVLKPIKSHGTNGKSIPLYNTYRVMKSNLRETLNSEIKYYSIKFNPNIYLNSYFSLDEKEWHRDFPYIQRIDSYLNNKGLPTDYATIPERSFQLVGDEKWIAEKDGKKLLERIKLWDKLKIIASPDPLMLGVNPLKFRESRHIHLTVENKATFYALMDSIKDTDFTSIIYGAGWKVVSNIQRLPIQLGLGNDIHKIYYFGDLDPEGISIWYSLYQKYKIELALPFYRALLEKSYSIGKETQQKNMEAMAKFKSYFKEDEIAIIDQLIQREGYIPQEGLKKEELINVWRNGLWIFP

SEQ ID NO: 40767 - protein, 499 aa, Clostridium ultunense Esp
MKERWQGFSERVKRLNPLWQLGGGMNLGELNPYARMLGLALLLEVFFRELDNNPARTRQDLLQITQDLLQEMHLHVPDVQIIRRFVDGILWSGTPQMQESFTAYFFDEKEERMAEQSFRYLQEDRLNSQWERGGNTVYQLTDESLELIFMSREVLQELEIGIDQLYVQQQIKRGNYRKALRGLDDLLAKVNRLIQQEQGYQADMKRNPKIIFQQGGRWRSKREEEIHAQFAEEKKRFDELQRALHRMQETDSGEWYALQDKLERTRVQHDKLAQVVLDNIALEVELRVRYPQLFWNRPSYSFRRNVWEEGILKEGLAHPDQLSLFLEPLFSPEPPFLFPLDWGWAEQTESVWEEEERVEETSAEIEAYVPHRIDFEQIADVWQPIFLKLLEEGHFSLSELAHIGPEEQQKWLLQKETSDLWLMFFASPLVVPPLTPEMAVTDDRLKLIQVLQNRDSRFLALTGKRIRVQIEPGKPMIRWEKLAITPFYMIVEEEGSPSD

SEQ ID NO: 40768 - protein, 247 aa, Clostridium ultunense Esp
MIENEQVQQAAALFFSLLKRKVIPLDDPIVQSYFREEGVRDALRILANESGTELLQTQDRLHLVARPQGSVFATSFTHMKNRYGELETKKYFYLQNVIMLVFLAEIDVENGHRLRWENQGISFYQLERQVDLTLKRWREKEEESEGWFSRDWGVAVSEMADLWAALSTQDETGENPASLTRRTRLGNIALAMRVLRDENLVYIAEDILRVTPRPELYERLEGIYHRQDRYLELRDLIRRSLSEEGLL

SEQ ID NO: 40769 - protein, 1513 aa, Clostridium ultunense Esp
MPRMERIRITGVRYENMRKRHEDTLLDLCNEDGPQHTLITLVNGGGKGLLLQMIFQLLLPKTTWGKNGENRVEALFYNERKAFRPYTFHVGIEWRLDTEPRSWLMTGIAVTAKEKQRVDESEENPSDIHYMLYTQTYGKPHDWDLAKMPLYDTERREGVQMEELKAFLDRQKSLFQTFSPSRLRDYYDYLASFGIEKGDWQVMRKINKEEGGVEAFFSDGQDNDGLFRHKIIPTISQYLQTEESEGLVPLFRSSVKIAQDLPKLMAREASYREMQEVLKPLKDSLENGLLEKKRVEEHQEKGEVLLGAIQGWQETLGAELEKWEEEKEREEERLRDWLWQEANLSYAKQHRKVKQMKDRLEQITKQKISKAERVATLEREVKLAHLHYLLRQWSDLVNQERETREEIEQLQKSMEASPTAQELERLRKHLAEEWDRAASLWADHIAQVDQAKREFQDLQFATKEEIKQTDRRLVEKKGRAGTLSEKMKEFNGQAIRMANRYGAKVNTDPEAVLREHQREYEQRKENLAELKRQLEEYQREKERVIAEHSALTQEKEQHERKRLELEEAYHARRKGEESLYIKLRSFFPEWSVEDRGGMGWLQEAARRIEEKITNVERAHKEEEQAYWMHQLDRSLQTEEYWIPNRDLAQLYRHLEAANIQAVYGTEFLKDLSAEESLSYIRRYPLLPYGLVIWKADEKRLKTLFSSPKAREWFLRSPVPIYSREIEPEPHSPVEGEGDGWFSDRNALYLHDFGMELALGDERWVQWRERLEEEEARFKAALAMYEEQVKSLREIWDDIRMLLRETPSAVWRERMEEEKKWLTGLEDRLQQLESRETERKEAVRRISEKNLETEELMRRQEEAIGELKRWIDRVLQYKGDMRERDEVLQEIHRLETEKRSLEERYTRLENGLNDLKDNERNWRGKREKEFEKVKKVLTDADFPAGSKGEYEERVRIINEYVEVEITWETDTGQLLPLAREALRLKQSVEEKEAELLRLQERLTQLNQRRKEKETEMEDVTPDWPRITPIEGAEEVLKRRWHMAEQEYREEQKQLQKLERDFERTDASCSTEQEHLFKSAQEVLHRYGKEAAPWEEISLELKEQEIVEGKAKSTIHLHEVEQILDDLRQKIGRLDNNQKRMGDQGIRLKLTLEIPQALMESVKREPDRAVEEWIEAHKRFKEQLDHLKGAMERERSRLLQKLEGLSWDATLKENLKQAIHELDLNDWKQSRDVLESMILHAAEEMNRLQEDKKRAEEARDTWVERASYRVIQIIRALKKMESSMVILNQNKHRFPLVQMNLKRGSFPEQPEEIKPELNDFFLRTMERLIKTYGEIENVPDAEWETAVNDGEVVHVAFHRRFPTLMVYKPQTTNSFLYETPKGHHYTEWQTLNKGSYTEAKGSGGQLLAARTIVMMMLITYRRQQQAKQWTVLISDNPFGQAVSEHILDPIFAIAENLHFQWIVVSPPELIKLDVSRRFPVYWELKLHPFAHGEQIVEELHHGGRQYTDELSLFDF

SEQ ID NO: 40770 - protein, 361 aa, Clostridium ultunense Esp
MIGTIRAYLQTVQSKTTRRKKIAVDELERAIMDACGSADHYLQAGGYQSFYQGVKQLEQEGLIAPLRSSPLNGRTPPLAASYWLMPQGVTARWSEVQMLRVADRLNMEKYRQQPSLQTDEEWGRIERVYRFLLRAYEREWVTREERSLELFGNEKWLAGSEGNAFLSRIGISLEDLKARVYGEPFVFWPRPGVDVAKARDVLIVENLSFFHTVKRVLESGREIGGIEPDLLVYGEGKKIESSFPFLFDLISGTDLLSVRVNYVGDIDAEGWGIYVRLVRRYPAMNVRLAFPLYSVMCAVSRRFVELPSYRDQSENEEVLQDIVRSFTANGLDSEARLIADLWRQRRRIPQEVLTFETFLQR

SEQ ID NO: 40771 - protein, 488 aa, Escherichia coli KTE66
MSLGFLEQARNESMARRELSIQSHALLVVRTLDSIYSALQRNPFDGVELDALAAIMYLFDAMLYYADRERQPGMTRKEAELCLVGHLNEAYPGQEEPDYAQVASKIFAAIKDPFRLRYYDFSQRTHSEEQIVRLVRYDQLSGSDDILWSLTDEGMLFYTLRLDETPIERAAILAWRTLKTIRRGEIDKAVHQIQSTQRQLEQYLIGMRMKVRAAQSGDLSASYAHDIRPVLNDSFDKTREVLEHIQNSMSAITEMLVEGSSKINPDKLNKLRRAQEIFAEVCAFTQRYQDCLLDVNKDFERARLKLIIPRDNTLFRETLEKGALKPLLSHSPDTVEKEIDDLTARLLAPRRQDDDRHILFDLEALLNLYLDRFEQALPHEIQDLTDQPVAIETNLQGIPESVIKKCSDWVSDRLKNWGHVSFRDVFDAYEGEELSEQEQQVCLLHIGSLAANSDPAIEVEIDDAIETTLWRANNIKLLTVAPLYPFEE

SEQ ID NO: 40772 - protein, 1478 aa, Escherichia coli KTE66; identical to SEQ ID NO: 40570

SEQ ID NO: 40773 - protein, 347 aa, Escherichia coli KTE66
MIWLSRLESTANKHRLAAGKAARTVKANAVLDEVLRAHNQEALSQEVPDLLSQAVTQLLERDWRAQPKHKASWQRYWRGMSLPSTFVYEGAIVPTKTTSEIAWHPWLARRITGQLTQPIKARLQQLNTYLFRQTGGDKSLFPGLLGHRERSLLIFGDEKALDSLPPDGWKHVTLTLADMGAFRRAPPLPYESSRCHDLPAIIVENSDVYYRLCQLNRAQTRWSLVIYGAGNKVSGQAECVSQLLEVEQVEQLLYFGDLDVAGLKIAHQLRCKLLNDYGISLHLDEWLYNKLILNGLMTAEGNANNERFDFELQCGWMPKFVLREMKTLLAIHQRLPQEGVASLGLFI

SEQ ID NO: 40774 - protein, 540 aa, Eubacterium plexicaudatum ASF492
MQYEFLKQFPKRMKNVGLYALLFGNSSQKTTWRQYGFQSMDEQFNMIFAVMLYLMEQSLKEENCVIDDIGAYIDTLNTTAFQKPMSYEDCRKLGDFIVNVILSNEGRPMYFDGYDFEKQEYRKMNISYVANRIVYPEAEVKRTSYYLTEDGYNLLLGTLEIENNMKLTIHEMIFKMHLEKQSYDKAVDEVKNVFNLMRIQLQKIQEAMVRIRRNALNYSVADYRVILEENMDTIRNTRKQFLEYRDMVKARATDLEEEHINVRKLDAKEEENLSNLRIIEDYLNRAIDEHQKILNNHLDLKALYTKELEELSQMSFIQRFSLRSDLFDRILENPQGLAKMDLFFRPLFLKGTDKIYNLNKALEPQQTVRKKAEADSEEQIDFDEEQWQAEQELRRMEKLAKYRGCLKYLLTRLLETETFTLAQCRDALLHEPEHRTQLIPDVEIFKEVMVELIKSREIDIPALKRERSEFIQESSGGFQLHEMMLYLLEEQEAAGAKVIEKIEICRTEGTEPVVFEEVNDAYGTAKTIRCSDLRFLAHFE

SEQ ID NO: 40775 - protein, 240 aa, Eubacterium plexicaudatum ASF492
MAYEMEEIRTGQEIFYYLLEHHEIREETENRLYQAYAENERIQNLVKSQAEIACSSIERYGDVIYLIPKEENYFLGFSKAQLKALLCKSGGTDKDYFLSQFVILTLLVEFYDSQGRSSKAREFLRVGDLQNSIGTYLKTGAENSREETDTERGMAFTDMYEAYEALRSDEKGSKAKTTKEGFLHHLLKFLEKQGLIEYVEEDEMIQTTKKLDNFMDWNLLNQNHYLRVRQVLGLEKEVNV

SEQ ID NO: 40776 - protein, 1496 aa, Eubacterium plexicaudatum ASF492
MSKINAIRLINLNYNNNAIRISDETFHMKGESTLLSLRNGGGKSVLVQMMTAPFVHKRYRDAKERPFESYFTTAKPTFILVEWVLDHGAGYVMTGMMVRRRQEIGPDTPDTNEALEIIQFISEYRTSCPYDMHHLPVVEKGKKEMSLKNFAACRQLFDGYKKDPSVKFFSYDMNNSAQSRQYFDKLMEYQIHYKEWETIMKKVNLKESGLSDLFADCRDEKGLVEKWLLDAVASKLNKEKDRIKEFQNILEKYVGQYKDNKSKIQRRDIINRFSQESQGIRETAEQYEAAEKELRLQQEQIGIFLWQLGAAKSMAQAESTAIADRKRQILADIAHLKYQQVSKAVYEAMEAERFCRANREMIQLERDEKEQEYEQTKRMLHLLECAGHQQGLEEQNAECVRYEQQLEILNQKERDFGQEREQLGYTLRMHYEAEYDRQQEQTKAYGEELTQIQEKIAEEEVKTETCRAKVLEQSMQIGSVQAKIQEYDAKEETYNQRYEPGFVRNILGEYEPAALEIRLQEYEKELDGLKKSYQKMQKDAEAGSWQQKENERNLEDAGRRRMQKEQELKHAQEVCERYEQELQERKKMLRYFGLDQTVLYDLEKILHAAQRKLSEIEWAKRNLEKEEDLLRKEYRRLTQGRVLELPETFERLLDDLGISYVYGMEWLKKNRYTEEQNQKLVRSYPFLPYALLLSGRDMEKLKGADEKKQETELPYTSFPIPLIVREQLEQEQDRGKNPIVDLERVSFYMLFNEHLLNEEKLKQMAAEKEQEIACKNEQIQIRREEYEQYFEQKERLRSQTVTKPLQEQAQQQKNQIVSELEELSQTIAKQREEAQQLTVRLQKLQQQIQENVRQQSAKERRLDDLKQLLLAYRSYLQQKQLLETLQHDLAITKEKERLAESTAAKLHERARKQEIELEHSRRIAERLSEKAAGYRQYEQAEQVEGRVEDLENRYHAITSQISLRQQEIERLLQSAREKERKMERELVRKQKKYGLADGEWKQTTYDTKAEEYQEQLLTVREQQYELKKAQWNEADKNAALASQHLEQQKKQMMEKCDRTQPLPKEEIQPVDFDAEVEKKDYRRRELEQAEQEQQKRMDWYEEHLTALAEYMEFLPEDEDRLWEYLKQDADMDQKEQVIAKLQDAVEHMSREELRRKKGTLMRDYNGYQEQRQQRKEHLTALLNQMVRREIFAEDFYRKPIEAMLSLTDDAGQVLRQLHTTLQSYESLMEKIQVDISVVEEEKKRIAELLQEYVHEVHQNLGRIDQNSTISIRDKNVKMLKIMLPDWEENEKLYRIGVWDFMEEMTNKSIELLENNENALEYIGTRVTTKNLYDVVVGIDNVRIRLHKIEEQRQYEITWSQVARNSGGEGFLSAFIILSSLLYYMRRDASDLFADRNEGKVLLMDNPFAQTNASHLLKPLMDMAKKTNTQLICLSGLGGESIYNRFDNIYVLNLIAAGLRNGMQYVKAEHARGADAEATLEPQVSQIEVLGQQELIF

SEQ ID NO: 40777 - protein, 334 aa, Eubacterium plexicaudatum ASF492
MKRISLHEIEQKLHAETYEQLCAYLYRQIENGCLKPVKASGLNGKKPALYQEYRVVDSDTDTDYHQYEEELNYQMSTHISIDYYLRHLPQYAADREWVCRLNQYFFDTEGKVPEPVSKNERSFQIWGREKFLQQEQGKKILKRCGVEASRLAYYETSEPLAYYSSHRQTPQNLLILENKDTFYSMRRHLLDQSEDHKKEIFGISFGTLIYGAGKGILRSFQDFSFCVEPYMQAKENRIYYFGDLDYEGIGIYERLAESFERQEIKIRPFTEAYEKMLEKARMVERLAKTKEKQNRNISGTFFAYFSGQTVQAMKQLLEKEYYIPQEILNITDFV

SEQ ID NO: 40778 - protein, 542 aa, Clostridium sp. ASF502
MQYEFLKHFPKRMKNVGLYTVLIQNSLQKLTWKQYGFQKTDEQFNLIFAVMLYIMEQSLREENCTMDDIGAYIDAVNVQYFKKDMSYEDCRRLGDFIVNVILSNEGRVMHFDGYDFEENAYQSMHISYVANKIVYLDQDFKRTSYYLTDDGYNLLLSTLEIENNMKLTIHEMIFQMHLEKQSYDKAADEIKNVFNLLRIQLQKIQEAMGKIRRNALNYSVRDYEQILHENLETIDDTKKKFQNYREMVKSRVQELEETNINVRRLSPKEEEKLQFLREIEWYLNRTIDEHQKILGSHLDLKALYTRELEDLTRMSLIRRFSLRTELYDKLLEHPAALEELEYFLRPLFNQDAEKVYNLNKAFQLQRPVRRQAEEDIEEQIDFDEEAWERDQERLRREKLKRYEESMTCLLEQAVRAEKREITLEQAAAQTREDEEMRGRLIPNVEIFKEIMVELIKNREMEIDVLKKERSQFIQDRQGEFQINEMLLQIVEENPGLGDVERICVSRLEHGGAVTFPGILNEHGERKDIRCSNVRISVYFKEG

SEQ ID NO: 40779 - protein, 238 aa, Clostridium sp. ASF502
MAYEFGDIKTSQEIFYYLLEHHELREEEEPLLFKAYSEQEEIQNLVKSQGEAAKSTIERYGNVIYLIPGEENHFLGFSKAQLKNVLCKSNATDKDYYLSQFAILTLLVEFFDGQGSSSKAREYMRVGELQNCISRRLKEGAENVPEDREEQAGIAFSNMLEAYEALKSDEKGSRARTTKEGFLHHILTFLQKQGLIEYVEQDEMIKTTKKLDNFMDWNLLNQNNYKRVLRVLGSTGEV

SEQ ID NO: 40780 - protein, 1534 aa, Clostridium sp. ASF502
MSKINAVRLININYNNNAIRVSDETFHFNGESTLISLRNGGGKSVLVQMLTAPFVHRRYRDAKDRPFESYFTTGKPSFILVEWALDQNAGFVLTGMMVRRSQDSDSGEDLEMVNFICEYRSSCIQDIHHLPVVEKGKKEMVLKNFSACRQMFEEYKRDRSLHFFYYDMNNGAQSRQYFDKLQEYQIHYKEWESIIKKVNLKESGLSELFSDCRDEKGLVEKWFLDAVESKLNKERNRMKEFQSILEKYVGQYKDNRSKIQRRDTIRLFKQEAEQIREKLELYREGEVKEEAQENVVAHFIAELERLQAGTKEGHEDILAQMEQVHEEIARVEYEKLSGEIYELEEQMRFHLSNRDMITVEKEALERETEGIVRRLHLLACAKQQRLADEEKAEWDGALQRLRVAQEKSVNLEPERNRLGYVLRRHYERELEETGKRQQENSQAAAAAAEEISREKETQAAREEQLRERASAEGALKTRVQSYDRREEQFNTRYEEHFVRNILGEYEPGALEIFRESLGNRTEELSRERLKTKKALEAARETRRSQERRLTDLRESQIRRKAKLEQQERTRAAFEEELETRRVILKYLDLEEKDVFDTEKILHASGRKLLEISNLRRNLEKEEDVLQKEYQRLTKGQVLELPQELEAELAGLGIHVVYGMEWLKKNGYSEEENQELVRCHPFLPYGLILSRQELEKLSRHRGNICTSFPIPIILREHLENKETQEEGNVRSFGGISFYVLFNEKLLDEEKLRGLVLEKEQQILRKQEAIRIRQEEYRQYFERQEQVKNQSVNRENYAANGKLLEELEGQIRSTDEDIRGISQELAELKDRMDRQEQDIRRADRELERQQRKTEDFEEMQGAYEEYLHSRRELELCRKEIRRLTEQQKLSMEKLEKLQDRQRSLEAERDALLREEEEQQDAVRKYRRYEEYTELAEKEAGEDWRKLWEDAGDWVLQGGGQEEAGRLLDGESRELDGCPQHGGLQKPSGQTLQGMSQESSGRGRLELRKVVADMEARYAAVTATVSLEIQELERQEQLSGRRYKESDQELRHLQKKFGLSETAWQDIHYNRKEESHQEVLLEDRHLKIQTKQALWNEEDKRIAVITQQKSDLLKRMRTECGREEPLPKAQIQNQDFESRKNQLKYQEKELAHTADKLQNRLWSLNENLTALAEYSEFARKEPVVWEQDFGEMNARELRNFKGILIRDYNQCVKSRQEAKEQLVRVLNQIVRDEHFQEDYYKKPLEAMLELADDAGQTQRQLETTIQSYDSLMEKLEVDISVVEKEKQKIAELLEDYLQEVHRNIGRIDHNSTITIRGRAVKMLKIQLPAWEENENMYRIRLQDLIDELTQKGIGIFERNENAQEYFGTRMTTRNLYDTVVGIGNVQIRLYKIEAQREYPITWAEVAKNSGGEGFLSAFVILSSLLYYMRRDETDIFADRNEGKVLLMDNPFAQTNASHLLKPLMDVAKKTNTQLICLTGLGGDSIYNRFDNIYVLNLIAASLRSGMHYLRANHLRGNEPETMVVSQIEVMEQQELVF

SEQ ID NO: 40781 - protein, 335 aa, Clostridium sp. ASF502
MMNSKDRLPTKRITLEQLTRRCANETYAEQYRYVCGLLDSGRIRPVKASGTNGKRPALYREYWLAEEQKDYEELREELTYQLVPLLSVDYYLNHPAAYEQDREWVLKLNAYLKEHRTLLEHQESVNERSFEIWNREKFLSREQGKRILKRCGLELDFLNVYGTAEPLSYYSHTRDVPQKLLILENKDTFYSMRRHLLEGNESILGERIGTLIYGAGKGIWKSFQDFELCVEPYMKAEGNEICYFGDLDYEGIGIYESLAGACRDSREIVPFVPAYEAMLEKAGQAEQLPETKEMQNRNIRNLFFSYFTQPAAETMRRILEAGRYIPQEILNISDF

SEQ ID NO: 40782 - protein, 509 aa, Anoxybacillus flavithermus NBRC 109594
MGIAAYLEGIRLDKLAWSGITEGYRERIRRLALFSPLLDLERMRATDRSGQPIDMKGLGLLTLLFFFEQKLMRQYKTGVKQLALFLKQLTEHVYVLDDELCEQLARTIVQTFRPTSGKKRSYPFYDWEQREESVVEYSLLKAHDFDTRTNTQYYTLDEDGLELLFATKEFYSEFQLSINQLMLRKQLEKGEFVAALKQINEMRIDVETLEERMSRLKHEIQRSIISEETFERYRQLLDDIYSRLTREDEEFKELREFVNDTRERLYARDVHQKEEKTYELVLKIARELESVHYAHSALLDKALSLKNTTLVTAQESLYYTGLHSFNFDQDIMSYIVSAPLPIEAMKGVLHPFLKVEENKYWSPMTIFEEQNIIEEREEKIHPHFLEADNIEYVDPYRTWLKSRYRLLMQHLLEAYQLGRVDTLSSFFDYLDDIGQSYLYEHRSFYDFWLFMHQRSPIQKEMDREEGEALFGEAILLLGTYVLEVEETKTVIQKCERFSIQNMIIAVRER

SEQ ID NO: 40783 - protein, 239 aa, Anoxybacillus flavithermus NBRC 109594
MQAFQLYTILARQGVADAQAVQLYKSDDEIRALLDAFSRKVDCVIVLTSEQLFFIPRTKLSPFHVSNDWIKRHYLRSGATNSDLYLLYFVSLVLFGSFYDSYHTQEPTRQFLAMDEWARLVQERIDQLKRHDAEQLKQWEQEFSYNWSVIIEKWEAMDDIKETAKRQSGATISRLSFLDTARRFLIDQELLVDIGNHEVTLTEKAKTIVQRFFMDVEYNRGIFEFIYGFERENEDASDQ

SEQ ID NO: 40784 - protein, 1470 aa, Anoxybacillus flavithermus NBRC 109594
MPAISKIRLTNVVYEEGRKRYNDELFRFDGHNGAILLENGGGKTVFIHTVLQAILPHVDLADRKIKQTLQLENAPAHIAIEWLLNDEPRRYVVTAVSLFMTNNGLDSLRYVYEYNANDPHGIEGIPFVREGRSGKRPAERGEMQDYYHDMKVKSMFARTFSTIKEYKSFLEEQYHIISSEWESIVKINSTEGGVETFFDECKTTNQLFDRLLIPIVESAIVGHDEKRFADLFEKQLASFKHYKKLKETIEENKRIQQQLEQYVGVYEQLHQQQLLYEQAKQHAKGVWLETLKQKQACENEQNDNVMQWEEWRNAELAHRKKRATYHILLEQMRLNEFKREYEQALVQEKEKEEEMVRLEHEYYSLQLAKYKSAREQHVEMLAYIEQQMAKLKEDETLAHYEEQLEVARRSLLGLFMEQLEKIEKDERNVRYELRPIQKQVEQWKKDIEARKKEEQETREKRAGIQKVIHAREKDMEHLKQRLLANPTQQSVEEEMEKWMEREQWLDEELVRLRQEIKQLKQLEREVEAHKEELEKQRANKQAECKALEKHIQMIESEEQALIKKLASVRPQWVALDSVYIQEETIQMRLYEEIEKRIKEREKLLVQERVASRFVDAYGGQDLFFADLFLAEQVSSWKSQFHFLATGVEYLQSLEEEEREKKQEFPLWPMTLITTAKAKEQLIQKVRQCNDRMQWPIVVLSVDEASRVENEHISYEWVAPYYWQEVIDPTSFAIWKKRMCDNAEHIMQRRQEKEAEIRIWQDVQQAWHTFLATYPYEIIEALRMEHADLLRSIEQLAITIEKEKKRINECRLHVERDESLVSQYEGELSGFRDKIKDATTYIQYKKEVQEGQKQIHILDEQLTSLTKEIVRFTRSLEDAHAQSIELQERLRSLDTERRSIEQHYDYRSLHHLIPIYSGKSEDVIRENIREFELRIRGIKTSYGEWKEKKQSAQREIDRLTHEINKLKKKQVDLDETMVFPSDGEYLLERLEEQMASAHESLKHLKRQVQEALKRKEQQKGVVKTKEEQFQEQFPNEEKWSFSNELSDVAVQLDVEREMLVKRKTFLEQERERLTKEIRDIEQAERSLHVAKEMHHFHSPAIIALSLNEEEVASFTYNRCRFVEHVIERLKVSKQAVELAKERVEREKRSFKEFCRTSIQDVKMQQTAINGIEHKETYEDIIAFKNHMMQSVERATNYANEHIRQKDTELQAFINHIHTHLRTLVEELRQIPNKTRVKVEEEWKRIFTFAIPDWEEEVGKMRIRNYIEWMLQQLESERFLNEHGQQDEAKVRKEIEMWLQSKQLLQVVMNNEGMKVSCRKVTNDNKVTTRSYSWEQSNVWSGGEKWSKNMTLFLGILNYVAEKKQHIRPKMRRHRTVILDNPFGKASSDHVLRPVFFVAEQLGFQIIALTAHAEGKFLRDYFPIIYSCRLRSSSDSNKQIMTQEKWIHHAYFQDHDPKSLERLGETEQLELF

SEQ ID NO: 40785 - protein, 339 aa, Anoxybacillus flavithermus NBRC 109594
MQEKIEKQLALFSKRTISLDELERIIQPFVHTYEEFAEMVLALEAKGTIEMVKAKGRTIRTPSLAFQYRIHKHLLTKDYHRELQRYQNQLHSAIQLDEYYGKEPSIWERDKPFILKIDSYLRTHDLPCEVTAAPERSMELVGDEKWIDEGGGREVLKRIGLFELLRIIPVSDPLMFAINPTNVTRTSQLHLIVENKTTYQALLPALCGTVFSTLIYGRGKSVINSIEQFSMQYPIQADHRFYYFGDIDREGVSIWYSLSKKIPVSPALPFYRACLQKEPTRGKEYQVERAEALPSFLSYFDLDEKCRLSELLVSGLYYPQETLKTWELQHIWRESDWTS

SEQ ID NO: 40786 - protein, 509 aa, Streptomyces fulvissimus DSM 40593
MVFKDATHTGEAGSDEGLLHDEGLIRRAKALACTAPLHDLDANKGLLEWADAKAYQMAEIALHTIDQVAIAMDFDTGASRRHVLGRVQRFVARQAPERSDEEHARVAGWVLDSLINVGDVERAFRRSYGAVDADGVYQVLSFPFKLIVERRDSAGVLYLHASHEALNVLVGALDTDVESAQEAAEVKLANLIRRGRLADAKQVADQARIRTIQYGELINAQLEATRRNILLVDWMEEFPAVLDEALDHVEERVRAERAIARNMAEARDEAVNPVRKRHAAELVDIVEDCTRRHIRLQERLLEARSEFRAEQDRQLFSLRPRRAAFDLFGQLLRPALELPVADAAGAVDCFFSRSTGSSVQDLPYLATLIPALLRPAPEPSRFAGQVEEPEVELREETTRFTTEQWKMAERLLHLPGEVRSLSSLLEEAAGLDEDLPALVALLAVHAFSPDAGAARRRGQAHVRLAMQAGIALNSAGFAGDDLWLTTAHLPSASNGPEQADRSQRQGAGQ

SEQ ID NO: 40787 - protein, 1494 aa, Streptomyces fulvissimus DSM 40593
MYELSRVRVCSAGPAGARFQDVILDFSGAGQPVAAVQENLFETAAHVVRPSPASVVFLENGGGKSVLLKLLFSVVLPGRRQVKDAPDPRLLEDFVLARDVSHIALEWMHATTGRLLVTAKTLCWKDQVVSTVAENLIEHWYAFHPSPTLDLDSLPIVEDGKYRSLSSYRECVKELGAQDQRLQMSWPKSQEEWTDLLDHLGLDPELFRYQRAMNKDEGEAVHAFTLDSDGGFVDFLLKAVYDHKSLNDLASLVSTYAHKLAGRKDLLLELSFVEQALTLLEPLIEAAGAVGKARAHTHRTAQDMAHFSGQVHARLRVDAERLAHLQRQEQSRSAEFTHAAGLTRRWAATAARQRHKLAELHFAKAMSDAEEAARDRQAAQDLVRGWVAVGPVERHLNKSAAARDLALLVQQGDLAAEPALQARQRAARALAQGLLALKEHAEKASGALHRDIRARRKAEKDSRLAREEALKSADRAETRARELLEQIRSVRNDAERAVVDGLASSIDGVPRAAREALQALEHAADKISALEREEESLGLQHAEAQKLLSTAIGDEATARGRSEQAQHSLGTAVSRASVLEAEARAVALLGSAVSLDADAQVLLERLGAAITHTEKQRVTLQVERARDELARLALMDGPRLPPPQVVSDACRLLVQSEPRIDAWPGWEYIAEFPADQREEMLVRAPHLISGVLLNSADDQDRAREILDRAAPTGYYVAVSAVAALWKPEGPAAPGVLFTLPFNAALYDDEAAEAERKTVEERWVRSEGQLQQLHAAQQHDEKLRQRIAQWREDYPVGALADLHEACVIAGKALSAAEDVTAGHRLVVEGFTERREEIRGELRDTRKAHERGQETSRRLTGLSKRLAHMPTWREQITAAHDEQQEHQQQAKDADDNAEEHRRATETLDAALQEQRRAADEAARQWAELPGAHEMRFEGEAPSDPVPVLREAYERAQVNFNHANVPEELRNRLDRAEEEARDAAAGYSATPQADRATAHKLLRTPEALDERSRSEALELARQTLSAAEKKDTRAAVEQGKCDNALSGRLTELRGLTADGTVPMPAGDTADTIDRCSQSVMEAEKQDATAQEAEAAALGLKTTAAEETSRARDAAKAFEQLTQTLADTVGDVDADPYPGDGDAAWTNYLRLSNDAKRAKEELNRSEKDLRGAAELIRRHAATDRYARLTIPVRQQIIELSVEQTAEHAAGWLAALQTRQRSLHDDISKVNQHRQTIVEHLKGESDKALSLLRSAQKLSQLPQSLKDWAGQEFIHFAFQPQPDELLLPRLGDLAEEASAGQTSDGRKVARDGMSLLLRAVHTAVPTGFKVHVLKPDRVVRTERVRVSKVKNVFSGGQQLTAAILLYCTMAALRANQRGRQKSPHSGVLFLDNPIGRANADYLLDLQRQVAQAHGVQLVYTTGLYDEKALGQFPLLVRLRNDADLRAARKYLVVDEVFRPYLDDLPPEDGTGRIDSARIFRRETSGAAFRGDDGTAASGE

SEQ ID NO: 40788 - protein, 374 aa, Streptomyces fulvissimus DSM 40593
MALQRRENDLVVGLRVWAAAHGRSRYKAALIPLEDVWEVFRRVPNRNVDDAFEPAVLAALLNTLEAAGLIEQVQRRTPERVSLPVKVRLLAQAEPPVVPPMPMWHPDLSWLAAYWTSATAKQRSAYAAIDRWLKSGPDLFRIPLRERALEIFGTFGNEADFPMPEKTLDTLTSGPLFSDTGRLDELLHTFRPPPPLITETFTLEEDDSHYCRVGTGDVLFVVENSTTWWSLVESLPAGHRLGYVAWGLGGTFRASIRAIKAKHGITQIRYFGDLDTSGLRIPLRASGTALDLGLPPVQPAKRLYQALQSLGRPRPAAAKEASVSTGTAGELAQWLPAGCQAAGRQLLMDGHRLAQEWVSYRYLQRSSDWHDDVR

SEQ ID NO: 40789 - protein, 504 aa, Caldisalinibacter kiritimatiensis
MIIDTKALTENYRERVQRLALFDPLFDLKRKKTRDNSGNIIDYHSLGLLALLFFFENMLMRNKKTGVKELAEFFYEINQGEIDLDLEGFEKAARTIIETFRPPGGKRNFRKFYNWETRKEEIVQYSILKAEKSDIKNNTQYYTLDEQGLELVFATKEYFSEFQLSINQLVLRKQLEKGEFVSALRQIDEMAIDVQNLKDRIIKIKHEIQRNIISDDTYERYKKIIEDVNLRLNRENEEFNELRAFVRDTKERLEYEANEEKDRKAYQLILDIDKELGIVHHQHNKLLQESIILKTSALQAAQESLYYVGIDSFNFDQEITSRLISSPLPVEASRRLIEPFLFMERFETWSPLTVFASQRIESETKEQNSYEFLEVSDESSIDEHWDILKKNFRTVMEMILAILGDRKEITLKEIVEYIKESEEYRPLLNYRFFYDFWIILHQYSPLVIDKTEKEGRDIFVEVKNLLKGKFKIITATEVEGIIEGSHRFSIGNIKLELEEKNNDV

SEQ ID NO: 40790 - protein, 250 aa, Caldisalinibacter kiritimatiensis
MMYNHEEVIKAFNLYTKLSVNGYGEKDELRLYLADDEIRGLVDQFAKEVDCTIITAGDYIYLIPISMDSIFHVSNDTIKRKYLPSKAVNLDIYMMYVAIIVLFGEFYDSYQTIEATRDFISLENWLLSINERVLALKEYDKEELKELEKDYEYNWISIVEKWDAMDDLKENVKTQDARTNSRLSFLNTVKKFLEEQGLINDIGNDEIELTEKAKTIIQRYYMELEYNRGILEFMYQLDKREEEDKDASHI

SEQ ID NO: 40791 - protein, 632 aa, Caldisalinibacter kiritimatiensis
MPAISKIRFTNVIYEGGQKRYNDDIFYFDGHNGAILLENGGGKTVFIQTAIQAILPHSDLAERKIKETLSLEGNAAHIAIEWIINERPRRYLVTAVTLFINKGKLNSYKYLYEYEGNDDHSLENIPFTKRTKDGKARPSSKEEIYEYYQYMKQNHMNAKLFETIKSYHKYLEENYKIISSEWKNIVLINSAEGGVEDFFDGCKTTGQLVDNLLIPTVEEALAGKGTKDFVETFEKQRERFKKHKQLRERIEQSRIIEKEIDDYVLTYSNLHEAEEDFSKKKEEAKALFNYAIAEKNKIEHKIKENELAKNETEEKIEELNRKKASYALALLKEELIDFETRYKKVKESYNHIKGIYEEKQKRKLNLEVARLKKKIKESQDKIEFYQKQLEELDKDNDILDIQQRLETNSSELKGIFEEQEDELQKQNRYIKGQIDRLKEELKYSEKELKKYQDLREKLNNEKITFDAIITETKERMDNICRRVLDNYKYEDIEEEYMKWKKRIEELSKNLNNITMAVNVLQEEKNLKTRELPVLRNELKSLLRKESKTSSILDRISENQEELLLELREFTLDWERYDSLYLKQNSITNFFEGRIEKLRFEKEKLLNEERYPIGFIQNIKIMNILQPTHNCRI

SEQ ID NO: 40792 - protein, 337 aa, Caldisalinibacter kiritimatiensis
MDEKILSYLKTLKRRKTVTLGELEKLFSGDKEYEDFAKEINKLVQMDILKEVKKHGTNHKIIPLANTYRLNKYALKKVFIDEIQNMQLKISPHINLTVYLSLTEKQWEKDLPYIEKIDAYLKEKGLPKSTATSQERSYYLVGDEKWIDEGGGKKLLERLELWDKLKINNVPDPLMLAVNPQNFSYSVHRHLIVENKATYYGLLEELKNTQFTSLIYGAGWKIVSGIEALEKQLGLEDSEHILYYFGDLDFEGISIWYALSNKKLVKLAIEFYTSLLQKDYSKGKENQAKNKEALNDFLAFFDKEDQEKIKDVLQNGGYYPQEGLNKEELREIWRKIL

SEQ ID NO: 40793 - protein, 541 aa, Clostridium pasteurianum BC1
MDLSFLDVQHIRMKKIGAYALLFRNSIAKGTWKKYGFEEGYEQDNLIFSVLLYIMEQSLKEEICTIDHIAAFIDEVNNLHFKKGIIYEECRDLGEFIVNTILCDEGNAMYFKAYNFKEGQYKDINISFIKNKMEYIEGVRRVSYSLTEDGYSLLLSTLEIEENLKITIHEIVFKMHLEKASYDKAVDDIKNIFNMLRIRVQSMEDAIRKIKENPLAYSTEDYKSMMEGNIDILNNTKKQFIIHREMVNEKINEFIEHDIHIKELNKEEEENLNNLRIIEKYLSRTIDEDQRVLKKHFNLKDVYGKELENISKMSLIERFNFRKEVYDRILDDPNKLEDIDIFLRPLFKMQPGKFYNINKALEYQKAIRKAEIEDDEEISFDEKEFIEAETKKKLEKLEKYKGVIEILIELAIGRNKISLGEINSLIKESETLRITLIPTVEIFREVIIEMLKNRTIDIAEIREERKNSVESGEIEFQLNKSILEIIDSNNSFKKIAKIKVEKILDHEDVKLEGLKNENGDIKNFICSDISIEIIKSGGLRL

SEQ ID NO: 40794 - protein, 235 aa, Clostridium pasteurianum BC1
MAYTTEEIKISNKIFYHLLKHGELKEGSEELYKSYSENENVTELVKELGEASECYVKKYGGVVYLIPKEDNDFIGYSKGELKKILCKSGANDKDYYLSQFVILTLLVEFYNSQSVTSKSREYIKVGEFLNIITDRLKDGIERSHNNEESGIAYENILERFEALKSSEKKSMSKTTKEGFINTILDFLDSQGLIYYIKGDDMIKTTKKLDSFMDWNLLNKNNYNRVLKALGEEINE

SEQ ID NO: 40795 - protein, 1461 aa, Clostridium pasteurianum BC1
MSKINKIRFVNLNYNYNTMKIDDEKFYLDGENTMLNLRNGGGKSVLVQMIMAPFVNRRYRNTKDRAFESYFTSGVPTYILIEWKLDDGAGYLLTGMMVRKKEAASDENSKERLDIINFVHEYREKNEYDINSIPIIEEKNDRKMIKSFANCKSLFEALKKDRELKFNYYDMNNPVTTKNYFNKLEEYKINYREWETIIKQINIKESGLSELFTKAKDSNGLVKEWFLPAVENKLKVDDDRIDNYRQLLDSYIKQYRQNKANIDKKAKLELFNELSKDILICCEEFILTAEKREEIKNYIANVIVYLREKLEDKEKEEAALEQLIESLNDKIIELQYEEESIKVYKKQEEIDSLEADIKKHQELVNESEFRKNSLIREGNILECAKIHRQYQDTSKELLEQETKLANLHKKNEDNAPHIINLGFTIRGILQKELDTVKKQKSDKLQLNKNLEEEKETINNSLKINRNEINNLNERKGSLSAEISSFDKLEEGFNRSSGFNLFRNIEAYFDEERLLSIDKEINDEGNTLDKERKNVSEKILQDEEKLKSKESEKIRNLEKNSDVKNKLNNKNSELEKAEEEIERRKEIIKFIDFEEDKVFDNESIINAFDRKIDLLKEDEVKLKKLFDNLNSELIKLKTGKVLELSKDIEEKLREKDISITYGMEWLKKNGYQLEKNEKLVKDNPFIPYSLIMDSKEIELLEKELLDIFTSSPISIINRKDLEKSFANINAGVAHLNGVSFFISFNNKLLNERELLKLIDDKAKEAQAVQAKINEKSENIAFYEEKRNIIKYSALTLEVYEGLKKEISNLKVEASELREIEIALEKSILSIKDELKNCKERVQLLEKDIQKSIDKAKAFKELLEAYEKYKKNKISLERVLESLSVINNHIDKAESRISDIEKEIKECNSAINFYNNEEEKASKELAEFNIYKSGTLIEKDKEDLISEYNALTKDITSSEKELRDSIKKLNEKFDEIHSELTLKADKYEVKEAEYINETFDTQKEFELKDELQKENKKYNNLKDEYNKFDKAQGIAVSKLEDLKAKLKAKFNKDEPKAKNLLIDKDFKLEIEKLKLEIVETNSKKAEVNKVIAKIENNLTSLNEFNDLNITDKVDVNIDLNELDSFVGKLKRDLNNVIAQEIEREKNLTNLVVDVEIKDEFKQESLFKEPIQTLKSLIGKPREFKEQLNLVINSYGMIMEKLMADIELIEKEEGKILESILEYIKDVHENIEKIDDNSSITIGAKRLKMLNISVSAWEENKELYKVRLKEYIERIREQSIKALEQNEDIEDIISNNININKLYDEVVGIGTVNIKLYKIEEDKQRQISWDEVSKNSGGEGFLSAFVILSSLLSYMRKDDSDIFSRKESGKVLIMDNPFAQTSSAHLLKPLVDIAKKSNTQLICLTGLGGDSIYNRFDNIYVLNLISSKLKSGVKYLKSEHTKGEEEKEEIVASRFKIEEQIKLF

SEQ ID NO: 40796 - protein, 531 aa, Bacillus cereus VD140
MSTNIEAMLEGFNERMKHIAMFSPILRLEQPVKFKELPIPTVALYILLYMLENKLAFNKNTTKEELQYVILEVVRQYWNKDFTKAEADELEDWLVSKNLRNRGKAHTFTYYDFDKREEKTYYFHLIEYGEGTNVFSDAEDSLDDFTLTSMGLELLFKTKEVFGELRITISQLFFKRQFEKGLFTDALRRVHEMHTLIEDEKKKIKKLQNTITKDALGVSQRSELEAMIKRIDETLKAEREQFDDLKKLVEEKIDEFYEGSLTEKEQEGIHIIQEIEGKLLQAISVHESLFTEKQKTQNIMSESLESSIIHAFSVHLDFEQEILRELVETPATEEVLNAISKPFLPLRHHKSFNPLLALAPQKRYKKKQLKEEEIVEVDEEKMRLQEEEEARKKEEIENKEYRYITALLKHLIEKDEYLLSDIFQMIETQDERIYEDILYNPDPLLGLIAELHQSEYNRFEKVTSDVWKNLPDDKKINRMLIRLSSEFSTLQEIESFSLLETDRSHYIGTMKYKDMLITRGDFYGVDRRNRK

SEQ ID NO: 40797 - protein, 250 aa, Bacillus cereus VD140
MEWTEEIVSKGFALYVALSKKGFITSKEDEYFQWYEERAVQDFIRKIIEPRGKVIIFLDEQDGVIQMVPEVENETMSYTNDDLKKELGFKDNKEIHLFYFILFILIVELEQPYDTESADRMYLPMEELLDNMNGYIGQYERLGEEKLEELSDEYDVDVAGIVEAWGRMADFKEGATSHIRTKDNRRMYIEKTLKFLEKEKLIRIREHTNVSVTNKMKNIISHYYHNVENKSKIHDLLLVTKEGTVGEEEE

SEQ ID NO: 40798 - protein, 1457 aa, Bacillus cereus VD140
MPRLMKVRMTNIQLDEGKKIISNSLWEPNAKDALFILENGGGKTSFIQLVTQTVRPNSNLSKRLLKEVVYKGTTGHIMTEWKLDGENLPYEYLCLGFTYMNGETKTEELNYFTYLFTYNRGDTLNINTLPTTVDGKVTRLNEYRKFLRQNDIRIFDVNRDYKKELKRFHLIEDEWKMIQKINGDEGGVDNYFKTASSTYDLLVKLLIPEVENTIFDSEEKKKEIQTYFKEYSKNLLSIPDMKRDLDDFQRIKNCAEDMVKAVEDFQVKKKSFAEAQKHVVTLKKSIELQIADKEEKIDILMGDIKKNQSLMHEAGWKIDSYKAHILKGQIEAKEIELAAVENELKMKTEQLKQAKALLQQLEAKKEYGDYLDIHKKVLQLNEDISALTASEPELEKRRNESKTLLTEALNFLIEEQQFALEDINTDIKFTVEEINLKDAERKRLEKEKLDLYGEYKDAENHLNNYQEGKQKLIDELGEEAGYHPSVTFKSLNEQQQQSSVTIIQKEEKSQLNEQEMDEKREFVTSQRIVMQNKNNEITSLKAEHTTFEKEKHNLLSLLLDDGKNTINIFEDMQEFLRYYQYSKVEAEQKTDELKQYIHNLTKKINLWESYDFFVPDETLLKVQQHLEQKGVITMLGSEWLSELSSEEMKNQYLNSYPLLPYTLLVEEANLTEVKKSLNSLNKELLNVPLLFYVKSKLQIQTKSVDAKIDELFPLYDELYLYHQLDVQWFASRAKIQEIIDGLKMELAQYKEQLTFAQTTSNNYNEILTALETFHTRYSSTFPDSNMQAVQKLSEDIKEVHQQINNANEHIKMLENDNKLISEFISDEKVKIAKRDSHIKRLQSFMDLYPNPEELVEKVKNLKEKYDQYGTKVNLCEEEVIEQREALDRQKDKKRNIQSVMDGLDKERKHHRLDEKLEPSDSYTSEEKNVYVARFTAVQKEYADKDQTKNFLEESLSDKKNELLKSEKRINNIGFALEEVKMFYSEEINLEELITKQKETVKTLSISAKDIEVEKGKVEENLKGKTEQLVLVKKEIDDEYGKEVFLYKWQHEEELNRFKQLKEQLGEANNELVTKKESLGNSITDAEKAMVHLQIKNLPLYNERFGLILEEEIISKSKTYQKYAQTHANEHLTKLQKLEESKKGVYLSFETYLKKIQESNNPKTEQFANGLSKLKTSDQIFELEFILESFNRVFDTINAFEEDLKRKIIECEKDKVKLVDLCFQRVEAIYKNVTEIPKFSKVKVFDYELQLIKMRWDRFNDETTYGNLHYHVQTILETLQRMKRENKLENELNEYLVQKLDTVVLLDKIAPIKKCLVSIYKPRKKSLMTTHPENWKSWDEVSKWSGGEEFSSYMSMFMILVTYLRKKVNARDDSWKVIIADNPFGKASSEHVVKPIMELARNSKIQLFCLTAHNNEDIRSHFECVMSNRYYNTVGIELLQVEHREKGVSLGMFAYEHD

SEQ ID NO: 40799 - protein, 358 aa, Bacillus cereus VD140
MRKWETFIIDYMNKSRKTLVKTIDIELHLKTLLKQEYDDDGGYFRFSTTLKKMVEEERIRPVKARGHNHQIPPVFNVYRLVKQERITNPTHIKKLMTDYPLFNMTAFYDEAEFEKWKFYIDRVHAFLTHNSDTKKDMLKANERSFELFRNEKFLLDKEGIKFLANLGLTLSDLNCRRTYEPFVEYQLDPSRKPKTILIIENRDTFDSVKELMMDGINTWSGITFDMVIYGEGDKIQRSFYFLEEYKLEDYEVYYFGDLDARGIHICSELIKIDNRVKPFTPFYIELLNRYGYEPSARTIERKLKQTIIDDSLKLFSAFFEDDYIDELKKYTKIIQNVQIYIPQEGLNLAILRKLGERR

SEQ ID NO: 40800 - protein, 469 aa, Bacillus nealsonii AAU1
MEKMDQSLISIFNMDMEKPELLQTMRDMAALAGVLNELSDKESFQAPKNVLRFIRILNLINQEALGITDRIENEDTLFYRYRHIYGYDEEMTIEYVKHLIYILGKFNWITKTAKRIKMRDLGKRMMDVLIRLANDSLAYYMNDEVARSLFQAKRDAEISEAYDDKGISGGNKLASMIKNVEEAILLLIERELEYLADRNALSQVEVIHQLMTELEMKMVERLAKFETLDQELVFASIKQRGMTAISEGTKISLGTINKILKFAHIQETNFIETIQPDLLRNFIVQSFDPPIGSDIPNAHQILSFMEQGQYEDENMEGLWVPIKFASPLSSTAIFEGIDYIENYEPITDEIEEKMDADFQEIEEIMEEKLEEVMGDSKWQMTKQMIHTEHIEKYLDGVEEAGLDELVIHAGSEKWSDVLNGLIGVSALVANKKADIDEKANRKLLGNMEKRDWRWTDDEQGSYGIRKRGK

SEQ ID NO: 40801 - protein, 235 aa, Bacillus nealsonii AAU1
MNKEAMELENEANESINNNPLYALQSLQGFLTKEEELTFMQILFSSSATIRQGNFGLSRKEVEKLLGANDEEAFFSFLKRVNQAVSRYFKIVYDERRNQVVVLMRVPAKQARNVLNKESLAILMFIFYHQEVLQNEYTLFSQLINSFGHESLQVTRKIQANLDPLKKIGAIEIYNTNSDEEAYQLTTIGAHLFSDSFLRRYAEFSQSNQLHMEDVLRFFKRYNMNGGLLNDTLED

SEQ ID NO: 40802 - protein, 425 aa, Bacillus nealsonii AAU1
MINNVWKDYLYKYILLKNEELNLLDIRENNGILDIPVIKKTTRTRRTVAILTVGINNQIIPPEHLVNVFASPKVKKQFVLTDEIYEFIRNAWIIREYRLAKDERTVKSEQFRMGLSLFQYKKQMEDEQETMRTESIVEWENQWIKIKNSSSAPNLERIEKLNRLKDILDEIVVANKINSINSNWRFQKKLLFLHFLVAFYQISMVEHHFDWKQIGARYYRKIGGSKEFDSYKKEFIEVAEELLEYPLHLLGLSSLGTITPIYFTGPMQGDSASYNYGAIHATTDLAVFTEEFKTEAEVLWLVENRAIVTRMGYERDFLIDSNSFILGIDGQLRSAHRRLIEQLASTVKQVIIWTDVDEAGLFIAKDVGETVRKYQVITKWIVPPLEVVLNIEEFQSRYERAIEVKKEEQEQEIGGVILWKKWINP

SEQ ID NO: 40803 - protein, 544 aa, Lachnospiraceae bacterium A4
MQYEFLKQFSKRMKHVGMYALLLQNSMAKQTWKQYGFMKADEQINVIFAVMLYIMEQSLREVHCTMDDIGAYIDTLNASYFQKSMSYDDCKKLGDFVVNVILSNEGRAMYFEGYDFDSRIYKSMNISYIANRVVYVEEGVRRTTYHLTEDGYNLMLSTLEIENNMKLTIHEMIFKMHLEKQSYDKAVDEVKNIFNYMRIQLQKIEEAMLRVRRNALSYSVADYEALMLENMETIGDTKEKFTGYREMVRLRASELEQQNINVRKLDAKEEEKLENLRSIERYLNRSLDEHQKILNLHFDLKLLYDRELQSLAQMSLIQRFSIRTELYDKLLEQPQYLENIDLFFRPLFHQQLPKIYNLNKCMELQRPVRKKAEEDTAELLDFDERQWQEELERKKKKRLQQYENSLAFIIDAALDKGSLSMSELKGLLEQNRAAQEICIPSIDVFKEIMVELMKNREICIETLRKEKSEFITEQANDFQLNDMLLSLTEKHAGNGKDRSVIQKICTERMHDGTVVAFERVPDASGNERTIRCTNVVIRIEQKKL

SEQ ID NO: 40804 - protein, 242 aa, Lachnospiraceae bacterium A4
MAYEIEEIRLSQQIFYYLLEHFELREEASTGLYRAYVENEQVQLLVKSQGEEARSSIERYGDVIYLIPKEENVFLGFSKAKLKEILCKSGGTDKDFYLSQFVILTLLSEFYDGQGASAKSRDYIRVGELQNCVTDRLKNGVENTSDEEEEKKGLAFRNMQEAYESLKSDERGSRARTTKEGFLHHIFVFLENQGLIEYVQEDEMLKTTKKLDNLMDWKLLNQNNYQRLCKILSGDSQGGGDE

SEQ ID NO: 40805 - protein, 1477 aa, Lachnospiraceae bacterium A4
MSKINAVRLINLNYNNNTMRVSDDIFQMQGRSTLMSLQNGGGKSVLVQMMTAPFVHRRFWDAKDRPFESYFTTSKPTFIMVEWQLDRGAGYCLAGMMVRRSQLSEEDEDNRLEMVNFICEYSGRCAQDLYHMPVVEKKNKELVLKSYRECRQLFETYKKDHALKFFCYDMNNSAQYRQYFEKLAEYQIYYREWENIIRKINLEESGLSKLFSDCRDEKGLIEKWFLDVVESKLNKEKDRMKEFQSIIEKYIISYKANQSKIERRNTIRQFKEDAVEIAACAEEYKLATDAAGEQENNIAGFRTELARMETAQNDVKNALLDDKNSCSDELARIEYEKYSYEIQCLTDTLLFHVGNRDMIGMERDALEEETQQIETLLHKIELSKQNAQVQELLQDERLLKERLKVLHEGEGQLEPERRALGNTLCMYYEQLAAGLAIQIQQNESAYQQEAQKQQEFLDRQQWLDNTIIGLITQISTCKERMNGFGRIEDSFQEEFQETFVRNIVGEYEPGFLEIKGRQYQKELEEHTRSCTAHKKQLDEANERQKSLLRDIEDRQQERIRQEFMLAELEQEHTELEQEFAERLVMMRYFDLSESEPWNMDKLLAAADRKLAVCEQAKRMLEKEEDTLQKEYVRITQGKVLELPKELLSLFGRLDINIVYGMDWLRKNGYSAQKNEEIVRRQPFLPYALVLSKQDLNTLAAHDREVYTSFPVPIILREQLEACMASQVGGLLALQDVHFLMWFNEKLLDEDALRRLAAEKEQQLQDKRKQTATRKKEYEEYFEKRERLKNQRLTREIYDKNMTQMSEMKDLLEALTKTLHTLRADAQKNEELVGSLTATIAAEQRLIEKLQKREKAFALFCKEYESYVECMALMNRSQKEKERHEQNRKLVKDAAEAGRERMKSIERALAELDRRNLDYKKKCSVYEPYRTAASPAVESESKSEEIPLPASIHEKEARFEAITSKMSMQVQDLEKQLQKTAVTLNRQQSELERLSKKYRLAEQDWAGLIYDEKEETHQEILLEDRRSKWKLKDRQWNEEDKETAVCQSRISAKKKDMLEKCGTEEPLAKDQIKTTEFASAVNQLHFRLQNIEEDIKKVDQRLKALGENLSTLAAYEDFVCRHEPQWETDISLLGTKELRDFQGRLLRDYRNLKEACAHKKSRLTACLYKLMQKDIYQEDYYRKPLDSMLSLTDNAVLTLAQLDTTLQSYDSQMEKLAVDISLVEKERSRITELLGEYCQDVHRNLGQIDSNSTITIREKPVKMLRLQLPDWSEQEGMYRLKLGDFLDELTAKGIEILEKNENPQEYFGTRITTRNLYDSIVGIGNVQIKLYKIEAQREYPITWAQAAKNSGGEGFLTAFVLLSSLLYYMRRDETDIFADRNEGKVLVMDNPFAQTNAAHLLKPLMDMADKMNTQLICFSGLGGSSIYERFDNIYVLNLVASKLRGGMQYLRGEHLRGTEEELLVSAQFEVIGQEKLVF

SEQ ID NO: 40806 - protein, 350 aa, Lachnospiraceae bacterium A4
MKKIHLDALSAKYNISEYKALYAKIIALLQDNKIKPVKASGTNGKSPALYKEYWIIEEKQDMSSYLNELNYALVPSISTDYYRAHISQYLEDRPWVLLLNDYLKQGNFMTQMSENERSFDIWHREKFLKQEQGKKILKRCGLETGVLNYYRTTEPVAYYCATRQTPQKLLVIENKDTFYSMRRCLMGSQPLRSASGKNRTDSALRTICGEPVGTLIYGAGKGIIAAFSDLELSGEPYMTAPENTVLYFGDLDYEGIGIYEHFAAEYGEQYDIAVFKNAYVQMLAKAKCIGIDCLPRTKEGQNRKLDHVFFSQFSQAQQDNIKEILECGRYIPQEILNIEDMQSTDVQYKE

SEQ ID NO: 40807 - protein, 537 aa, Lachnospiraceae bacterium 3-1
MQYEFLKHFPKRMKNVGLYAVLVQNSLQKATWKKYEFQKMDEQFNMIFAVLLYIMEQSLKEERCTMDDIGAYIDTINMQYFRKNMNYEECRTLGDFIVNVILSNEGKVMYFEGFNFEQKAYQEINISYVANRVVYSQQDVKRTSYYLTDDGYNLLLSTLEIENNMKLTIHEMIFQMHLEKQNYDKAVDEIKNVFNLLRIQLQKIQEAMEKIRRNALNYSVKDYQKILNENLETISETKQKFQDYRELVKNRTRELEESNINVRRLTKKEEEKLNHLREIEQYLNRTIDEHQKILNSHFDLKSLYTKELEALSQMSLIQRFPLRTELYDKILTQPKALEYLEYFLRPLFCQDIEKGYNLNRAFQLQKPIRGKVEEDTEETMDFDVGEWEREQEFARREKLKRYEQSIAYLLRKVVSQGEISLEEIAGQVQGQELETLIPNVEIFKEIMVELIRNKEIDIPTLQKEQREYIQEQSGEFQLNLVLLHLIQNCREFLGILRIETYRLEDGKVVVFSDVLDEKGDKKTIRCSNVLIRVTKEE

SEQ ID NO: 40808 - protein, 237 aa, Lachnospiraceae bacterium 3-1
MAYETEEIRQSQEIFYYLLEHHELQEEEEQALYRAYAEQETVQNLVKSQGEIAMCNIERYGNVIYLIPKEENHFLGFSKPQLKAILCKSTSTDKDYYLSQFVILTLLVEFFDGQGSSSKSREYMRVGELQNCISQRLKEGTQNVPEEEEEQVGIAFSNMMEAYEALRSDEKSTRARTTKEGFLYHILMFLQKQGLIEYVEQDEMIKTTRKLDSFMDWNLLNQNNYQRILKVLGENHE

SEQ ID NO: 40809 - protein, 1468 aa, Lachnospiraceae bacterium 3-1
MSKINAVRLININYNNNAIRVSDETFHLNGESTLLSLRNGGGKSVLVQMMTAPFVHKRYRDAKDRPFESYFTTSKPSFILVEWALDQGAGSVLVGMMVRKNQDGEEANGEGLEMINFISEYQGPCLQDIHQLPVVEKGKREMILKNFAACRQIFENYKKDHGIKFFSFDMNNSAQSRQYFDKLAEYQINYKEWETIIKKVNLKESGLSDLFADCKDEKGLVEKWFLDAVEHKLNKERNRMKEFQSILEKYVGQYKDNQSKIKRRDIIRLFQEEAKRIEEKNGRYQESEINVRSQENRIAGFRQELEKLQEQTALEEQENREQGEKLQLEIERLNYEKLSEEYYHLEEEKKFHVSNREMIGIEKEGLEREIERIQKRLNLLLCARQQEAANEEKSEWDLSYQQLAVARERDKDLEPERNCIGYLLRSHYQKALEKTKNSLSQNQKDREEATEQIKETQEILIELEDFLRKNALWAGELKSRIGSYDRQEEQFNTRYQEQLARNILGEYEPGSLEIFGDLCQKLREEEARKKAAKSRELEQAKDQRTSLEHSLLRRNEEKTFAIAGRKQQEELQESFEKELAKRRDILKYLELEESVLFEEEKILKTADRKLLEIEGLRRNLEKEENELQKEYQRLTEGKILELPPELEMEFEKAGIHMVYGMEWLKKNGYSQKKNRELVQNHPFLPYALILSEGEAEKLSRFRGSIPTGFPIPIVLRKSLEQKGKEKDGNLLAFPGIRFYVLFNENLLNEEKLQQLVIEKQREIDKKQELIDIRRKEYESYFQWKEQVRNQQVSQEKYQENQQKLQELVESIQELEKGIHETSQELLHLQEQSLQLEREIRQGEKQVEYLERKERDFAQLYEAYKEYQESRRQQEKCKKEENKLTESRKLSRLKEEKLQEKLQSFRNQQADLERELEKHQEQLGRYQSYEEINQQEIEKLPKEVSELEARYQAVTAGVSQEIQVLEERERRSSKRYQRACEELEHLSSKFGVSKEQWEAVLYSRKEETHQEIQLEDRKKKLKIKEGLWNEADKQVALLIHQVEQRVQRMLEECGQKQPLPREEIPSEDFKARKNQLDYQYKELERIGKALQIRFNNYNENLTALAEYSELLVEEPVIWEQDFSGMDTRRLRDFKGILIRDYKKYCEDRHGAREQLVYLLNQIVRMEAFQEDFYRKPLEAMLELAGDSSQVQRQLDTTVLSYQSLMEKLEVDISLVEKEKNKIVELLEDYLQEVHQNLGKIDHNSTITIRERPVKMLKIQLPSWEENENLYRLRLVDFIDELTKKGINIFEQNENAQEYFGIQMTTRNLYDTVVGIGNVQIRLYKVEEQREYPITWAEVAKNSGGEGFLSAFVILSSLLYFMRKDDSDIFADRNEGKVLLMDNPFAQTNASHLLKPLMDMAKKTNTQLICLTGLGGESIYNRFDNIYVLNLVAASLKQGMQYLKGEHMRGNEPEEMSVSQIEVVQQELVF

SEQ ID NO: 40810 - protein, 329 aa, Lachnospiraceae bacterium 3-1
MKRITLEELLGNCPNASYQQQYAYIMELLEKGKLKPVKNAGTNGKTPRLCLSYWMVEEQEESQDALAEELNYCMEPLISIEYYLSHLDQYQEDRSWVQRLNDYLKENRSLLKEPISVNERSFEIWGREKFLTKEQGRKILKRCKIEMGFLNMYETAEPFAYYTHTRKIPQNMLILENKDTFFSMRKFLLEGNHQIFGMEIGTLIYGGGKRIVKSFRDFDLSAEPYMKEKENQIYYFGDLDYEGIGIYESLARQWKGNGRPIPFVTAYEAMIEKGKKIDSLPKTKEFQNQNLKGEFFSYFSNETVEKMQEILKKGEYIPQEILSILDYLV

SEQ ID NO: 40811 - protein, 542 aa, Lachnospiraceae bacterium M18-1
MQYEFLKHFPRRMKNVGLYTVLIQNSLQKTTWKQHGFQKTDEQFNLIFAVMLYIMEQSLKEENCTMDDIGAYIDTVNVQYFRKDMSYEDCRSLGDFIVNVILSNEGRVMHFDGYDFEENAYQSIHISYVANRIVYLDQDFKRTSYYLTDDGYNLLLSTLEIENNMKLTIHEMIFQMHLEKQSYDKAVDEIKNVFNLLRIQLQKIQEAMGKIRRNALNYSVRDYEQILHENLETIDDTKKKFQNYREMVKSRVQELEETNINVRRLSPKEEEKLRHLREIEWYLNRTIDEHQKILGSHLDLKALYTRELEDLTRMSLIRRFSLRTELYDRLLEKPAALEELEYFLRPLFNQDAEKVYNLNKAFQLQRPVRRQAEEDIQEQIDFDEEAWEQEQERLRMEKLKRYKQSLTGLLEQAVRTEKGEITLEQVEEQIREDMEVCDRLIPNVEIFKEIMVELIKNREVELDVLRKERSQFIQDRQGEFQLNEMLLQLTEENPEFADIRQIRVERLEKGGTVTFAGIRNENGERKDIRCSNVRICVSQKEG

SEQ ID NO: 40812 - protein, 238 aa, Lachnospiraceae bacterium M18-1
MAYEFGDIRISQEIFYYLLEHHELREDEEVLLFKAYAEQEEIQNLVKSQGEAAYSTIERYGNVIYLIPKEENHFLGFSKAQLKNVLCRSNSTDKDYYLSQFVILTLLVEFFDGQGSSSKAREYMRVGELQNCISRRLKEGAEHVPEDQEEQAGIAFSNMLEAYEALRSDEKGSRARTTKEGFLHHILTFLQKQGLVEYVEQDEMIKTTKKLDNFMDWNLLNQNNYKRVLRVLGVGKEV

SEQ ID NO: 40813 - protein, 1536 aa, Lachnospiraceae bacterium M18-1
MSKINAARLININYNNNAIRVSDETFRFNGESTLISLRNGGGKTVLVQMLTAPFVHKRYRDAKDRPFESYFTTGKPSFILVEWALDQNAGFVLTGMMVRRSQDSDSGEDLEMVNFICEYRSSCLQDIHHLPVVEKGKKEMTLKNFSACRQLFEGYKRDRSLQFFYYDMNNGAQSRQYFDKLQEYQIHYKEWESIIKKVNLKESGLSELFSDCRDEKGLVEKWFLDAVESKLNKERNRMKEFQSILEKYVGQYKDNRSKIQRRDTIRLYKQEAQKIREKLSVYREGEQKEEEQENLVAHFIAELERLQAVTKEGHEEVLSQMEEVLAEIAHIEYEKLSGEIYQLEEQMRFHLSSRDMLSMEKEALERETEEIIRRLHVLACAKQQRLADEEKAEWDEALQRLRVAQEKNVNLEPERNRLGYVLRRHYEKELEENGKRQQENSLAIAETEENISREKQIQSNLEEQIRERVSAEGALKSQVQAYDRQEEQFNNRHQEQFVRNILGEYEPGTMEIFQEAQENRMEELVRERLKTKKAQEASKETQRSQERKLADMREEQIRRRAEQGQQEGIRSSYEEELEERKVILKYLDLDEKELFDREKILQASGRKLLETANLRRNLEKEEDGLQKEYQRLTKGQVLELPQELEAELTGLGIHVVYGMEWLKKNGYPEKANQELVRSHPFLPYGLILSKQEVEKLSRHTGNICTSFPIPIILREHLEKRDREEPGNIRRFEDVSFYVLFNENLLNEEKLRELVAEKERQIARKREAIRIRQEEYQQYFERQEQVKNQSVSRESYEENEKRLKELADQIQGTDEDIRTASQKLAELKEQIELREQDIRRADQELERQRRKAEDFQELRAVYEEYVRFRQELELCRKDMGRLADKQKLSREKLEKLQERQKSLETERDALLREEEEQQEAVRKYRRYEEYTEFKEKEAGEDWRGLWAAAKSGGAAAAGGRQEQKSRSGAADGAAGGQQEQKSRSGAADGAAVKPRAEKSAVQIRLDLRKIVSDMEARYVAVTATVSLEIQELERQEQLSGRRCKEADQELKHLQKKYGLTDDAWQDTYYNRKEESRQEVLLEDRRLKIRTKQSLWNEEDKRIAVLTQQKEDILKRMRTECGQEEPLPKSEIQNQDFESRKNQLKYQEKELKNTADKLQKRLHSLDENLTALAEYSEFEKKEPVAWEQDFIEMNAKELRNFKGILIRDYNQCLKSRQDAKEQLVRVLNQIVRDAHFQEDYYKKPLEAMLELAGDAGQVQRQLETTIQSYDSLMEKLEVDISVVEKEKQKIAELLEDYLKEVHRNLGRIDQNSTITVRERAIKMLKIQLPAWEENENLYHIRLQDLIDELTEKGIGIFERNENAQEYFGTRMTTRNLYDTVVGIGNVQIRLYKIEAQREYPITWAEVAKNSGGEGFLSAFVILSSLLYYMRKDETDIFADRNEGKVLLMDNPFAQTNASHLLKPLMDVAKKTNTQLICLTGLGGDSIYNRFDNIYVLNLITASLRSGMQYLRANHLRGNEPETMVVSQIEVMEQQELVF

SEQ ID NO: 40814 - protein, 326 aa, Lachnospiraceae bacterium M18-1
MKRIALEQLIKPYADKSYAEQCRYVREMLDSGRVRPLKASGTNGKTPALYLEYWLTEEQKNYEELREELTYQLVPLLSVDYYMNHPAAYEQDRKWVLLLNKYLKERRELLESRESVNERSFEIWNREKFLTREQGKRILKRCGQEMDFLKVYETTEPLSYYSHTRDVPQKLLILENKDPFYSMRQHLIAGNHKILGESIGTLIYGAGKRILKSFQDFDLCVEPYMKAEGNRIFYFGDLDYEGIGIYESLAGLSRDSWKIVPFVPAYDAMLKKAGQCGDLPEMKERQNRNIRDEFFSYFTPECAEAMRRILEAGRYIPQEILNISDF

SEQ ID NO: 40815 - protein, 537 aa, Lachnospiraceae bacterium A2
MQFEFLKHFPRRMKNVGLYAVLVQNSIQKATWKKYKFQTMDEQFNMIFTVLLYIMEQSLREERCTMDDIGAYIDTINMQYFQKPMDFEDCRALGDFIVNVILSNEGKVMHFSGFHFEQKAYQEMNISYVANRVVYSEQDVKRTSYYLTDDGYNLLLSTLEIENNMKLTIHEMIFQMHLEKQNYDKAVDEIKNVFNLLRIQLQKIQEAMGKIRRNALNYSVKDYQEILNENLETISDTKQKFQNYRELVKSRAKELEESNINVRRLTEKEEEKLNHLKEIEHYLNRTIDEHQKILSSHFDLKSLYTKELETLSQMSLIQRFPLRTELYDKILEYPDALEHLEYFLRPLFCQEIGKTYNLNRAFQLQRPIRGKKEADTAEPLDFDAGAWEQEQELRRREKLRRYEQSLACLLRHVSAKGEVSLEEISVQAKGQDLETLIPNVEIFKEIMVELIRNKEIDIPALRKEQSEYIQEQSGEFQLNLVLLHLTGNCREFLNIVQIRTYRLQDGKVVIFPDVPDETGTKKSIRCSNIMFQIIKEE

SEQ ID NO: 40816 - protein, 237 aa, Lachnospiraceae bacterium A2
MSYESEEIRQSQEIFYYLLEHHELQEEEEQSLFRAYAEQESVQNLVKSQGEIALCNIERYGSVIYLIPKEENHFLGFSKPQLKSILCKSTGTDKDYYLSQFVVLTLLVEFFDGQGSSSKSREYMRVGELQNCISKRLKEGAQNVPPEDEERAGIAFSNMTEAYEALKSDEKSTRAKTTKEGFLHHILMFLQKQGLIEYVEQDEMIKTTRKLDSFMDWNLLNQNNYQRILKVLGEHHE

SEQ ID NO: 40817 - protein, 1473 aa, Lachnospiraceae bacterium A2
MSKINAVRLINVNYNNNNIRISDETFHFNGESTLLSLRNGGGKSVLVQMMTAPFVHKRYRDAKERPFESYFTTNKPSFILVEWALDQGAGYVLAGMMVRKAQEGEEGSGEGLELVNFISEYQEPCLQDIHHLPVVEKGKRQVVLKNFAACRQMFEGYKKDHSLKFDSFDMNNSAQSRQYFDKLAEYQINYKEWETIIKKVNLKESGLSDLFSDCKDEKGLVEKWFLDAVEQKLNKEKNRMKEFQSILEKYVGQYKDNQSKIKRRDAIRAFQEEAKRIREQNQKYLKSEASVHAQENKIAAFRQELELLYQQVNAKEQENHRLAEELKRELSRLNYEKLSEEYYQLAEQKKFHAGNREMIGLEMEGLQRELENIRRTLHLFFCARQQEAVDEEKSEWDLACQQLAVAKGQDKDLEPERNQIGLLLHSHFQSALAETGKRLTDNQQYREETMGQIQQEQELLAGLEEELRENARQAGELKTRVGGYSRQENQFNVRYQEQLVRNILGEYEPGSLEIFGDACQKAWEEETRKKAAKSRELEQAKSRRTSLEHSLLRKNEEKAFAIAGKKQQEQLQEVYEQELLKRRDILTYLGLDESALLEEEKILQAAGHKLLELENLRRNLEKEENELQKEYQKLTEGKILELPKELETEFEKAGIHIVYGMEWLKKNGYSQKKNRELVQSHPFLPYALILSDGEAEKLKQLSGSIATGFPIPILLRKNLGQKAKGQASPLVDFSDVQFYLLFNENLLDEEKLRQLVAEKQGQIEKKQEQIAIKKQEYGSYFSWQEQVKQQQVRKENYQENQKQILALEEKIKDLEKETRWFSQELSSLQEQISILEKEIRTAEKQIEHFKQKELDFSELCRAYEEYQEHCRQQEKCRKEELRLTEGKKLSRLKEGKLQEKLVTLRNQQAGLERIQERLDGQLSLYRGYGEAVDGEGRAEVLVLPPEKVSELEARYQAITANVSQEIQSLEEREQKSSKRYQKACEELSHLSRKYRLSKEQWLEISYSRREETHQEAQLEDRASKLKGKESRWNEEDKQVALLMQQMEGRIRRMAEECGQEQPLPKEEIRSEDFKARKNQLDYQRKELEQAGKRLQDRRNSYNETLTALAEYSGLPITEPVEWAEDFEDFGTQSLRNFKGILLRDYNQYRDDRQKAQEQLVHVLNQIVRLEQFHEDFYRKPLEAMLELSGDAGQVQRQLDTTVQSYQSLMEKLEVDISLVEKEKSKIVELLEEYVQEVHKNLGKIDHNSTISIRERPVKMLKIQLPPWEENEGLYRLRLEDFIDGLTQKGLAIFSRNENAGEYFGTQMTTRNLYDTVVGIGNVQIRLYKVEEQREYPITWAEVARNSGGEGFLSAFVILSSLLYFMRRDDTDIFADRNEGKVLLMDNPFAQTNASHLLKPLMDMAKKANTQLICLTGLGGESIYNRFDNIYVLNLVAASIRQGTQYLKGEHMRGNEPEELSVAQIEVVQQELLF

SEQ ID NO: 40818 - protein, 331 aa, Lachnospiraceae bacterium A2
MKRISLEELLQKHPNDSYQQQYARIMELLGQGKLKPVKNAGHNGKKPALCLSYWQAGEEGGGSQELEEELKYHLEPVISISYYLSHLEEYQKDRPWVQMLNTYLKESRHLLKQPISVNERSFEIFHREKFFTREQGLKILKRCGLGPEYFNMYETAEPFAYYSNTRKVPQNLLILENKDTFFSMRRFLLAGSAHIFGTEIGTLIYGAGKRIVKSFQDFGLSAEPYMKAEGNRFYYFGDLDYEGIGIYESLAAQSSAHHKLVPFLAAYQAMLAKAAKSGRLPDAKEFQNQNISGAFFSYFSKEAAKQMQRVLEKGQYIPQEILNIKDFMAEG

SEQ ID NO: 40819 - protein, 511 aa, Paenibacillus barengoltzii G22
MESKGMPIELNDILSGFQERMGKLALFDPLFELSRQRKTDRSGKQVAMMELGLLTLLFFFEKKLMRSRKISVKDLVGFLAVVLEDKYDLDQEELEDIGRRIMHVFRPSSGRKREFPFFHLGTGQEGIHYTSILRTDSYDAATNTQYYALDEDGLELVFATKEFYLEFQLSIHQLLLRKQLEKGEFQGALRQIDEMMIDVETLQERIIALGHEIKRSIVSEETFNRYRSLLEDIFLRLKRENEEFNELRDFVKETKDRIYAERELLKNRLPYELIVRIGVELEKVHNEHTRLLQQSMELESSALRAAKESLYYTGMNAFNFEQDIASFIFGTPLPIEAMKGVAAPFLQLEQAELWSPLTVFAKQQLSGHDDGSVIEESLLALSEEEGNSSYMRKRTERFVQVLEALFRCYEKLDRDEVRLSEFIAFLDLDEAVDLKKERDFYDCWMILHQRSPIRPVMDDEEAGGSDQSLYEAFRSQLQGRTLIVQESEGILRVNERYSIQELIIRLGGYGE

SEQ ID NO: 40820 - protein, 245 aa, Paenibacillus barengoltzii G22
MNYTGDEVMKAFRIYAQLSRSGVADKESLLQVESDDRVRGLLDQFASEVDCVVMGAGDRLMLIPLVRLSPFHITNESLKRTYLRGNAVNADLYLMYVAIIVFIGAFYDSYQTTEATRNFLQMEEWMNLVQQRINGLREHSAEELKALSQEYSYHWPDIIEKWDAMDDVKETAKRQSGATISRLSFLDAVRRFMLDQDLAKQVGPDELDLTEKTKMIVQRYFMEREYNRGILEFLYGLEPKRKEES

SEQ ID NO: 40821 - protein, 1480 aa, Paenibacillus barengoltzii G22
MPVISKIRFTNVVYEGGAKRYNDSTFYFDGHNGAIVLENGGGKTVFIQTAIQAILPHSDVAGRKIKDTLSLENGPAHVAIEWILADKPRRRYALTCVSLFMSATGLDSLRYVYEYSEHDDHRIGKLPFTKEMGGGKLRVTEKGEIQEYYQSMQSKNPVSAKTFDTIMGFQKYIEEHFHIIQSEWEAIVKVNSSEGGVEAFFDECKTSSQLVDRLLIPTIEESMEGFKQGTFADLFQLQREGFKQYKELKEKIEENRRILAELHKYVGCYEVLHREMLRYEELRKEAKVFLQTTMNVEQEQQAEQDRLQERLEEWKQEYKNWRKREASLAIADERQIAGSLETELQLVGTEKDELEEQASSAARYYYSLEYAEQREKLREAEERMAYLQRELDRLAQSQDEEELEQAWKLSGRKLKAWFDREETRLSELLQEVQLGLDALAEQRQDCLRERDAAAKEREKQLLRIREFETKVQEKKDQQYGIARRILSQLSSQTVEQQMPLWLNELQQLEQDGLEQSRALQELDRNKVELQQERKAASAEQLRIQQELTELQAWRDRYEQEHQKVKIALANLHPSWERMASVHDKMDSIREKLADGLALRMQQKQQLLHKERLAFRYVDDYGEQEEFFADPQVARLAEQWSNQFSLLEIGIRYASAVPDSSDDKQLWAVTLVTTSQEKPLLIRKLSETADQLQYPIRILSTQEAKVLVNGSPADESVAEEDGAWVEPAHWKTLRQIDRFQEWKREIVRESKAAEENRREKERELEAWRDVQKLAEEFFRDYPLMVVHEQEQANADRLELLKSLEQKLTRIEQELQQLDNKKDKLREAQQLLAQRQRQVEHQLEQGQIYMQLAGELTRIKEKLQFAREALHKADRSLHRWNQRMELLDQRLKVQEEKRADVHGKLLRLREDELYQEVQDCVPLPVDESIVQLREERKTLELQRHRIMKERSALERELRDQRDRRTEASRQMKRLADAHDGLDTELELPLHVESKLEAALAEFRTLEKRVLQVREVWSQMNHELTKQEAKVRFQQEQYAKEFDNEQPMMFLEPLSRVRERQAIERQQQDEVRKELDRLYLVVERRLDETRRVLQLWNSYVRVHKLDDPLLEVPDSDVESIGEIVYRLESGSQDVIRRLEQQREAIEKERGNVARGRQRFREFCQRHVKDVKLREMAERGVEVKDNFAELQEFEAMMGAGILKANQIAELRMQSEDQKLQQFITHIQAHLRQIAQELRELPKRTRVRTDSGNKDIYVFHVPDWDEQEGKERIRNYIEWITEQLEHAKYRDLDGTEQPVVIRKDLEKWLDAKQLLQKVFQQGAAIRISCRKVNNDQQVTGATYSWEESNRWSGGEKWSKNMTLFLGILNYVAEKRQHIHSQMKRHRSVILDNPFGKASSDHVLSPVFYIAEQLGFQLIALTAHVEGKFLQDYFPIVYSCRLRAAAGGGGKQIIDPQQQVQQAYIRDHAPESMDRIGGEKKQLELF

SEQ ID NO: 40822 - protein, 350 aa, Paenibacillus barengoltzii G22
MMRYKQKLIDFLCTFPKVTVGLSDLERAFQGEQIDYETFAGIVLELENEGSLGAVNSHGRNGKPLSLAYHYRIHKRLLQEEYVRELHQWSSRLHPDISLDIYYGLSPDIWRADLPYIEQIDAYLKRGSRPTRQAPAPERSYELVRDEKWITDHGGQALLERLGIWEQLQIVPVSDPLMLAVNPSIRFASKKHLHLIVENKSTFQGLVPELPGMAFSSLILGYGRKIVGNLGMLRLQYPVQSAEHEIYYFGDLDLEGILIWYDLHVKFGVELALPFYQACLKKPPARGKQNHRLNEEALRAFTRRFNKEESNQIIAMLGEGCYIPQETLKSEELIRVGREAVWSQKGCQSN

SEQ ID NO: 40823 - protein, 538 aa, Dorea sp. 5-2
MQYEFLKHFPRRMKNVGLYALLIQNSAQKTTWKQYGFLTLGEQLNLIFAVMLYVMEQSLKEEHCTMDDVGAYIDTVNTGHFQKDLSYGECRQLGDFVVNVVLSNEGRAMYFEGFDFEENKYQDLHISYVANRIIYIDQEIKRTSYYLTDDGYNLLLATLEIENNMKLTIHEMIFRMHLEKQSYDKAVDEIKNVFNLLRIQLQKIQEAMGKIRRNALNYSVKDYEEILLGNLDTISDTKQKFQNYREMVKSRAQALEEENINVKRLGEKDEERLSHLRIIESYLNRTIDEHQKILNSHFDLKALYTKELETLTQMSLIRRFPLRTELYDKVLANPKALADLDLFLRPLFNQEPDKTYNLNKAFQLQRPVRKRMEEDSAEELDFDEEAWMQEQEMRRKEKLKKYEVCLCRLLGYAVKTGEASLQEISVAVEGQVEEREQLIPNVEIFKEIMVELIKNQEIDIAVLLRERSEYIQDMPGEFQLNEMLLHLVEEYPEFRGIRRVETYRIEDGGTVTFEGILDQDKAAKTIRCSNVLIRVGKE

SEQ ID NO: 40824 - protein, 237 aa, Dorea sp. 5-2
MAYELEDVRTSQEIFYYLLEHHELCEDEEMQLYRAYTEQEEIQNLVKSQGEIAESRIERYGNVIYLIPKEENHFLGFSKAQLKAALCKSSGTDKDYYLSQFAVLTLLVEFFDGQGSSSKAREYMRVGELQNCISSRLKEGAESMDEEQEEQSGIAFSNMLEAYEALRSDDKGSRAKTTKEGFLHAILVFLQKQGLIEYVEADEMIKTTKKLDNFMDWNLLNQNNYHRVLRVLGIENK

SEQ ID NO: 40825 - protein, 1475 aa, Dorea sp. 5-2
MSKIQAIRLINVNYNNNAIRISDECFHLNGESTLLSLRNGGGKSVLVQMLTAPFVHKRYRDAKDRPFESYFTTNKPSFILVEWVLDGGAGYVLTGMMVRRSQETGEGNTENLEMVNIISEYREACIQDLHHLPVVEKGKKEIVLKNFAACRQMFESYKKDRSMSFFYYDMTNAAQSRQYFEKLAEYQIHYKEWETIIKKVNLKESGLSDLFADCRDEKGLVEKWFLDAVESKLNKERNRMKEFQSILEKYIGQYKDNQTKIKRRDIIREFKAQADGIREKAEDYQGKSSLAGRQENLVAHFIAELSRLHEVTEEEYQRILGEIESIQGQLSRVEYEKLSGEIHKLEEKLRFHLSNRDMIEIEKEDMEQDSERILHKLHLLACAKQQKAAEQERGELELIRQKLLVSRQKEEDLEPERKSLGYTLRRYYEGLLEENEGKKRANEEEGAAVAAELSKAEGKLSELSDSLIENAARAGGLKSAASSYDRAEDGYNQRYEEALIRNILGVYEPGSLEIRRGDYEKELETLRRSRLSLFKQQEQANERSRSSERGLQDLNAEVLKGKMELRQQERVRQEYEGELETRKVVLRYLDLPEDVIFDREKILHGSERKLREIAGFRRNLEKEEDILQKEYQRLTQGKVLELPEELEQELEDLGIHVVYGMEWLAKNGYSEQQNLELVRAHPFLPYGLILSEAEVGKLSRNMGGIYTSFPIPIVARERLEGSRADRESGMIRLDGVSFYVWFNENLLNEEKLKDLVQEKEREIEKKRESIAIRQAEYKEYFERQEMIRNQEVSKENWDTNEKRRKELKEQIDRQERTIREVSEELAGLREEIARLEHAVRSADREMSRQQRRLEDFGRLCKEYEAYEQNVKELMRCKKEAEKLKEKQKLCKNRQEKLREQQKTGEIERNNLIREGEEIRRECRKYERYERAEDRAEGREKTKEEVSQSIRDMEARYAAITSCMSQEIQELEEQEQRAGKRYQDAADELEHLRRKYRLSEENLEQVSYDREEESHQEIMLEDCNRKIAVKQRLWNDEDKQIAVVNQQKRERLERMKSECGEEEPLPREEIQNQDFDARKNQFRYQEKEARKQADGLRERLRSYGENLTALSEYSDFPLGDEVEWEQDFAEMDAKSLRNFKGILLRDYNQMLRDCREAQDVLTRHLNRTVRMEQFQEDFYRKPLEAMLELTQDASAVLRQLYTTIQSYDSLMEKLEVDISLVEKEKSKIVELLEDYVREVHLNLGRIDHNSTIAIRERPVKMLKIGLPEWEENENLYQIRLQDMIDEITQKGLLLFDRNENAQEYFGTQITTRNLYDTVVGIGNVQIRLYKIEAQREYPITWAEVARNSGGEGFLSAFVILSSLLYYMRKDDTDIFADRNEGKVLVMDNPFAQTNASHLLKPLMDVAKKTNTQLVCLTGLGGDSIYSRFDNIYVLNLIAASLRSGMQYLKADHLRGNEPETMIVSQIEVMEQQELIF

SEQ ID NO: 40826 - protein, 328 aa, Dorea sp. 5-2
MKRISLEELICGRQNAAYRQQYEYILALILEGKIKPLKASGTNGKSPALYREYWLAEPQKDYSKWEEELKYQLHPMISVDHYLSHLANYEQDRQWVLMLSEYLKKSREKLRYSESVNERSFEIWGHEKFLSRGQGKRILKNCGMEEGFLNIYQTTEPLAYYSRTRQVPQNILILENKDTFYSMRRHLMGEDAVMGMEIGTLIYGAGKGILRSFLDFDLCAEPYMKDCKNRIYYFGDLDYEGIGIYESLAQMAADRRKILPFAKAYEAMVEKADVTCGMKNLPDTKEQQNRNIREDFFSHFREDRKSRMKEVLESGKYIPQEILNITDF

SEQ ID NO: 40827 - protein, 539 aa, Lachnospiraceae bacterium 3-2
MQYEFLKHFPRRMKNVGLYALIIQNSAQKTIWKQYGFQKLDEQLNVIFAVMLYIMEQSLKEENCVMDDIGAYIDTVNMQSFCKDMTYDDCRKLGDFIVNVVLSNEGKVMHFDGFDFGKNEYQSMHISYVANRIVYIDRELKRTSYYLTDDGYNLMLATLEIENNMKLTIHEMIFQMHLEKQSYDKAVDEIKNVFNLLRIQLQKIQEAMGKIRRNALNYSVKDYGDILKENLQTIDETKEKFQNYRERVKSRVKELEQENIDVKRLDAKDEEKLNYLREIESYLNRTIDEHQKILGSHFDLKALYTKELEELIQMSFIKRFSLRAELYDKVLENPEALERLDYFLRPLFGREVDKTYNLNKAFQLQRPVKKKREEDTQEALDFDEEEWQLDQEKRRRKKLKRYEKSLGFLLRETKGRGELTLKELSTRLERAGEDKEQLIPTVEIFKEIMVELIKNREIDIEALKRERSEYIQDRPGEFQLNEMLLYLVEEYPENSDIKRIEVNRIEDGSTVSFDGILNEDGIRKSIRCSNVSVRVKRKE

SEQ ID NO: 40828 - protein, 238 aa, Lachnospiraceae bacterium 3-2
MAYELDDIKASQEIFYYLLENHELREEEEMLLYKAYTEEEEVQNLVKSQGEIAGSTIERYGNVIYLIPKEENNFLGFSKAQLKSALCRSGATDKDYYLSQFVILTLLVEFFDGQGSSSKAREYIRVGELQNLVSGHLKEGAENLGEEEEERAGIAFSNMYEAYEALKSDEKGSRAKTTKEGFLHHILLFLQKQGLIEYVEQDEMIKTTRKLDSFMDWNLLNQNNYQRVLRVLGVAENE

SEQ ID NO: 40829 - protein, 1507 aa, Lachnospiraceae bacterium 3-2
MSKIQTVRLINIGYNNNAIRISDECFHMNGESTLLSLRNGGGKSVLVQMMTAPFVHKRYRDTKDRPFESYFTTNKPSFVLVEWALDNQAGYVLTGMMVRRSQDTSEGNNENLEMVNLICEYNGPCEEDIHHLPVVKKDKKEMTLKNFSDCRQLFEGYKKDRSKKFFCYDMTNAAQSRQYFDKLMEYQIHYKEWETIIKKVNLKESGLSELFSDCRDEKGLVEKWFLDAVESKLNKEKNRMKEFQDTLEKYVGQYKENKSSIKRYDTIQKFKGEAVSIQEQAGEYQEAEEKKRAQENLVACFIAQLNSLHEVTQEELDKTREQEEEVLVSMERVEYERLSSEIHRLDKECRFHISNRDMLDSEKEGLEHEAERIERTLNLLLCAKQEIALKEEESELEYIRQRLQVVRKKEEDLGPERNYLGYTLRRWYEALLKRNKEECGQNEKDCRRILEEIVRERIKLTDLGQKLYENASREGALKSRTYFYDEREEEFNQRYEEELARNILGEYEPGMLDIKKAAYEKALSEETRRRLGMRRQQEQEREKKKSMERSLEDMRTEKIKKSAGLSQQKKLREDYEKELEERRVILRYLNLEDSLMFERGEILRVSERKLLEIDSVRRNLEKEEDALQKEYQRLTQGKVLELSEEVKTGFENLGIHVVYGMEWLKKNGYPERKNQELVRSNPFLPYALILSEQELSKLSASGTELYTSTPIPIVLRETLEESREADGGGVQVFPGVSFYVYFNENLLDEEKLGLLVQEKERQIQKKREVLAVRRTEYKEYFERQEQLRNQRVDKLNWEQNEKSIEKLEEEIAALEESLRKTSAALSKLREETEKREQDIRKAEKEIERQKRRLEDFQRLYRDYEAYETSRRELEKCRREKDKLEERQKLARNQEQKLQDEQRTKEARKDSLAREQEKLWENIRKYERYQSIPKGAAKPKILESGNADIWARFLGDAGEEAKEPGDIHDAYMETADIDAADIRELEARYAAITMSMSQELQELEEQERKTAKRCQNASEELKRLGGKYGLRADEWKGVSYSRKEEQHQEAMLEERREKITQKQRLWNEEDKKIALIIQRREDRKKEMLEECGQEAPLPEDKIQNLDFAARKNKLAYEKKELHRQQEGYKERLKSYDENLTALSEYNDFKVVLEVEWEQDFAAMDGRKLREFKGMLIRDFNQSMRKRQEEKEHLAHVLNRIVRLEDFQEDFYKKPLEAMLELTDDASQVLLQLSTTIQSYDSLMEKLKVDVSLVEQEKNNIAGLFEDYVKEVHRNLGKIDCNSTITIRNRPVKMLKILLPEWEENENLYRIRLQDMIDKVTQKGLELFEKNENAQEYFGIQITTKNLYDTVIGIGNVQIRLYKIEEQREYPITWAEVARNSGGEGFLSAFVILSSLLYYMRKDDTDIFADRNEGKVLIMDNPFAQTNASHLLKPLMDVAEKTNTQMICLTGLGGESIYNRFDNIYVLNLIAASLRGGMQYLRADHMRGDEPDTMVVSQIEVIEQQELVF

SEQ ID NO: 40830 - protein, 330 aa, Lachnospiraceae bacterium 3-2
MKRVSLEQLVSAKGEISYLQQYQYIMELMENGKIKPLKASKTNGKKPALYREYWLIEPEKDYSALKEELKYRLHGRIDVDYYLEHPQVYERERPWVLKLSDYLKKSREKLEYKVSVNERSFEIWSREKFLTKEQGKAVLKHCGIGEDFLNTYGTSEPLSYYSSTRRTPQNMVILENKDTFYSMRSHLLGGHERILGMPVGTLIYGAGKGILKRFSDFSVCVEPYMTEKENGIYYFGDLDYEGIGIYERLASLFQEEWEIVPFVSAYERMLKKAEDGGLDGLPETKEQQNRKISGAFFQYFSEESSEKMRAVIESGRYIPQEILNISDFCR

SEQ ID NO: 40831 - protein, 479 aa, Streptomyces albulus CCRC 11814
MKALAVADPVLDLERRKPLLASRGWAGYQMEELALTAIDTVTLKMDFDDGARHEDIVAAMARVAGLQMPQHDRDEHTAVAGWVLDNLLNVGTVDRDFSHLYGIVSNSTYTAHAFSFKLLREVPGPDGRPRLRASNEAIAVLVGAVDLDIASEQVAADAKLEALVRRGRLTDAHRAAEMALRRTVQYTEHIRTRLEGMRRDICSVDWVRDVQRMQTEALEHIEDRINAENTIKDNLVRMMENSTEDTTPAQAAELIAILQECLRRHASLQANLQEVGERFRAEQERQSFVPPPSRAHVALERQLLVPALQLPVRHAYPLLSTFATAVTPPHRPAIIYLPDLIAGLMTSPAEPDGDDGLIIEPEFGDALDTATFSDEQYTAVASLLKQTDTDGIRLSDLLNAARQHGVSAGQRNLDHLLALHVLGLFGAPRHDPERGTVLAALADDRELDDDRFAGHDLLVVHNPAASVQPAANDLEEGAA

SEQ ID NO: 40832 - protein, 1498 aa, Streptomyces albulus CCRC 11814
MYELNRIRLYNIGPTGARYGDVLLELSEGGSPIPVSTLIPAAGQLFRRPAPATLLVLENGGGKSVLIRMLLSTVLPERQSRKGREALRAYVVSAAAPSHVVMEWVHVRTGETLVTGQVLTPATDGTVERTFYSLSPNAETNLATLPFAEGGRRLRMNAYQDALRRLDAGDKTLRLEVEKRQGEWEKHLRRLGLEPDLFAVQQAMNVDEGDAAEAFKTTTGRQFAQWLLSKAMDAEDFTELGDAFGAYAKNIGRREQLLLDRDFSTATATAAEHLARRHTEQKTAAEAAHHAAKALAHLAAQVRTSVQHADEALHALREDSAMAKENAAQQQQARDEADLLHKEVRRRTLVLRRDAAHSRTVQAEEQLAEERSELAAWAVVPTVLKAATAHEKYRVASELLDDAELAAGAARLRRDQAGACFAGALHRSRQQCAEQADGLDRKSAHSKTAAAEAQRGAAEGEKQATARTVRAELLGQQVERVDSRHKEARRAGLIAEDESVAEADARLRAKAADSKIQATREREECQKLEQEARRLDEAANQLIEPEVRARQAGEAAIRAVEDTQRAAAELAAQTLLRELAELDGDEDAPGSDPAQWLEDNASPLRNLAAAAQASAGQQLDALRADDRADQRLIEALTVEDEALMPPRQAVEDLLELLAEHQITATAGWRALEQLVNPRLQAASIQAHPALVDGIVVADQETLQRARTLLTQMPQLPAAAVLVSTPEPLETEPPQPSSGFVVEPTPALHDSQAAAQLREQAEARIEERRRALHECAERQAAAFQLEGQLTHWLSNHPAGYIEQLRSFANAQSAAAADAKAALDTARATCLQAANTLAARTTTVQDSEQAALEAARAADSFQLLAREAGDADKNRAEIPTLQTEAEEHRTAAQELREAADRLRDQATEYAVQAESLRRDAAAYAARLDKVVYGDQPLTLGPGEHDLAALEIAYHQAAEGFRAVEVGEDLRRRVEEAQKETTDRDAELRREPEETVNRAEALAASAEAGSAETIEATKRRLGRTVRSLETQYRTLSKHSGRLEADATTAGQPSGKPWTTLDADWTPSDPADGTQLTERAASALKNAEALLKTAAETQRATERKLRTSEAASREMTVVHRSLTTATRRLELPSSATPFTGTADEAQQAAEEVIQTHSTATEQLYEAGRAVNEAVVQFREAANQNRFAKLKAPISQQLTEIDTTSLIERADQWTVQLANRAASLTTDLEDSERHRKLLIDQLKHHTNQALALLEKAERLSRLPEGAGAWAKQRILKIGFSTPEPQILAIRIAESLDENARTQPHLPGRDLVLRCVGAAVPRDFKVEILKPDAAGRAEYASISDMSKVFSGGQELTGAIMLYCTLAALRGSTRTGARATSRQGGMLVLDNPIGKANADYLLSLQMNMAAALGVQLIYTTGNMEDRVLATFPLCIRLRNDTDQRTGTRHLHVTDHIAHETTPDEGGATGQLLAARLLVKPRDPHTPLENSDARQENHHDQMATDQ

SEQ ID NO: 40833 - protein, 361 aa, Streptomyces albulus CCRC 11814
MSNNRGDTEPEKQPLSPSAACLATTLTSRTEHRVEQATILDAFTQACPETAGTTQSRPVLSALLDELADHHLIELPRTRDGWDNAQPPLPRWLRLPAPPKATEPRTARTAPLMWRRELSWASAIKLTTAQTETLKTINRWLRDTDGDTHRRTMIPMRERSLEIFGDEKRLDALTTTTLFAPGRLTLTTLFTERIPPPLAYEHLGGGGTVLVIENSDTFATVSTLLAQDPGCVSYVAFGGGHAFVASVTRIANLKGVTDIAYYGDLDDDGLTIPQRANASGTASGLPPIRPALGLYRLLLRQDIQGPAPKQVDPLAAERRVSWLPEPLRHPAANILTAGNRLAQEATGITLLQQDHSWRDDL

SEQ ID NO: 40834 - protein, 516 aa, Coprococcus sp. HPP0074; identical to SEQ ID NO: 40632

SEQ ID NO: 40835 - protein, 238 aa, Coprococcus sp. HPP0074; identical to SEQ ID NO: 40619

SEQ ID NO: 40836 - protein, 1470 aa, Coprococcus sp. HPP0074
MPHINRIRVNNIKYNVGTQFYDDLCLRFQGKNSLYDLANGGGKSVLMLLLLQNLIPNCTLDDKQPVEKLFRGSTGSSVIHSLIEWDLDRPDQEECGFRFMTTGFCARKKADRIKEGEEEVSSSAIEYFNYCIFYNEFNDYDILNLPLVNGKERVTFKGLKELIKRLQAESNRKLSVKIFENSKSEYQSFIAGHGLYESQWNIIRGINKTEGHVRTYFESNYRTSRKVVEDLLIEEIIQKAYQLQTGKEKDAEELAQTLLDIREQMVELSKKKEQISNYDRQITVIQEFLTKFEPLLQNFELCRENEQKTSVFYHTLLDERERIEAEAEQLEEALQNMQEQQQETERILLTLDLQELECHLDEANYEREQKEKQKEQLKEAVEELRQTVTEKESVQYFLNYAKAQSRAHTIEAEMERMKQGNEELYQSLLEMTAQKKRKDEQIFEQLNRQKDEAEKNRETSRREKEEADKKERESDNARAVLKSRLIENEKERTALQKEIGEGMKAFPFLLREQIKDTIIEKEKKEDAERESKRTLEQECETIKEQLQSDRLMAKDLEHEAKELHTKEEECQAQLAIYEELTEKVAQRMEVYGEKDVYRLLELLKEKQRETIILLHDGQNRQSELQKQLEQLQKGILFQVTPEAEQLKEFLYRKYGDGVLGTELLEQMQGEKKEEVLGRIPYLPYSIVVGHRIYEKILAEPKPEEWQNVSWMIPVVDQTYLEHGQFDAGDGVMFAGKETAYFLEKEQLEKEIHRTEEVLNLEHKKQEQLREQQKVLTADTDGVQEYVTNYFENYAGWLEEQQERKEKRAQVMEAQEQLKEKEKKLCARAAELERKIPESAAKIKKLAEEILSLQRLEDIFRKSDLVEANQREWKEKKAELELEKETLWRLVQAKEQEISEADGRIRQITAQIMERKMGWERYATYYKEEIPIQEPIPERLEEELDGAIAAFEKENKDVREKSETLQVIREQITSYLRELRSRKADVKMLEQLYEEQKLAEVSDEEIEAQKEHLMEEEKLLQRCEKKVSELVLACTRFQSQADVIAGQIRERFYRIERLPIAAGTIEIEKERQKELQQQCKRELAELFRKQKETGKAQEEIQTMIGKITWVAEEYHIKDMSVKTLPGFVILDWKETERQIMSGWQKMKARKTAAETAFGKAKAWCEETLTGLGAGSFALQMKEQIPVPQSFEEADKTIKRLEEACVMIQMGRDQIEESLRDIEKIKSSFENQCLQRCNTIRMELDKFPKLSSIMIDEKLTQIVRLKIPYVREEQQQMQISNYLGQVIENLKKYETEQEKKKYLIQELSMKRMFSAIVTDMNRISLELYKRERIKEQSRHLRYEEAVGSTGQSQGIYIQFLIAIINYIASIHSYHANEESLKKVIFIDNPFGAAKDTYIWEPIFAMLAANRVQLIVPTRGATPAIIGKFDVNYLLGQKMVGQKQQTVIVDYRSKIDVEEAEYVKMEYEQATLF

SEQ ID NO: 40837 - protein, 409 aa, Coprococcus sp. HPP0074
MIGVRKSEGAKRMRKNLERYFAERREKKKTGNIRVTYEELLEQAAGNEERKLLEIRTGRVREFQQLLEAFVQEGVLSPVKRSKKPGYMATVYERYEIVGNKEKVVEDPEYLALLHSYVGTKVLEFYKRNRRAFEQDREAIGILYNYYCRTEKVWMTANELGYYLFGDEKAFEQPEGEKEKQVSDEQETSTEKDGRGRYRKKAGAYTHLLNRMGFDIETDLHAFYTKEPFICQVRPSFFEKNIRKILIVENKDTYFRIKNGIYGTEYDCVIYGSGWKIIRAFSLAEETGIMETDTIEYFGDIDPEGFAIYYELKTQYASYSIRLKMEFYEKILEAVRGSERKPEKIRGKIQNRAREVLPSALQEFDTETADFLQRMMLKDLCYIPQEALILVGKAEVENTTRRIRSNGVT

SEQ ID NO: 40838 - protein, 516 aa, Coprococcus sp. HPP0048
MELHRNLLEEIRAEQGLRMESMKKYYPFFEIVSHDLKQFQNGKYKSIDIGYVLMAVLRMLIEENNFNNTGVTYTDYLNFVIPFLESEFALDCTPEEYAQLAGYVFDKIKNDGKPFSYEFYDPEEKIRKVARVWLMKSHFQEGNIYYYITESGIEFYLNTKEFKEESKISIQQLLLEKMIRTQNFKGGREIVKRICNEVLKLKMQKREVLQVLVHDLKNGLSLYREFFQESVCWFDEEHDLFMKNTRLIAGAMSMLSPVDQIKNKEEIFLLDSELKRAMAMHSELLSECMDLRRKVDSMVEQGTLNAIRPVVYFRQFLETALKKDDVEQLKLLAEPLFQVKKKKMFDLKRLDEMLALRRGMDEEREEIESEEEADYVYDDELEEQRISSNYRILVRELFAMLKKTDCFTLREWNEQLEVRYGQKIFANGDYYSFLVNLCQKHEIVIRDAVRHPATNFEAVLKQYFEIEGTEEELQMDFCLETLTDEEPVTFLECFSVTNIRVERMNGDDRADAGNRD

SEQ ID NO: 40839 - protein, 238 aa, Coprococcus sp. HPP0048; identical to SEQ ID NO: 40619

SEQ ID NO: 40840 - protein, 1470 aa, Coprococcus sp. HPP0048
MPHINRIRVNNIKYNVGTQFYDDLCLRFQGKNSLYDLANGGGKSVLMLLLLQNLIPNCTLDDKQPVEKLFRGSTGSSVIHSLIEWDLDRPDQEECGFRFMTTGFCARKKADRIKEGEEEVSSSAIEYFNYCIFYNEFNDYDILNLPLVNGKERITFKGLKELIKRLQAESNRKLSVKIFENSKSEYQSFIASHGLYESQWNIIRGINKTEGHVRTYFESNYRTSRKVVEDLLIEEIIQKAYQLQTGKEKDAEELAQTLLDIQEQMVELSKKKEQISNYDRQITVIQEFLTKFEPLLQNFELCRENEQKTSVFYHTLLDERERIEAEAEQLEEALQNMQEQQQETERILLTLDLQELECHLDEANYEREQKEKQKEQLKEAVEELRQTVTEKESVQYFLNYAKAQSRAHTIEVEMERMKQGNEELYQSLLEMTAQKKRKDEQIFEQLNRQKDEAEKNRETSRREKEEADKKERESDNARAVLESRLIENEKERTALQKEIGEGMKAFPFLLREQIKDTIIEKEKEEDAERESKRTLEQECETIKEQLQSDRLMAKDLEHEAKELHTKEEECQAQLAIYEELTEKVAQRMEVYGEKDVYRLLELLKEKQRETIILLHDGQNRQSELQKQLEQLQKGILFQVTPEAEQLKEFLYRKYGDGVLGTELLEQMQGEKKEEVLGRIPYLPYSIVVGHRIYEKILAEPKPEEWQNVSWMIPVVDQTYLEHGQFDAGDGVMFAGKETAYFLEKEQLEKEIHRTEEVLDLEHKKQEQLREQQKVLTADTDGVQEYVTNYFENYAGWLEEQQERKEKRAQVMEAQEQLKEKEKKLCARVAELERKIPESVAKIKKLAEEILSLQRLEDTFRKSDLVEANQREWKEKKAELELEKEALWRLVQAKEREISEADGRIRQITAQIMERKMGWERYAAYYKEEIPIQEPIPERLEEELDGAIAAFEKENKDVREKSETLQVIREQITSYLRELRSRKADVKMLEQLYEEQKLAEVSDEEIEAQKEHLMEEEKLLQRCEKKVSELVLACTRFQSQADVIAGQIRERFYRIERLPIAAGTIEIEKERQKELQQQCKRELAELFRKQKETGKAQEEIQTMIGKITWVAEEYHIKDMSVKTLPGFVILDWKETERQIMSGWQKMKARKTAAETAFGKAKAWCEETLTGLGAGSFALQMKEQIPVPQSFEEADKTIKRLEEACVMIQMGRDQIEESLRDIEKIKSSFENQCLQRCNTIRMELDKFPKLSSIMIDEKLTQIVRLKIPYVREEQQQMQISNYLGQVIENLGKYETEQEKKKYLIQELSMKRMFSAIVTDMNRISLELYKRERIKEQSRHLRYEEAVGSTGQSQGIYIQFLIAIINYIASIHSYHANEDSLKKVIFIDNPFGAAKDTYIWEPIFAMLAANRVQLIVPTRGATPAIIGKFDVNYLLGQKMVGQKQQTVIVDYRSKIDVEEAEYIKMEYEQATLF

SEQ ID NO: 40841 - protein, 409 aa, Coprococcus sp. HPP0048
MIGVRKSEGAKRMRKNLERYFAKRREKKKTGNIRVTYEELLEQAAGNEERKLLEIRTGRVREFQQLLEAFVQEGVLSPVKRSKKPGYLATVYERYEIVGNKEKVVEDPEYLALLHSYVGTKVLEFYKRNRRAFEQDREAIDILYNYYCRIEKVWMTANELGYYLFGDEKAFEQPEGEKEKQASDEQEMSTEKDGGGRHRKKAGAYTHLLNRMGFDIETDLHAFYTKEPFICQVRPSFFEKNIRKILIVENKDTYFRIKNGIYGKEYDCVIYGEGWKIIRAFSLAEETGIMETDTIEYFGDIDPEGFAIYYELKTQYASYSIRLKMEFYEKILEAVRGSERKPGKIRGKIQNRAREVLPSALQEFDTETADFLQRMMLKDLCYIPQEALILVGEAEVENTTRRIRSNGVT

SEQ ID NO: 40842 - protein, 508 aa, Clostridium sp. CAG:590
MAEKYIMIHDILSEHKDRMLNLKKYYPFFVLCDTTFSQYKEGKYSNLDMGYITMATLRFLINENNFHESEITYEQYETFLLEVLHREFSLAENENEEKELCSYIFDKIKNDGKAFTFPYFDPEEKKKKTSRVKLVDSRIVDGVVLYHVTTDGIEFYLDTKEIKEESNISVQQLLLEKMIRSENFAGGIEVVKRINNEVGKLSLKKKEVLDLLGYDVFAGAKASEEYMETVSRWFEEESKLFEKNRALIDKAYAKANSESGAAVLGEIHKLDTELKKTIIRHGELIRETIELQNIADEMIGRAKLRKLRPVFQFRDALQKTMKYDRADALGMLVTPLFMPKLTKTFAVESVDRMLESKADQSDYGEKIEKKQVDADYIYEDEVEEERIAENFGRLFEELLEQLWKHGKTTLPELMAIYEIKFGKEIYRNGDVYSFLVHLAQKNRYELKSMQDKQDTFLEGIVMKKLSVEKKDKYGNMVFEIFFEVGNILNFGEKKDEAFSITDMRFETV

SEQ ID NO: 40843 - protein, 239 aa, Clostridium sp. CAG:590
MEMKNLEKATDIYAKLITGEEIKRGGTNGSLYDDYYGNAEVYEIVGVILKKLNLNIYEYKESLFLSAGEGNRIFGYSNEELKRAMNLRYNKELYLCYFIMYEILLSFYSDSASYQFKEYIRLEDVCDEITKALSVYTKDIAVYDTDNEQEQSFRTIALLWDELPASSNENQEEIRASRASKISFVKLTFNFLVGEKLFVEVNKRYYPTDRFKAIVEHYFEEYRGQIYDILSAQRKEPHA

SEQ ID NO: 40844 - protein, 1494 aa, Clostridium sp. CAG:590
MPNINRIRVNNVKYNFGTQGYDDFSMRMYGKNTLYDLANGGGKSVLMLLLLQNLIPNCTLDEKQPIEKLFRNGGGNTTIHSLVEWKLDDKDIKEGFRYMTTGFCARKAKDGDADQIALPGAEQAAQEQNVTRDSASIEYFNYCIFYRDYNDNDIVNLPLQNSKERITYSGLKNYLKDLARRNLNLKVYVFERKGEYQRFISRYGLFESQWEIIRGINKTEGHVRTYFETHYKTTRKVVEDLLIEEIIEKAFLVKTEQNDVNEDMAKTLLDIKDKLVELSRKKSDIANYDKETELMHLLEGRVSSFLSLYEEKDKVTKTLADVYATGEHLREQGEAEITAMEEKKEAYDRRQVFEKKRIEGLKIVRDQYDLLRVQEEMQGLLKYVNQAEQELAIAKQELDLKESINDYLRYLKDKAQMDENQAMIDASMDSNTDQLARLHTYAYTRKQMDDRRLADIRKQLERKEKAFQAKKEEAERLSHVAEEGNVALAVAKSHKEHFEKEYHKYMEEIAAVRKDISILVLGDLEDLEKTLREEEQELTQKREVSEESYLADYTQVNALERELYVEQESLQTAERALQEASDNHKEYIENQERLKKMTQVYGVNDMAQLYHTIKERAFQQKIAVAELEKKIAAWNRHLEQVHEGRILEESEAVTKVKDYLESRHGDFALSGVDYLSALPKANREELLQCFPMLPYGVVTKQFDLVEEDERIGTLELGNQAVTIYDRTMLETPHLPAKEKGVLLIAKDPQTFVEEDALAMEATRLEKQLAQLQEDLERARELDAVYEEDLDYTAKLNDTAFLNAEQRVQELREQVLDHQRKIEQLEKDIERTQKHCKVQQQDAEKWKQTLNENQKEQIKLAGIRAKSDLAEESRQQLEHYDAEVKRLSADTTDADSRLEHARLEAEELQGQIVHMEQQIAEMTRDWDDLYKEYYVEGNLTAVNISEEQLKAEFLAAKAVVEQATIVLEDKKKLITALSESMERGMKLIRRRGISVEQLEALQQTEGLHPVDETLLNRMSAQLSQISVRCDQLRADYKKKEQEASRLEGRVEQAIQTMTDRFGQEAFAELEFVSADTEHVTPTISKEDALQAIAEGDRILKELQEEIRNYDKEYRQYVKNNGVIIDLYKDVKRIVESEELDITQADILSEDQAKIREIFEESLLAYDKSNKALARAKQELLNYKTQTANTFYTMGAFELSDSVKEDVEIPETYEDAKTLLANIREMISYIALEKERVEQGIEDMEAIKNNFENQCIERCRDVRTELDKLPKLSRIQLDGEMIQMVSLSVPYVKDEFIKQRMSDYIDEVVNGADQFQDNNDRIKYMKNRLLLKKLFGVMVTDMNAIRLKLYKRERIKEQSRYLRYEEAVGSTGQSQGIYIQFLVSIINYISGMYAPEAEANELKKVIFIDNPFGAAKDIYIWEPIFALLKTNNVQLIVPARGATPAITNRFDVNYILGQQLVNGRQQTVVTDYRSQVEQDEVEYRNLEYSQGTFDFI

SEQ ID NO: 40845 - protein, 536 aa, Ruminococcus sp. CAG:60
MQYEFLKNFPRRMKNVGLYAVLIQNSAQKMSWKQFGFSKFDEQLNLIFAVMLYIMEQSLKEENCTMDDIGAYIDTLNTRYLQKQITYEDCRKLGDFIVNVILSNEGRAMYFDGYDFEQNAYHIMHVSYVANRIVYLDQEVRRTSYYLTDDGYNLILSTLEIENNMKLTIHEMIFQMHLEKQSYDKAVDEIKNVFNLMRIQLQKIQEAMGKIRRNALNYSVKDYEEILLENLDTISDTKEKFQKYRELVRSRVKNLEEENINVRRLGEKEEENLENLRIIEGYLNRTIDEHQKILSSHFDLKALYTKELELLSQVSLIQRFSFRNDFYDKVLEKPASLGNLEYFLRPLFNQEPEKIYNLNKALLYQKPSVRNEEEDTEEILDFDEEAYQKEQEKKRKEKLKCYENSLGFLIEQTVETGEISLLEIQSRQENLNQLIPNVEIFKEIMVELIRNKEIDMDALKRERSEFIQDQTSDFQLNEMLLQLCEGKFSQQKIRKIEVYRIEDGNTVIFDNVLTEGGERKSIRCSNILVRILRNEE

SEQ ID NO: 40846 - protein, 237 aa, Ruminococcus sp. CAG:60
MAYEAEEVLSSQEIFYYLLEHHELREEDEPLLYKAYTEEEAIRNLVKSQGEVAAANVERYGNVIYLIPKEENNFLGFSKQQLKNTLCKSTATDKDYYLSQFVILTLLVEFFDGQGSSSKAREYMRVGELMNCISTRLKEGAAEEEDEKDTAGISFRILYETYEALKSDDRGSRMKTTKEGFIYNILMFLQKQGLVEYVEQDEMIKTTRKLDHFMDWNLLNQNNYERVLRVLGVAKDE

SEQ ID NO: 40847 - protein, 1469 aa, Ruminococcus sp. CAG:60
MSKINAIRLINVNYNNNAYRISDETMYFNGESTLLSLQNGGGKSVLVQMLTAPFVHQRYRNTKDRLFESYFTTNKPSFILVEWVLDQGAGYVLTGLMVRKAQDLQEDKKENLDIIGIVSEYQEPCIQDIRHLPVVEKGKKEMILKNFNSCKLLFESYKKDRDMKFFYYDLTNYAQSRQYFDKLMEYQINYKEWETIIKKINVKESGLSDLFSDCRDEKGLTEKWFLEAIESKLNKDKNRIREFQSILEKYAGQYKDNRSKIKRRDNIRAFKEEAESIRTRAEEYQEAEREEGKQENKIAWFIHDVNALLNDTQKEYSASKEQLEGLDKAVARVEYEELSSKVYESEKEKNLHLSDRDMIDMERENLQEEAAKTQEKLHILACARGQQSVNEEKGELELLREKIAVARKQGEDLEPERRALGFSLKCFFEGQLRDNRGQQNIQNESAKKAGEEADKKAQKIQELEEKIRDCFGKKGKLESQIEAYSRVEEQYNSKYQEELRRNILGSYEAGTLQICQQIYEQDLEKAVRERTESQKKWEADKETIRGQERRLEDKKEALIHKKIKIQKQTGRYQTYEKELEDRKAVLKYLDMEERYLLDRERILDVSGRKLRELEELRRNLEKEEDTLEKEYTGLTSGKVLELPEELENELKNLDIHAVYGMEWLKKNGYSQKKNQELVRRNPFLPYALILTRQEMEKLGRNGKNICTSFPVPIVEREKLEEVQEKYADKIVRFPGISFYILFNENLLDEEKLQAMIWEKRQKLEKIGQAVLLRKKEYAEYFQRQEMIKNQTVTKESWQEVQETLEKLEEEKKRLEKEIRDDSQSLEKLKKDHDELQAFIARAGMEIQRQRQKLEDFKQLKRDYDSYESNREVLEKCKKEEARYQENQKLARDRQRKLLEEKKTLEYSINMLGREEERLSEKYARYAAYENAEQNFHIDESLSADQMEARYEAITSVLSQELKDLEAQEKKVAGRFQRAMDDLEYQQKKYKLKPSQWQNVFYDRKEETHQEVILEDFQRKIQTKDLQWNEADKKAAVAQSRISELMKRIRSVCGMENPLPQNEIQGQNFAARRNQLLFQIKEEKKHADFLNGKVRSYEENLTALSEYNELIPAETEEWETISFDMEAAELRKFKGILIRDYNQRIRDTRQKKEELVQLLNKIVRMEAFQDDFYRKPLEQMLELSGDAGRVLIQLRTTVQSYDSLMEKLEVDISVVEREKERIVELMEDYVQEIHRNLGKIDHNSTITIREKPVKMLRIQIPDWEENAGLYHLRLEDFIDKVTMEGVELFERNENAQEFFGSSITTRNLYDQVVGIGNVQIHLYKIEAQREYPITWKEVARNSGGEGFLSAFVILSSLLYYMRKDDTDIFADRNEGKVLIMDNPFAQTNASHLLIPLMDMAKKTNTQLICLTGLGGDSIYNRFDNIYILNLIAASLRGGMQYLKAEHKRGKEPDELITARIEVGEQQELLF

SEQ ID NO: 40848 - protein, 326 aa, Ruminococcus sp. CAG:60
MKRISLEALLRTMQDQSYQEQYEYIRKLLEEEKIKPVKASRTNGKKPALYREYWILEEKKDYSEYIEEIKYNFSTRISVDYYLTHPDVYETDRPWVLLLNEYLKEHKDALKTAESLNERSFEIWSREKFLDREQGKKILNRCGLGLEFLNIYRTTEPLAYYTHTRNTPQNLLILENKDPFFSMRSHLLSGHTEIFNMEVGTLIYGAGKGILRSFQDFDLCAEPYMTYSGNKIFYFGDLDYEGIGIYENLVERFQDRWEIKPFIPAYEAMLNKADRLENLPETKEHQNRNITSIFFSYFSNTTVEKMQAVLQNERYVPQEILNRADF

SEQ ID NO: 40849 - protein, 515 aa, Clostridium sp. CAG:632
MAENYIMINDIMEEHHARMQNLRKYYPFFVLNETTFTQYKDGKYSDLDMGYITMASLRFLINENQFNEQTVTYEQYEAFLLELLHRDFHLQESPEEESELAGYIFDKLKNDGRPFEFHFFDPEDKKRKTARVKLIESEIEDQVVRYHITAEGIEFYLDTKEVKDESKISVQQLLLEKMITAKNFKGGIEVVHRINSEVKRLLAQKESVIALLSHDVFKGAEACENYMATVARWFEEEQKLFAKNKALIEQTLAKASVSEAGAKETTAFYRSLEEISRLETELKKTIHRHGELIRETTDLQDIADQMIHQAKIRRLRNVFDFRGSLQRLKERDDPAAMRYILAPLFAPKIEKSFNLNAIDNMLTYKTEQADHGEKIIKEETNRNFRYEDEKEDERILHNFGQMFYELLDQLEKKESIELKEFSAILEIRYGDQFLKNGDYYSFLVHLAQKSEYSVRKLYEKPETFLENLVQEAWDEEAKERFLCTGFTLEFLEQEEITIPQDETEFTITNIMFYRK

SEQ ID NO: 40850 - protein, 240 aa, Clostridium sp. CAG:632
MDSRNMDKALEIYAKLTMGEDVRRSHPENGSLYEAYYQNAEVYEILNQILKKLNLNIYEYKEALYLTAGEGNRVFGYTNEELKRLMGLRYNRELYMAYYIMYQIMLCFYQDSASYQYREYVRLEEIVKEVSDSLLAITGDLQIYAMDEIEENSFKSLALLWEELPTVTGEDREQLRASRASRMGLVKLVCNFLISQGLFLDVQERYYPTDRMKALTEQYFEEYRGHIYELLEGGEDHAEY

SEQ ID NO: 40851 - protein, 1486 aa, Clostridium sp. CAG:632
MPSINRIRVNNVKYNFGTQQYDDFTMRMYGKNTLYDLANGGGKSILMLLLLQNLIPNCTLDEKQPVEKLFRTGGGNTTIHSLIEWKLDEPELHEGYRYMTTGFCARKAKDSPDEEDGGKEMAAIEYFNYCILYRDYNENDIINLPLVKDGERVSYTGWKNYLKELGRRDMKLSVQVFDRKGEYQRYISQFGLYESHWEIIRGINKTEGHVRTYFETNYKTARKVVEDLLIEEIIEKAYLVKIDKNADPDDMAHTLLEIKDKLVELTKKKREIADYDRQTELLHVLEARVAAFLELYEKQSDQCANLANVCVTGATLAKQSEEKLKALELAKDEKKKIIRARQKQQANLKIHRDKLEYRELLAEIERLQAEIAGHEQSVKDCQQELNRKESINDYLDYWKDKSQKEEHEAVIEASLHQNDDQLSLLKALVKERRKRDEQILKTLSESEKQAEEDYQEAEGRLTSSENLTHEAEVAFAVAEHEEKQASERYATAMEELQALRKKMTFTSLQNPETLLEEQTAQAEQEKIHLTELENQVYEIQNLRHEKLKECEKRNQELDQIIARIEELKTGSREYQEQADKLKRMLEIYGGQAAEKSAEWMTNADMGRLSDQINQRYLDNLAMISNVRKQITAQEKRLQGLAEGRLVAPTEAVDRVKYYIESRHNRNAVFGMDYLVAQPEERRSHLLALHPLLPYGLLVDTFEGLDNDRKLRELNLGDGFLPIYNMEHLEDTAEKIPEDGVIFLQRGTQAFVSTEAIEEEKERRQTELEELQNELERLEEMSRTYQEDSTFVAGLQGIAVLDVEQELLKAQEELREEQNAVALCTQELEDTERELEQLRSQLTGCKQAVYSKLEEQGQLRTLVSLSERTQKAEKDLQTCKAEQERLDKLLEEHRQALHHWKVRYADTGKRLQELRKQRQERTVDWEQYYKTYYDENAAGTKEQCEQVAALDKEQLDARLKAQLSVVEKGTVALEDKKKLITTLQASMSRFRKAIEKRGNSMEELEKLRQTNELFTVDERDLELLSTELSRLTLAADALKHHVEGRRQKADRLEGKIEQAIRTMEEQFGPCEELQVSVMEIDAELETGEQQLNRLNTEYQQMETDYAEDTREYTAILDLYKDVKRIVETNDIRLQDAKALVVGKEQLRELFEQSLLAYDKSTKALDKARGELQRYKNQTAQALLEMQAFELSQTISNDVAVPKNYGEARNLRESLSSIINVIALEKERVAQGIEDMQFIKSNFEKQCVQRCQDVKNELEKLPKLSRIMLDGEAIQMVGLTIPYVKEEFIQQRMSDYIDDVVQGADRFQNQNERIKYIRSRLELKKLFSVLVTDMNNIRLTLYKRERIKEQSRYLRYEEAVGSTGQSQGIYIQFLISIINYISGLYAPNGENDKRMKTIFIDNPFGAAKDVYIWEPIFALLKTNHVQLIVPARGATPAITARFEVNYVLGQQMVGKRQQTVVVDYRSQVDQEELEYHSLEYEQVSFDFI

SEQ ID NO: 40852 - protein, 102 aa, Eubacterium sp. CAG:146
MQYEFLKNFPRRMKNIGLYAVIVQNSVQKLSWKQYGFTKFDEQINLLFIVLLYIMEQSLKEEKCTMDAIATYVDTINVQYMQKDISYEQGRKLFKMQAIKHH

SEQ ID NO: 40853 - protein, 326 aa, Eubacterium sp. CAG:146
MLKICDDADKVLQQLNVTIASYDSLMKQLEVDISMVESEKKNVTELLQDYIQNIHKNLARIGSNSTIKIREKSLKMLKITLPVWEDNEKLYNLRLSDFVDEITEEGIHLFENNENAQEYIGRKVTSKNLYDTVVGIGNVQIQLYKIEEQRERQISWNQVARNSGGEGFLSAFVILSSLLDYMRKDDSDIFMDMHEGKVLLMDNPFAQTNAEYLLKPLMNLAEKTNTQLICLTGLGGESIYNRFDNIYVLNLIEAHLGYGINTLRSRIWDRVLFLFSDYLNLRFNNMECARRLWSSGKLNFKGLTLKLLSFQHKLLICYLLSKPDSR

SEQ ID NO: 40854 - protein, 326 aa, Eubacterium sp. CAG:146
MKKILLEKLLEKCREQTYQKQYEYIMNLLEEEKIKSVKASRLNGKSPALYREYWVLEEKKDYSTYIEELRYEIVPDISVDYYLRHLESYEADRTWVLELNQYLKNKKKTLQFKVSVNERSFEIWGQEKFLSRGQGKRILNRCGLELSFFNIYETTEPLAYYSRTRNIPQNLLILENKDTFFSMRRHLLEGNEEILGIKIDTLIYGAGKGIFRSFEDFDLCVEPYMQAEGNQIFYFGDLDYEGIGIYENLAELFNEGWKIIPFMAGYEKLLDKAVKAVSIPETKERQNRNIKNIFFSYFSTERIKQMKEILEKGRYVPQEILNISDF

SEQ ID NO: 40855 - protein, 505 aa, Eubacterium sp. CAG:86
MAVNMVNDIVSGHRARMLNLKKYYPFFKLTEISLSQFKDGKYEILDMGYIVMGILRFFIEENNFNEKDVTYPEYLEFFHELISRDFGLLLSEEENREIGGYIFDKIKNDGRPFDFEYFDPVERKKRISRVRMIESTIRDNIVWYTISPDAVEFYLDTKEIKDESRISVQQFLLEKMIQAKNFKGGTEVVERINEEVSRLALVQQDVMNTLASDVFAGIEAYRDFVETGMRWFDDEEKLFKKNSDLIKSALEKISPGGQADAAYYKTISEIYELENQLKVAMNRHAQLLGACTHMQKLTDDAVRHAKLSQIRSHVDFTSLLKKMTENGDASVLIPLINGILKPNTKKTFNLNSIDEALTMRPARYQEIEKVSVKKQKEIIFEDELEEKRIADNYVFIMKNLISALHKKEEFTLEEFNLSMKNMYSENVLKNADYFSFFVNLCQKKKHIIGGADMDSESFMDDILKKYFENEAPVAFSIDEGNGKMLGLMDGCEVSDVTFHREDYSN

SEQ ID NO: 40856 - protein, 258 aa, Eubacterium sp. CAG:86
MESRNLDRALDIVSKLINGENVGENGDNAALYQEYSTNAQVYDIVMMTLKKMNLDIYEYKNSLYVSAGQNNPVFGYTNEELRKELGVKLNRELYLAYFVIYNTITSFYSDTSAANYTSYVRIEDVIENVDNSINGIIDKRNGIVLDEIEENSFKQIALSWEELPASSDSVQAGMRAARNSKAGFVKMVFNFLVNQGLLVDNSEKPENSVDNTKEDENSGGNLYYPTNRFRALIENYFDEYKGRFTQILSKGEKNDATD

SEQ ID NO: 40857 - protein, 1479 aa, Eubacterium sp. CAG:86
MPQINRIRVNNVKYNFGTQMYDDFMMRPNCSSMIYDLANGGGKSLLMLMLLQNVIPNCTLDEKQPVEKLFRQGGGNTVIHSLVEWKLEPCYRKDNYTYMTTGFCARKAGAQSNSSGIEYFNYAIFYREFGDNDIKNLPLTSNGERITYNGLKEYLRNLEKDDFNVSVKIFDRKGDYQNFLSHYGIYESQWEIIRGINKTEGHVRTYFESNYRTSRKVVEDLLIEEIIEKSFNNKLGVTDDEGQMARTLLDIKDKLLELSKKNSQIGNYNSQVEEIEKFAQYAESFKVNFIKKQELEEKIYRLLCACKIIIADREALSEQNSSDLEKIQEKINNEQYLIQSAQVASEQKSLDAIRELVDVYSAKIEAADSRFAERKELLRKSESVNDYADYLKYENDFNKIKQTIDNRMREHDDITAELHDIAVKIFELSNDEREKLKESLKQSQKELQTAEDNYKEAQKTFDSLTKEEAAAQSLVSFLKSRIENDEKQMAVLMEKCGIIIAENVEAELLTSEENIKDARQEIQQKDKAYNDLKLRLGDTQTDIARIDVGLEFIKKEIEDVKKIQAEYEQTKDKLNTLSKIYNDENTAGLDIKIKEYSDSLDSEYFEAEKEAQRLTAFIENAKKHQYLLDAKNRTKLKEYLFTRYKDDVKEGADWLAQLDEKQRTDVKRRIPFVEYSFIVKNNFDKIKNDAALASFNLDSYTVPIVSEDNVLDAKVQIDKNTVVFAMKDMDFLKDDAKTESEIAAAQEELDNINHKIEKIEDRRKVVLGDYCYVINNKMQRFEKASDDLRRLTENMSQSRENHEKLKAEEQLLKKQCDSAAAQAESAKKTYTEECSRYEILKLAKKHKEQLAGEYAKQRQALLDADNLSRKLGDSQTDVENKKEILENVSKTLAVYEQKIETAQKDWEENYNHFYDMDIDTSDKPEKEFAGMTYMQLESRFFGLKDILDKEMVDVADKEALMEHYRISMEKCKKAIEYRGDDFKTVKSDFETGKTIVSDAQELLHIKQQIADIEKETRADRDEFDAQNALMNRLEGSIAHAVSQIKERFGEYEPLLCENPESYISQHKNYIKELDERTQRIKEEIAGQAKALKKYYICEKDLERIVTDAGMDIPDEEAVANVFRQNENAYDLKILETETDSYEKISKDYSQLVKLIEKRREDFQSRKEQFCRRLVEFDADELSAEMNASINIPSDCKDVEVLCSGLRRTNEYIVLEKERVSKGIEDMEQIKDNFENRCIQTCYNIKTELDRLPGLSTIRLDDEIISMIGLFIPYVKEELYKSRMSLYIDETIAMSESISSQEERLKYIRNRLTWKRLFSVIVTDMNAIRVQLYKRERIKDQSRYLRYEEAVGSTGQSQGIYIQFLIAVINYIASVNASVSETAVLGKTIFIDNPFGAAKDIYIWEPIFKLLKTNHVQLIVPARGATPAITGRFDVNYILGQKLVDGRQQTVVVDYYSRTNTTQLEYTRMDYEQTSFEFFV

SEQ ID NO: 40858 - protein, 508 aa, Butyrivibrio sp. CAG:318
MPQEHILVNDIIADHKERMLNLRKYYPFFKLSEVSFSWFKDGIYDNLDMGYILMAVLRFFIEENNFKERDVTYQMYYDFMSACIRRDFAVTLTPEDNKVLVDYIFDKLKNDGRPFMFEYYDPVDRVRRVSRVKLLESRIQDGTVWYSISPDGIEFYLETKEIKDESRINVEQLLLEKMIESEDFKGGTEVVKRINEEVERLKLRRNKVLDILSEDVFAGVDAYENFFDTGIRWFADEQKLFAKNRELIESAMSRFGDADDSRSSKAAEQIYRLDTELKIAMNNHSELLKACTELGIRTDEIVRKAKLGRLRSRFDFKGALDIMIKKDMPQALEYVVKPFLGLNIHKTFDLVKVEDILSYRPYEAETPEQIEEETAAEIVFEDELDDERFRRNAGALMHVLLEMLTKNDEFTLGEYNGAVMNIFGSEVFKNGDYYAFLVHLCGKKDYFMQAGENTGETFLDEIIAGLMDREEFLKYSGMHFILELADGNLHEIIPYTGMSITDFTIKRI

SEQ ID NO: 40859 - protein, 242 aa, Butyrivibrio sp. CAG:318
MENRNLEKALDIVTALFMGEDVKAGGANAMLYDEYSHNSEVYDCVVQILKRFDINLYEYNDSLFISAGADNRVFGYSNEELKKIMGLRLNKELFLVYFIIYMIIIRFYKDSMTGTFLEYIRQEDIVKAVSASLGGMIDHSSGIVMDEAEEKSFKAVALVWDELPDVSVEDKGGQRAAKNSRMGYVKLTFNFLITQNLFIESGELYYPTPRFKAIAEKYFEENRGRLHEILSSDKEEDTDAAD

SEQ ID NO: 40860 - protein, 1455 aa, Butyrivibrio sp. CAG:318
MPQINRIRVNNVKYNFGTQFYDDFMMRFSCRNSIYDLANGGGKSVLMLLLLQNLIPNCTLDDKQPVEKLFRTPGVNTVIHSLIEWKLDACDVRDGYRYMTTGFCARKGKDNSEDSQRELASIEYFNYCIFYKEFGDNDIKNLPLSNGSERVTYNGLKAYLRDLEKHDYGVEVHIFERKGDYQNFISNYGLHESQWEIIRGINKTEGHVRTYFENSYKTTRKVVEDLLIEEIIEKSYNNRIRNGEADDDEMARTLLDIKDKLIELAKRRGEIAGYDRQMELLDEFAGGLGTIGELYDRKERTADGLVGCLMACRRELAGKKEQLENLENTYASLDEEYDVASAGAARAEIEEEYNELNELNSLIEETIAARNAISDRSAGFKEQIRLNDIALEYRDYTDAGAEYDKLKELIANRSKDDEEIIESMHRLAALKYRFYTEKRALNLEGLNRAEETAADIKSEYEAEKEKVRALFAGMSSEKGIYDEVNSICLSKESSLMAGLKECSLIVADALGQAYEDNGNDIDKSRENIASLDENTAKCAGIIRDNEKKAAVARNRYERMKADYDKAATRYEAAVKRTGHISTLCNIYNCSRDALIHTMHQIYDSTLKQQIEKENEINSLQAYLGNIKEHKVPDYDSRFEAVLDYLRGRYGNAVRAGRDAGVDMIMEYPYLPYVIVAGDAYDAIAADKVIYSMNTGTYMVPIIRNEMDFPDAGSMNAAYKRMDFLWDEAALAAETDNVSEELKTAKESLVSIRDKAEVIRDDIVTARTVLEDEPAEIIKSELGQIEEDMAQLQDEIELCDRTISNETVRNEALKKALAAEKEHLDECMARRKMLEDNLAIYAELIGLRERRKKVRAEMDKARAEYDIAARNEENLSVKLENAVNNRDRIRADIDRDDEVYNSIYRPYYRENDDAANPEGMLEEAVDARFAALQELITGRNGDIEDKTRLMNNCRAAMDKSERSIKRNGMSLEDAKENLEKGLLVIRDEAYIENLRREINDSDRKAAAKDSEIDAQSASRNRIEGSIEHARRVYEEKYGTFERISDDNPKESIAVFRHKMSEITSRRSDIKSQIRQLENDNRDAMVMERDLERIVTNAGLSGRETANGILTADVSSYDELRKEYNRVLKEEDRLKTDFYNRKQKLITSLEDLKAYELAQEIMASVELPQCVADVTAMVDGLKQTNECIALERDRIDKSLGEMEHIKDRFEDRCIQICSNIRTELDRLPKLSRITLDDEVIPIITLSVPYIREDMYKDRMSVYINETVSAAETFHSPEDKLKYIKGRLSWKRLFSVVVQDMNSIKLSLYKREHIKDQSRYLRYEEAVGSTGQSQGIYIQFLIAIINYIACLNSANKDSQITGNTIFIDNPFGAAKDVYIWEPIFGMLKTNHVQLIVPARGATPAITRMFDVNYILGQKLVAGRQQTVVVDYRSQVKADEMEYVQLDYEQSTIEDFFNT

SEQ ID NO: 40861 - protein, 508 aa, Eubacterium sp. CAG:603
MSEEYTLVRDIVYDHNERMLNIRKYYPFFKLADISLSQYKEGKFAVLDMGYIVMAVLRFFIEENNFREKMVTYNEYMTFMQDVLKRDFELVIEEDEEKELIAYIFDKLKNDGKPFSYEYFDPVSKQRKTVRTKILDNKIVDDNVVYYITSDAIEFYLDTKEIKDESNITIAQVLLTKMISTRNFKGGTEVVSRINNEVSRLISKKNEILGILSYDIFEGIKAYESFIKTTVKWFDEEQKLFDKNKQLIEQALRAGEEDNKFYEAMEDIYHLESELNRAMNKHSELLNACTILQAKADEMVVQAKFNRLKSSFDFRKVLSDMIKSDNTDNLNLFTKPLLKLNVKKTFSLTLLDNMLNMRTEAMEDGEKINENKYDENFKYDDEIEDDRISENHRIFLMILFDMLIANEEFDLMQYNEELVKKLGKNVLKNGDYYSFVTHLCQKSLYDMSEVIEKPDTFLEGFMKKVITEESGGAKYKYLTFRIDFLEDNEILENMGNEIVNVHFRNGAQ

SEQ ID NO: 40862 - protein, 231 aa, Eubacterium sp. CAG:603
MENRNLSKALEIVSKLIVGEEISRDSKETASLYDEYMDNSEVYDITNTICKNMNLSLYEYENSIFASAGENNRVFGYSNDELKKEIGVKLNRELFLCYFIIYNVITWFYNDTRNVTFNEYVKVDDIINSVDSSLSGVINNLSVLSLNEVEENSFKTIALVWEDLPIVANEETNARAARGSKVGFVKMTLNFLLKQELLIENNERYYPKKRFKALVSNYFEEYKGRLYEIMK

SEQ ID NO: 40863 - protein, 1481 aa, Eubacterium sp. CAG:603
MPHINRIRVNNVKYNFGTQFYDDFMMRFSCKNTIYDLANGGGKSVLMLLLLQNLIPNCTLDDKQPIEKLFRTNEGSTTIHSMIEWSLSDVHIKDGFKYMLTGFCARKAKEQGEFEENADGSRNGTAIEYFNYCIFYRKFNDNDIKNFPLTQNGERITYSGLKNYLKDLQRKDYNLEVKIFERKGDYQRFIADYGLYESEWEIIRGINKTEGHVRTYFETNYKNTRKVVEDLLIEEIIEKSFRNKYANDSEDGNLAETLLNIKDKILELSNKKEEINNFDRQIEIIDGFAGRISSIRQLYVGIENAFIKIKKAYNSLEVSENNNKSELEAALNERKNVLAEKNNLSAKVETAKVLVDMGELEKLEAELSRENEKLVQTDEEVKAFIERLNILEGGNYYLEYIQCKKEYDKLKLVMNNILKDNKTLLDNLKELAAIRKMSDDERINELTSKINEEKSINENETELIAALKTEIKDLDNKLAVLDYKVADYDRKSALINKEIIDKKNMTSLLLPTDADKMCAADRDKLSAINDKAEELESKCETKSGEVITLRLKLRENDYKLNDLEKRKNIIEENNNKLLNSSEKLSKLKQVYDAEELEELLKKIEKTYKNMLNASSEAEKKLVEIDRQLKALELGRVVNESAALSEVLEYIRRYHSNTAVSGAQYLAELPEETRFELVKYNPVLPYAIIVKDNFEQTIMDTRLKENLENGYTVPIINGTKLAEENVELINSENVFFIGENAEEFSSDKIKQNIERIKLLQEKLNKEYLRKLENEQVVKEDYLFINHIVNDVNDEEILNPKKALEKVNSEILEKIEVSKNLKEEIAFTENDIRNVKEELADLRKEKEETEQEINVLSEISRLITESNVVSDEKTKASTELERLKKEATDSSKRLAATENMSKQRQIRINSMEEELDTIKKDWSEKYSSYYDETVYKEVRDNEAKYNGRSRDDIETELMALIESLKKENYAVADKEKLLNNYQVSMEKNLQHIDYMGVDIEVLKNQYDNNELVVTSPKDLSDIKRQADRHKAVKKEIRQSIQEMRSNADKLKGKISHAINIITDKYGEFDKNLIKESEIDTFLNENARLLSDLTDKTDRLAGAISEMERKAVTINMLKRDINKLMTKSDIKPDIKAGTFEENADIEAECKNVSEQLDKFIDEKYKRSEEFEREMSLLNDTLKKLNAFELASEIRMNVSMPADLDETDELIKMLKETNEYINLEKQRILKGIEDMQVIKDNFENQCIQTCTNIKTELDRLSKLSRITMEDETIPVINLRIPYVKEEVYKDRMSEYIDRVAKGADSFEKTEDKLKYIRNNLSWKKMFSVIVTDMNSIKLNLYKRERIADQSRFLPYEEAVGSTGQSQGIYIQFLISIINYISSINSKNADASKLKKVIFIDNPFGAAKDIYIWEPIFKLLKTNNVQLIVPARGATPAISGRFDVNYVLGQKISNGRQQTVVVDYFSNVNNDELDYTTLSYEQTALF

SEQ ID NO: 40864 - protein, 545 aa, Clostridium sp. CAG:264
MAKQYVMINDIIEEHNARMYNLRKYYPFFVLSETAFTQYKDGRYNSLDMGYITMAVLRFFIEENNFNERDITYPQCEAFIKELLIRDFDIEIEDEDMADLILYIFDKIRNDGKAFEFTFYDPGKKQKKTGRVRLIDSRITDGKVLYYITADGIEFYLDTKEIKDESKINVEQVLLEKMITGENFKGGIEVVKRINSEVNRLVREKDDIVDLLSYDVFAGAEAYEKYMKTVGKWFSEEQKLFAKNKALVDKAVAKANFDHLTKGSTLLDEISQLELELKKTILKHGNLINSTMELQNISDNIIQKAKLKRLRPVFDFEKELQKMIREDRPDKMGLILAPLFAPAITKSFSMTSIDNLLTLKSEDEAKMVTAKKEDVNANFRYEDEIEEERSGRNYGKLFFELMDVLARWKKLSLKEFNGFLEIRFGKEIYENADYYAFLTHLAQKKEYDISRMLKKQDTMLEKLVVDSIREYQKVRDSIGEQQIPQATADSISTVSVPDIYSEDAYAPDISFEPYKDMRFTLTFDSTEEIPVGADMYVTNIIFELQ

SEQ ID NO: 40865 - protein, 241 aa, Clostridium sp. CAG:264; identical to SEQ ID NO: 40526

SEQ ID NO: 40866 - protein, 1492 aa, Clostridium sp. CAG:264
MPCINRIRVNNVKYNFGTQQYDDFSMRMYGKNTLYDLANGGGKSVLMLLLLQNLIPNCTLDDKQPIEKLFRNGGGNTTIHSLIEWKLDDADIKDGYRYMTTGFCARKAKESDEGASQDGQTAAIEYFNYCIFYRDYNKNDIINLPLSNGNERITYSGLKSYIKELGHKDMSLEVRLFERKGEYQRFISEYGLHESHWEIIRGINKTEGHVRTYFETNYKTTRKVVEDLLIEEIIEKAFLTRTGRDGDESTMAETLLDIKDKLNVLAQKKRDIANFDHQIELINVLQAKVNSCINQYEAHEDITRQLADIYVTGKELTSRENEHLEELLVAKQTAFEQKESQKKRLENLKITRDGFRLQELRDKSEQLNANLAENERQVSALKQDMNMKESINDYLGYLEDRKQLSENQKIIDHILQNTGADREKMTAYAYNRKLRDDARLKELLLAKEEVEQSHEYAVKEADYCMKCIKEGEIELAVSGDNRKAASDKLQSLNNKISELTSQVALLVVSDAANVIEASEEKAAEFEASLQALAESIREDQEQVFEDRYRLSLAENSLETLEKEYETSHLDAEEYRQAAKKLESIMAVYSVEKAEEIIDAINARITGTLTETITRKQEIDRLLERRKYLESGRLFGPSAGASAVIDYIVTRHGHMAMHGADYLAALKSEQRSEILKKNRALPYGVVVKNFADIAEDINLDSIQTDNEMVLIYDMDDLSEKAVTLNENAVMVCRKGEYFTDDEILKSLKEELTIQIRGLEDEISLIDEKLATYQEDLAFVSHLADERHLDAADIERKLNQDLLNKKDEVRELQDRITERTSRITQQKEDEASVKEKLHELEEDKSILLRIKELSDLAVEEESRYTENVQKEQRITGQIEKLKRDAVRWNTTVSETEARMLAIANSIQDIQDKWQNYFKPYYPEDGKVDVSLDPKQKIQVALGQETEDVSRRDIEILTISDEVLETEFMAMYAVANKNAPDVEDKKKLVQALSQSMDRILHTIEKRGVKLSDLEAQTQLFATSEQQLQALSNELMRLELVSASMAEELKNVSKASGRLEGNIEYAVASLKKTYGEDAYAEEQISLSEAEQAIAQGDQILAELEQSYKKTAEEYETCNKEQGYMIELYKDVKRIVDTNDINVENGKLLEAGKEELRQAFETSLLRYDRSRKNLEKTRNELMRFKGQTAEALSEMGVFEMAETIRRDVIIPENYYDAKALLESLLQIISYIDLEKERVEKGIEDMVAIKENFCSQCLQRCMDVKTELEKLPKLSKITVGEEVIRMVDLTIPYVKEEFLAQRMSDYIDDIVKGADAYEDERKRVRYIRDCLALKRLFGVMVTDMNAIKLKLYKRERIKEQSRYLRYEEAVGSTGQSQGIYIQFLVAIINYIAGMYSYGAEGEISTKTIFIDNPFGAAKDVYIWEPIFAMLAANHVQLIVPARGATPAITGKFDVNYVLGQQMVGNRQQTVVVDYTSKTSQEELEYQDITYQQATFDFI

SEQ ID NO: 40867 - protein, 540 aa, Firmicutes bacterium CAG:646
MQYDFLKNFPKRMKNVGLYSLLVQNSFQKTTWKQYGFIKSHEQINMIFAVLLYIMEQSLKEENCTLDDIGAYIDTLNMQYLRKNISYEECKELGDFIVNTILCNEGRPMYFEGFDFEQGAYQRMNVSYVANRVVYIDGEIKRTSYYLTDDGYSLLLSTLEVESNMKLTIHEMIFQMHLEKQSYDKAVDEIKNVFNLLRIQLQKIQEAMSRIRRNALNYSVKDYEEILVENLNTISDTKEKFQNYREMVKKRVHELEEENINVQKLSRKDEENLNHLRIIETYLNRTIDEHQKILNHHFDLKALYTHELEQLSQMALIQRFQLRTDFYEKVLENPGALEQMDYFFRPLFNQDGEKIYNLNKAFQYQKMAQRKQEEDETEELDFDEETWQREQEERKREKLKKYEGSLSCILKWAGEKGEVSLGEMKEIFDAGEEEEKLKFIPTVEIFKEIMVELMKTRRIDLPALREERKQFIQEESLEFRLGDMVLKLADEIPENFGIEHIETYRLEREEPVVFEGVFSEDGSVKSIRCSDVLIRVRKKV

SEQ ID NO: 40868 - protein, 236 aa, Firmicutes bacterium CAG:646
MAYEIEQIRTSQEIFYYLLEHHELREEEENTLYQSYIQEEEIQNLVKSQGEIADCNIERYGNVIYLIPREENNFLGFSKAQLKSVLCKSTGTDKDYYLSQFVILTLLVEFFDGQGSSSKTREYMRVGELQNCISERLKEGVERTAGKEDCPIAFSQMLEAYEALKSDERGSRKKTTKEGFLHNILLFLQEQGLIEYVEQDEMIKTTGKLDHFMDWNLLNQNNYQRVMKVLGVTEDE

SEQ ID NO: 40869 - protein, 1466 aa, Firmicutes bacterium CAG:646
MSKINAVRFINLNYNNSAIRISDETLFMNGESTLLSLRNGGGKFVLVQMMTAPFVHKRYRDAKDRPFYSYFTTNKPSFILVEWALEQGAGYVLTGMMVRKNQDVEDVSGEALEMINFISEYSQPCLQDIHHLPVVEKGKKEMILKNFSACRQLFESYKQDRSIGFFYYDMNNSAQSRQYFEKLAEYQIHYKEWENIIKKVNLKESGLSDLFADCRDEKGLVEKWFLDAVESKLNRGKNRMQEFQSILEKYVGQYKDNQSKMKRRDAIEKFKEESVKIQEIGEEYEGAAKGERKQENLIIHFMQELERLLKETEEEDSQVQREIEELESFIARLIYEQLSGEIYGMEDQKYFHMSNKEMISMEQEALEREAEQIQRKLYLLVCAKLQETVDRDQKDLEVLQQKLVAARQSEEELEPERQELGGILKRYYESKVLENQTAQKENQTSIEQKREENTAEKEKLYRIGEDMLQAARQVTASETRARNYDRLEHIYNERYQTSLRRNILGEYEPGTLEILEEEFQRELEQKVRERTEKKRTFEKNKERLREQERCLEDIRAEEIHKKEEISQQEKRRERYQQELEIRKNILRYLDLEEKELFSEEKIFGAFDRKLKELDGIRKNLEKEEYELEQEYTRLTQGKVLELPEEFETILQELGIHAVYGMEWLKRNSLSPEEKEDLVRRHPFLPYGLLLSRQELNKLADYGKEIYTSFPIPLLVREELEKAQQDRENGIVQMDGIRFYVLFNENLLDEEKLAILVQEKETHLCKVREGIQIRKQEYREYFERQELVRHQEVNQEIFQKNQGEIRELQEQLKQLGERIQEETRRQREGKEELQSLEEEIRKEEENVREFQRRQEDFTQLRRDYAEYENNLREREQWERKRERLQEQKKISESLYEKQQEKIRELEWESDQLLREQDDLQKELEKYSSYESGKFTQEEQEIRRMESRYKAITSAMSSQIQDLEEQEQKAASRWRHSREELDRQSEKYQLSHEEWRETAYDRRAETHQEIQLEDRKQKIERKKWEWNEEDKKEAVLIQQIRERMERLKKECGQENPMERSKIQSEDFEARKNQLTYQKKEKEKQSGKLQKRMRIYNENLTALSEYQDFKIQEPIQWEEDFSGMDEKQLRNFKGILVRDYNQTIKEKQERREQLSRTLHQITRMEIFQEDFYRKPLEAMLELVGDASRVLSQLHTTLQSYESLMEKLKTDISLVEKEKERIVELLEDYVHQVHQEMGKIDQNSTITIRERPVKMLKIQIPGWEENENLYHLRLQDFIDEVTKKGLQIFEKNENAREYLGTRMTTKNLYDTVIGIGNIQIRLFKIEEQREYPITWAEVARNSGGEGFLSAFVILSSLLCYMRKDESDIFAEKNEGKVLLMDNPFAQTNASHLLKPLMDMAKKTNTQLICLTGLGGESIYNRFDNIYVLNLIAASLRNGMQYLKADHKRGGEPEIMISSRVQVVEQMELLF

SEQ ID NO: 40870 - protein, 346 aa, Firmicutes bacterium CAG:646
MKRISLTQLLASHRNVSYQQQYDYILSLIQSGRIKPVSASPINGKSPALHQEYWLLEKEKDQTFLLEELQYDLHPAISIGYYQKHLEQYERDREWVLLLNEYLKTKRENLHWQISQNERSFEIWNREKFLLKEEGKKVLKRCGLDVEKLNFYQTAEPLAYYSHTRKTPQNMLILENKDTFYSMRRHLLEGKKSILGVTIGTLIYGAGKGIFKSFQDFEFCVEPYMKEKKNQIFYFGDLDYEGIGIYERLVGVYGQAWKIHPFTPGYLSMLKKAEIVRKLPESSNQQNKHLNGSFFAYFEEDENRKMQDILEQGKYIPQEILNIMDFREDDEKKLDKRKEEECNTIF

SEQ ID NO: 40871 - protein, 494 aa, Butyrivibrio crossotus CAG:259
MLNLKKYYPFFELAKTSFSWFMEGRYEDRLDMGYIIMAVLRFFIEENNFKEREVTYPEYAAFMKSCILRDFGIVAGDREYKELTDFVFDKLKNDGRPFSFVYYDPVDRIKKTSRVRLLESRIEDGVVWYSISPEGIEFYLDTKEIRDESRISVEQLLLEKMIKSKDFKGGTEVVRRINEEVKRLRIKKNQVMELLTTDIFAGLDSYKEFFNTGIKWFDEEQKLFVKNKELIETALKRTENDINPVQGESFRTGREIHRLDTELKVAMNNHSELLKACTELGIKADEIIKRGKLTRLRTRFDFKGIMNRIIKENRTDILEYIAAPFFMLNIKKTFDVGKVEDLLSYRPENEEKPEKKVELTEKDIVFEDELDERRFNRNTRTLFLILLRLLKEKKTIMFTEYNEQVRNILSDKVLENGDYYTFLIHLCEKKEYVLEQGEASEDTFLDAMIKEYMNEPEFSEFIGMHFYLELAGGEEEEIETSHIANVTNFRIILV

SEQ ID NO: 40872 - protein, 238 aa, Butyrivibrio crossotus CAG:259
MENRNLNKALDIVSKLITGEEVGRKSNTMLYEEYCNNSEVYDIITETCKSLNLNLYEYNDTLFISAGVKNRVFGYSNEELKRLMGLRVNKELFMVYFIIYNIITEFYKDSSSATYLEYIRIEDVIKSVDASLHGIINHDIGVTQDEEEKDSFKALALLWDELPIVSIEDKGSVRAARNSRTGYVKLTFNFLTAQALFVETNEKYYPTDRFKAMAEKYFEENKGRLYEILNREDENATD

SEQ ID NO: 40873 - protein, 1464 aa, Butyrivibrio crossotus CAG:259
MPQINRIRVNNVKYNFGTQYYDDFFMRFSCRNTIYDLANGGGKSVLMLLLLQNMIPNCTLDDKQPIEKLFRPGCDNTTIHSLIEWKLDAGCVKNGMKYMTTGFCARKAKENSDNAERKNETANIEYFNYCIFYKEFGDNDIKNLPLSKGNERITYNGLKSYLRDLEKKDYGIEVRIFERKGDYQNFISEYGLHESQWEIIRGINKTEGHVRTYFETNYKTTRKVIEDLLIEGIIEKSYNNRIRKGNEDDSQMAKTLFDMKEKLTELSKRKTDIDKYDEQIRLINVFTDKMGEYKKIFEEKKKTENELIRCLCVCRMRLAGERAKIEELCNRKEELAAHINEIKRRTAIAEIETETVELEQLEKLIAETAAEKETLLSSYDRLKENLRYVKAASDYFDYVENKARYDELKELISNSTWNREDVLKELSELAAFKKTIVDRKTTELEARIDEIKTLTEKVCTERDEAADKKLNVYGEINKNQGQLKQLKNEIEELNKNTDELMLRCNLTSNAGIEDIISKAEDMLKSSDKALSGYTSHISEEENNISDLNREYLKTETEISFIKNDEERAAILYEKEQQLLKDLNQIKNVYGENDIGQLIEKIEKVLAEITENIVEVKGRIKYLGNYEKAISENKLPEYDRCYEEVLSYLKSRYDDVKSGAEYIALMDENERSDYIAENPMLPYMIFAGDSYEEIKHDEMLYSLNTGSYIIPIIKKDNILRICKENMVGACHDLSFIFNETGTNSELIKISEDIDKEKDTLAGLNDKYNVISKDLYFCQYAENKLNDSSSYGVPEDLKEEKERLISYLGRISDDMEMSKKRLESYRTSLEREQAHNGETADNLLLYKKIKENTDRLASLYDETRTCEKLTGGLTKEHAELSRKVRSFDVLLTEKENIRKSFEEEAASINKEYKEKFESYFNGEAKEPDIEEDEINTRAGALRKIISDEIGELADKEKQLAHYDALIKKNIDNLKYYGFTLDEAKKAKDEGLFSKASVDERLVIKNQLDKIKSEIDKTDGIINSEQAQKNRIEGSIWHGKKLYEEQYGEFIRKKFNDPQAYIVTGRQEISSITSGIQNIEKELKNIDENNRDLIVMERDIGRIFRTMGIYIPEDGLTDENIAVDDDITENYEEIEKNYDRLKRDEQRKKTAFLNDKQKLSDDLYGLEAYDLAAEIKLSLNAPETAEDVEDMVNGLRETSDYIALERDNVEQGIRDLQQIADNFEERCIQICSNIRTELERLPKLSKINLDGESVPVITLQIPYIKEEFYKEKMTTYINDTIARADIFDTQDDKLKYIKNQLSWKKLFSVIVSDMNSIRLCLYKREHIKDRSRYLKYEEAVGSTGQSQGIYIQFLISVIHYISSINSSYDMGISGNTIFIDNPFGAAKDIYIWEPIFKLLKTNHVQLIVPARGATPAITRMFDVNYILGQKMAGDRQQTVVVDYRSQVNTEDSDYNVTEFTQTTLKLD

SEQ ID NO: 40874 - protein, 524 aa, Clostridium sp. CAG:127
MALKHVMINDIIAEHSARMQNLKKYYPFFVLNETTFTQYKEGKYAFLDMGYITMASLRFFINENNFHEKDVTYEEYEDFLRELLTRDFKLEEELVELRELISYIFDKIKNDGRAFEFHFYDPEVRENKVARVKLIDSHIAQGTVYYTITPEGIEFYLDTKEIKDESKINVSQLLLEKMINANNFKGGIDVVRRINSQVISLIEQKEQVVKLLGVDVFEGAKAYEHFMDTTAKWFTEEQKLFVKNKALVDKAIEKAEFERDTDGGSPTLHSKALSEISQLETELKKTIYNHSRLIGETTELSQLSDQIINRAKLRKLRPVFDFKQALNTIMKLDQPDLLAHVLEPLFAPRMDKYFTMRNIDNILTLRSDEKQETEKIEKRELTPDFKYEDEILEEKIGRNFAHLFYELCDQLKKWNRVTLKEYNGILEIKFGEEIYTNRDYYAFLVHLSGKRSYRVDEMLEKQETMLEEMVVEHLTEEEKERIRDIRFTITFGTDEVEIKPQMQDIEAVEPFVVTDMNFEREAAE

SEQ ID NO: 40875 - protein, 237 aa, Clostridium sp. CAG:127
MEQRNLEKALDVYAALITGQEISRSNPDTRDLYEEFYANAAVYDIVTKMMKKLNLNLYEYQDAVYLTAGEGNRVFGYTNDDMKRLLGLRLNRELYMVYFIMYNFLLLFYQDSASYQVKEYVRLEDILEQVTTYLASITKDLSVYSMSDVEADSFKSLALLWDELPLVTSDEKDKNRASRASRTGYVKLTFNFLQEQKLFIAVEDRYYPTDRFHAIVENYFEEYKGKIYKVLGGETNA

SEQ ID NO: 40876 - protein, 1466 aa, Clostridium sp. CAG:127
MPSINRIRVNNVKYNFGTQYYDDFTMRMYGKNTLYDLANGGGKSVLMLLLMQNMIPNCTLDEKQPIEKLFRTGNGNTTIHSLVEWKLDEQDRKEGYRYMTTGFCARKAKDVEGETAKKDVAAIEYFNYCIFYREYNKNDIINLPLSKDKERITFQGLRNYLKELEHRDMSLKVCIFDRKGEYQRFISGYGLHESQWEIIRGINKTEGHVRTYFETNYKTTRKVVEDLLIEGIIEKAYAVKTMRDGEDSDTMAKMLMDIKEQLTILAKKKKDITSYDHQAELIEVLRDKVASFMSLYQEQTNMEKLLADICVTGEEFVKNDAETLEKLEQTRNEKRAAKDDQRKRMECLKVARDKRHLEQLYGQIKQAEKQLELEQSRLETEQAEFAKKESINEYLEYVDDRRKKDELEAWVKAQMNASAFDETQLYTYAYNIKMRMDVQMTNLRNQIAADTEELKREVAKQKYNEKMLAEMQVQQAVYEHSKQEAETQIRQLSEQLSAIRMEMNEIRFTKVDEQLAESKELLASLQEQQTQEEALVADCRKKEEAQKERLMQLRLQQAENEKQLAELLTKEQAFEEAAEKLHKIQTIYGASEMEALSDVLADRIRDAVLKIEALKKQGVECAKNAERLAEGRLIGVSEAAKKVLDYIETRHGSAAMYGMDYVSALPADKQAAVLSANPQLVYGIVAEDYDTLAEDPNIRTIDTGEVPVYIYDRDRMEEMAMHLGDNVFAVSATPEYLLDAETISTLVAKERQRETEIGDQLAMQEEMLSAYREDQAFLIRLSDRDLLEAGKRLADARKTATELETQLTACMDELEMIRKKIAASKEKQENCKQEYEACIQDVNRLYTVEQLTSVIATQEQRQAEAEKALERLEEQKASFVAQGGDSRLDTEQTEAKIRFMQEQLDTLVREWKDNYESYYNVDQEYEVLTISDEDLRARFRTMVDENRGDMRAMEDKQLVIATLLASMEKSRKSIERRGVDFKELADLESRNLLYFSDDAVLTVCRENIAQTKEQLKKEERQLSEIRSKADKLDGSIQYAIENIQNGYGSYEEVDASESEIIASLESGQTLLARLEAEAKACDEEYRTYEKRQRYMTDLYKDVKRIVTTHEISLEDATPMLEDKETLREMFESQLMNFDRTCKQLDRAKNELLKFKGNTAQAFDEMHAYELAGTIRDDVRIPENYAEAKALVDNLESMVGYVRLERDRVEKSLTDMEGLKANFEEQCLQRCLDVRTELDKLPKLSRIIMEDEVIQMVGLQVPYVKDEFLKQRMSDYVDRIVAQADDYEQDRDRMKFIRNSLTLKKLFSVIVTDMNAIKLSLYKRERIKEQSRYLKYEEAVGSTGQSQGIYIQFLISIINYISGMYRIGNEDTGTKTIFIDNPFGAAKDVYIWEPIFALLAANHVQLIVPARGATPAITGRFDVNYILGQQMAGGKQLTVVVDYTSKVEQEELVYQDLEYEQVSFDFI

SEQ ID NO: 40877 - protein, 531 aa, Coprococcus sp. CAG:782
MAQKYVMINDIIKEHNARMYNLRKYYPFFVLSETTFAQYKEGRYAGLDMGYITMGVLRFLIQENSMNEREVTYDEYEEFMGQLLDRDFDVEIKTEDRKELIAYIFDKIRNDGKAFEFNFYDPSIKKSKVGRVKLVDGHIRDGQVRYFITAEGIEFYLDTKEIKEESKINVEQLLLEKMITGENFKGGIEVVKRINNEVNRLVREKDEIVDMFSYDVFKAAERYEKYMKTVGNWFMEEQKMFARNKALVDKAVARAGYDKAYGSGNKTFKEISELELLLKKTILKHGSLINSTMELQEISDNIIHRAKLKKLKASFDFQARLMDIIREDRPDKMFTVLSPLFAPKNEKWFSFASIDNILTLKSDDNARMVKVKQEETDSSFRYEDELLDDRISRNFGRLFFELADQLIKWDRLTLKEFNGILEIRFGKEIYGNKDYYSFLTHLVQKKHYDIDDMLKKQETMLEGVVVEALTGKTPGMGSETDGAYAPKLSMERFKGLVFDIECDPAQEIAIGEDMYVTNMIFVRKGDSKHGK

SEQ ID NO: 40878 - protein, 238 aa, Coprococcus sp. CAG:782
MESKNLDKALLIYSKLISGDEVSKRDSENGQLYEEYYSNAEVYDIVGSIFKKLNLCLYEYNDSLYVTAGEGNRVFGYTNDDVKRILGLRLNKELYLCYFIMYMMLIYFYRDSESYQFRDYIKPEKVIEETDRFLSGITGELAVFAREDIEQESFKAIGLLWDSLPITTSGGEGEKAKASRASKSGYVKLTFNFMVSQGLFVENDDRYYPTDRFKALSENYFEDYRGRLYQLLGGNENA

SEQ ID NO: 40879 - protein, 1473 aa, Coprococcus sp. CAG:782
MPSINRIRVNNVKYNFGTQQYDDFTMRMYGRNTLYDLANGGGKSILMLLLLQNLIPNCTLDDKQPIEKLFRAGCGNTVIHSLIEWKLDEADIENGYRYMTTGFCARKAKDEDGSNKDGGSATEKDTAAIEYFNYCIFYREYNRNDIVNLPLSKDNEKITFSGLKNYLKDLARKDLSLDIHVFERKGEYQRFISQYGLHESHWEIIRGINKTEGHVRTYFETNYRTTRKVVEDLLIEEIIEKAFLTKTGRNGEEDDMAQTLLDIKEKLNQLARKKRDIANYDHQIELINVLQDRVNSCMDLYDEYDSITKSLADIYVTGKEFTSQDSDHAEELLAKKQDSYEKKEAQKLRLDNLKVTKQYLEADQLKQYLERLEAEISVNEEKLKEARHFIALKESINEYVGYVKDRSLLKENEKLLENIMNSSDVDIHKMKQYAWNKKQNNDFRLAELNSLKVDNERTLVIKKEEQAEAEKLLREGQIAKAVADSNIIDVKQRIEGLNDKINELTASVDVVVVGDASAMYEASEKKRKNTEEKLTALQIDSNSLREEMYEDKYNLSVKNGELPALEKKYESANEKAALYGQVQQKFKNIIGIYGASEPSLIEDIISARIKGAYEEIVKKRTEVEELKRQEKLLGTGQIFGPMKGAEAVINYIETRHGTMAVFGANYLAALDPDRRKSLLNTNPALPYGVIVKDFAAIKDDINLPDIDTGSQYVMIYDMNSLAEPALYLGNNAVAVTRSAEYFADEEVLNKLKKDAHEALASAEDELSIINDSLSTYDEDLTFVRSIVNNDLVTADEELKAAEKELADAKDEIKGLYDAITELTIRIDRSNKEMDSLTSELAELTTSTDILKQIFDLSEELKKEIVRLNELNVYESTLSVKIEELKGNELKAAMTVGDLQARAEKYTKDIGEINEKWEQYYAAYYDDMPGVSYDRIILSDEEIDAEFMAMYKAHSYSKPDIEDKKKLINALKSSMERTMRTIEKRGITEEEILSSGDIVVTDEETLETINKEIARLTHISSELTRKHNETSKEINKLEGSTNYALENIIREYGAGSYVKEDITLTEAKTAIENGDQTLGELERQYKECVREYESYVKEQGYMTDLFKDVKRIVDTNDIDVAAGKILYDDKEKLRDAFEGSLFKFDRSRKNLDRAKNDLMRYKGQTAEALSAMGVFEMAATIRNDVNIPDNYYDARALLDNLSQIIEFIRLEKGRVAKGIEDMETIKENFENQCIQRCMDVKTELEKLPKLSKINMGNEVIKMVDLSIPYVKDEFVKQRMSEYIDNLVKSADTYEDERKRVKFIKESLGLKRLFGVMVTDMNAIKLKLYKRERIKEQSRYLRYEEAVGSTGQSQGIYIQFLVAIINYIAGMYSFRAEDTVTTKTIFIDNPFGAAKDIYIWEPIFAMLSANHVQLIVPARGATPAITGRFDVNYVLGQQMVGGKQQTVVIDYNSKTDGEELEYHELSYEQATFDFI

SEQ ID NO: 40880 - protein, 537 aa, Clostridium sp. CAG:122
MEYDFLKQFSKRMKIVGMFSTLIKNSWQKTTWKQFGFETMDEQVNMIYAVLLFIMEYSLREQPCTIDDISVFVDDVCNRYLKKSLSYEKSRELAEFIINIVLCDEGHAMYFDCFEFEKREYKKKNISYLSNEVVYLDGDIKRTSYKLTDNGYNLVLSTLEVENNMKLTIHEMIFKMHLERATYDQALDEVKNIFNMLRIQLQKIQEAMDKIRRNALNYSIEDYEQILNENMTAISDTKHKFMEYRRVVRNRVKELEDENINIKALSDEDMEKLHNLQDIERYLSRSIDEHQKILNKHFDLKDLYSHELEQMSKMTLIKRFSIRNDLYDKIIEHPGSLVNINQFLNPLFRNNPEKVYNLNKCIQYQKPLREKNDDEEEEKLDFDAMDYEEQKERKLREKLKKYQSSMEFLVERTMENDGEIDLASMSSLPEEQKKVFIPNAEMFKEIMVEFIKAGSIDIDELRKERRNIVAEESCSFQLNEMILKIADERKNSQIKRITVRRCDDGQTVCFKDVYNEFGDRRNIYCSNVQFRFEKEME

SEQ ID NO: 40881 - protein, 244 aa, Clostridium sp. CAG:122
MAYEAEEVKISQEIFCTLISKHELREEDNKELFEGYTQNPRIMNLVKSQGEIADCTVERYGSVIYLIPAEDNDFLGFSKQELKAKLCKSGATDKDYYLSQFVILTMLTEFYDGQGSSSKSREYIKVGELINLVSDRLIQAGNNMTEEEEEKTGLAFSNMLEAYTALRSDEKGRKTKTTKEGFVHRILTFLQEQGLIEYIERDDMINTTKKLDSFMDWNLLNQNNYIRVSKVLGISDEKEKVKGE

SEQ ID NO: 40882 - protein, 1476 aa, Clostridium sp. CAG:122
MSKINTLRIVNLNYNNNSIKISDEAFQFNGESTLMSLRNGGGKTVLVQMMTAPFVHKRYRDTKDRKFESYFTTNRPTFIMVEWVLDGEAGYVLTGMMVRKNQEVSDGEAHDELEMINFVYEYTARCENDIYHIPIINETESGMTLKNWGSCKKVFEKLKREDGMHFNYYDMDMPAQSRMYFEKLKQYQINYKEWETIIKKINLKESGLSELFTDCRDEKGLVEKWFLEAIESKLNKDGNRILEFETIIKKYAKQYRDNQTKIQRMKNLRGFLEEASGIRVYADEYVDYTEKRKNKENDIAWFNVILNELNAEAEERKRLLDEDIRKKQIEISDIKYEEVSYNIHSLEAKKERLIHEYEQITLEKGQVAKEKDRLENKRAKLLCARENEEKNAALAECRKIESRLEASKKSEEQKEPERQELGKTLFKHYSRAVSECEAEIANTRENIKKQEKQEKEYNQSKSDCFKQKDDNSLQIGKCQAKISNYDVIEEQFNKKYEEKLCRNILGVYETGTLELRDDEYKKEISKIQKDIVSLKQEKVKNDDDFVKYVRKQDDLRNEIMEKKSKLASEREICLDFEEQLKIRQDIMKHFLVSENDVYNKEVILKGADRKLKEISAAKRLLERESEQTNTEIKLLENGRLLEVSKEFDEYLSSMEIEYIYGMEWLSNNGRSMDENKKIAANNPFIPYAVIISGEDLKKLLADKNKVFTSNPVPIVKREELEDGFINDETGVVELEKISFYLKFQEELLNDSKRYEIIEQKKEKSRKIQENIERRDEEYKEYFSKQECIKNQTIESDSIESSRGLIDTLESETVKMQDELENLESLKRKITLVNEQINQNVTALNEKKNLSGIRLQDFEMLRESYNDYCDAKEEKIRLDKKNEDIDNKLNIITEKLNNLIEDIKADEKTEMKKKQELLGLQERYEYFEKFKGKSEDVDKASYTLLDEEERISKEAAYNALLNDYSNEVKLLTEQYNSANRRFLKSKQELAELLAKYRIKKTDIEKTRYDKDDKAELDERISANNMELQLYDEKLNKVNTQITKKESDIEHAYKDMYRIAEKKEPISKDKISDTNFKDRIIIIQNEIRDTRLDLDGVTSLCRGYEANISALAEYSDLKVEETDEHIKKEDIFGKSVKEIDKFRGMMIRDYRELIENERKQSNVITRLLNEMARKNIFKDEFFQKPIEVLLSLTDNAVNFMKQLDILVSSYESMIEKLEVDVAIVEKERVRIVELLEEYVRDVHEELGKIDGNSTIKVHGESKKMLKITLPEWYENEEIYHLKIQDILEEVTAKTIKALEENKNPDDITGLYINTKYLYDTVAGTGNVRIKLYKIEEQKGREISWSDVAKNSGGEGFLSAFIVLSSLLYYMRKDVSDVFTNYNEGKVLVMDNPFAQTNASHLLKPLMDMAKKTNTQLICLSGLGGDSIYDRFDNIYVLNLVAASLRNGMQYLKGEHTRGDEQETMIATQIQVTQQELMF

SEQ ID NO: 40883 - protein, 542 aa, Coprococcus eutactus CAG:665
MALKYVMINDIIEEHNARMQNLRKYYPFFVLAETTFAQYKEGRYAQLDMGYITMAVLRFFIQENSFNEREVSYDEYEEFMGQLLDRDFDVEIAEEDRTDLIMYIFDKIKNDGRAFEFTFYDPGKKQRKTGRVKLIDSHIVDGKVLYFITADGIEFYLDTKEIKDESKINVQQLLLEKMIVGENFRGGIEVVRRINSEVNRLIREKDEIVNLLSIDVFRGAEEYENYMKTVGKWFADEQKLFAKNKALVDKAITKASYDNMGKGNMKAMEEISQLELELKRTIIKHGSLISSTMELQNISDNIIHKAKLQKLRPAFDFARQLQSIIKDDRPDKMLTILAPLFAPRIVKTFSMTSIDHMLTLKSEDNAKTTKVKKEQLDPNFRYEDELLDEQISANFTKLFHELLDQLSKWGHLSLKEFNGILEVKFGKEIYDNKDYYSFLTHLAQKDRYSVDEILKKPDTMLEGMLVDHIERIKTGKGIAILQNQTDGDMGHGGSGLSREMYAPELTLDAFRGMTFTLEFHPDEEIQIGEDMYVTGIQFNKTS

SEQ ID NO: 40884 - protein, 239 aa, Coprococcus eutactus CAG:665; identical to SEQ ID NO: 40529

SEQ ID NO: 40885 - protein, 1491 aa, Coprococcus eutactus CAG:665
MPSINRIRVNNVKYNFGTQQYDDFTMRMYGKNTLYDLANGGGKSILMLLLLQNLIPNCTLDEKQPVEKLFRAGGGNTVIHSLIEWKLDEADIKEGYRYMTTGFCARKAKDTADAGEVQKDTASIEYFNYCIFYREYNKNDIVNLPLSEGNERITFNGLKTYLKDLGHRDMSLEVRVFDKKGEYQRFISGYGLHESHWEIIRGINKTEGHVRTYFETNYRTTRKVVEDLLIEEIIEKAFATKTGRNGEEDTMAETLLDIKDKLNVLAQRKRDIANYDHQIELINVLEGKVNSCIGLYEDNDRICKGLADVYATGRACTQEGDTHMEELAKAKADAGEQMEQQNKRLANLRVTRDYLRLEDMNRKMDDTATQIEDNEKKLAELKNQIGYKESVNDYLVYRENKRQYDENRLIVDNIRNNIGSSSEKMAVYAYNRRIRDEKKLAELMAAREEAQTSYDHALEEAEYCRKVMREGEIAQAVAENNIADATAKIDEISARISELAASVNLLVVGDVKDMMNKAQEESDRILAEMTELEIAVADGRTKLYDDRYRLTTVQAEYDALERSCEDARLDAEAYRQSGSQLDSIMAVYSVENPQDITGVINDRIRGTITETIKRQQEIDRLTKLAKCYEDGRPFPPSEGAETVINYISTRHGLMAMHGADYLSALPGDTKEELLQANPYLPYSVVTKGFDSLEDDINLGSIDTGSECVMVYDMDKLSDSAIVPAENMLIIGRDRKYFMSKDSIEDARKANADKIAGFTEEISLINEKLATYQEDLAFVTRLVDARYTGAEDRERELNQALLDKKDELEELKTSIKVTETELKNNTERYGDLQQSQQKESDRRQTFVMIEQLSDLARPEEQRLAEYKQRKFDLVAKLSGLQSDVLKWSTTVGETEAKLAGLTRNIEDIQYKWTEYFEPYLPKSENAGVAENTDGAGVAAAAWQDGIPEEYKETLDISDERLEQEFMAMLAVSKEHAPDLEDKKKLMDALKKSMDRIQKTIEKRGFDMAVFAGAGELYPTSEDNLREMDDELARLTLIEASLMQQQKADQKAYSKLEGSIEYAIENINRTYGDGSYVREEISAADADTAIANGDAVLADMNRIFKEAEKAYSDYYKQYGFMVDLYKDVKRIVDTNDIDVSGGNVLDEDMDTLRQLFETSLMKYDRSMKALDRAKNEIMRFKGQTADTLVEMGVFEMANTIRQDVQVPDTYSQAKELLANLLQIIEFIKLEKERVEKGIEDMVAIKENFENQCVQRCMDVKTELEKLPKLSRITVGDDVIKMVDLTIPYVKDEFVKQRMSDYIDDIVKGADAYEDERKRIKYIRDCLGLKKLFGVMVTDMNAIKLNLYKRERIKEQSRYLRYEEAVGSTGQSQGIYIQFLVAVINYIAGMYSLAPEESIQSKTIFIDNPFGAAKDIYIWEPIFAMLAANHVQLIVPARGATPAITGRFDVNYILGQQMVGGKQQTVVVDYTSKTDQEELEYQELSYEQATFDFI

SEQ ID NO: 40886 - protein, 527 aa, Bacteroides pectinophilus CAG:437
MAQANVLQNDIVHEHRVRMLNLKKYYPFFKLTEISFENFRQGQYADLDMGYIVMAVLRFFIEENNFKEKDVTYPEYVEFIGQCIRRDFVLNVTDEECRDIADYVFDKIKNDGKPFEFGYYDPVDRKHKVSRMKLIDSSIRNNTVWYSISPDAIEFYLDTKEIKDESRISVQQLLLEKMIKSQDFGRGTQVVGRINDEVERLMLERREVERLLATDVFAGLEAYRDFTDNGMQWFDDEQRLFVKNKELIDAAIAKMESTPAHAGDGYRRAVDEIYELDDQLKMAMSRHGELLRACMDLQKLTDNVIHRNKLSRLRIHCDYRQLLEQMVRSDTTRPLEMMIGAMLRPKTSKMFDFGIIDECLTQRTQKQDIVEEDTPGTQEDIIFADEAEDERISHNYIFFMRSIIRLLEEKQEFTLSWYNAWLKDRYKEKADNILANADYYSFLVNLCQKRRYVIGGPDDTEESFLDGILKEGLAADGAAGVNGNPYVIEIEMADGEVEVGKEAVVSELIFRLARTQDNGGSDGTEES

SEQ ID NO: 40887 - protein, 238 aa, Bacteroides pectinophilus CAG:437
MEQRNLDKALDIVSKLLIGEEISEKGSNAALYQEYNNNGEVYDIVHMSLKKMNIHMYEYANGLYVSAGENNRAFGYSNEELRREIGIRNNRELYLAYFIIYNVLTFFYQSSDSTAYSEFVRVEDIISGTDAAVTGIADRREAIVLNEIEENSFRQIALSWDGLPVVSVEDSQGLRAARNSKTGFVKLVMNFLVRQELFVQADTRYYPKDRFRALAQNYFEEYKGRLLEVMREEEDATD

SEQ ID NO: 40888 - protein, 1503 aa, Bacteroides pectinophilus CAG:437
MPQINRIRVNNVKYNFGTQYYDDFMMRFSGKNTLYDLANGGGKSLLMLLLMQNMIPNCTLDDKQPIEKLFRGDSGNTTIHSLIEWNLDPCYRKDNYKYMLTGFCARKARNTSSEQPAVSDGYDTDGTGTSQASSVSAASQAVSANDQASVEYFNYVIFYREFGDNDIRNLPLSKDGKKVTYQELKDYLRDLEKKDFGVSVKIFDRKGDYQNFISGYGIYESEWEIVRGINKTEGHVRTYFETNYRTSRKVVEDLLIEEIIQKSFHNITGNGNDDDRMARTLLDIKDKLVELSRKHAIMDEYDMQIQAIDEFTQGLSDFESIYRNKNENSARLVRMLAAARKKSDETAAEEQSAAEAIERIQIETDREHRLIDTAEIIEQKNSMKEVGELLRQSEQERSSAVQASESLRLELTLKECIADYREYLEYKRQFDEITQIIDNRLRDHEDIAAELRNLASYKKSADDIRRHELLSGMTEAKALLANEENVSNTAADALKAAESGISKALGRSEYLKNEITSDENAISGMLGADTVLVAENASDELAGVNDEAAACRMHMRELEEKLASVKTQIDMCRTKLDRTDTLIEVNGQQAEKLEQELVAGKHADELFDKLCNVYSQKTPEGLARAVSAALKETESQFDKSMRRRSDLEVYAESLKNGVYVCRDEQYDKVWDYLQKQYGEDAMQGSRWYAGLKQGQKRDVIKRVPFIHNGFIIKNDFERVRADTVLGSFNGAYAVPVISENVLYDMKLEVNNELVTFASRDMSFLTEPSGIDNEIKKCSEEIAELDDVIARLSDRRDVIREDYDFAVREAVKRSDYNDSPAVRLEKLKAEAVQLAETRTELIGRLENLNTSKASLTREYDDESQREAHDLKRAEFLQKITELFDRAVGHRAEVKQLEGMIQEYSSRKQKAGADLSASQERAGAYRSKIASVQSALERMDVQWTAFAPYYSEDYEAGSDNTVNAQQFSDQDLESRFAALRSIIEQDTSDITDKEKLKNHLAASMDKCCRMIEYRRMSVDDVRKALDDDSMADSSNDALMSIRDRLAEYDGQIASITQTIESQSALYNRLDGSIAHGIYQIEEKYGSYEEFECANTAAFKEQHTALVAKMRENKARLSDRQKETVKQHTKLEVMVKDMERIIRAAGIDEADADVTGADENVALENYMDYENVQKELERILVRLEKRKDTFAKQKAELTDRLRRLEAADLADEFTRSLDAPADAKQCEELAGQLKETNEYIALERDNVAKSTEDMERIKESFENRCLQTCSNIKTELDRLPQLSTITLDGKLISIIDLQIPYVKEESYKERMSAYIDETVTAAESFRDAAQRLQYIRNRLTWKRLFSVIVTDMDAIRVNLYKRERIGDQSRFLKYEEAVGSTGQSQGIYIQFLIAVINYISNINAATHGAAVTGKVIFIDNPFGAAKDIYIWEPIFKLLKTNHVQLIVPARGATPAITGRFDVNYILGQKMAGRIQQTVVVDYQSNIERENLEYTRIEYEQQTLDLL

SEQ ID NO: 40889 - protein, 509 aa, Eubacterium eligens CAG:72
MKNTMAENMTGDIISDHRERMLNLKKYYPFFRLIDTSFSNFKDGKYEILDMGYIVMAVLRFFIEENNFKEKDVTYPEYLDFLRLILKRDFGLDLNEQDSKEIADYIFDKIKNDGRPFEFSYFDPVDRKKRVSRMKIIESSIRDNTVWYSISPDAIEFYLDTKEIKDESRISVSQLLLEKMINSQNFRGGVEVVERINEEVNRLKLKKNEVLTILSGDVFAGIEAYEEFVKTGMKWFDDEEKLFKKNRDLIAKSIEKLNASGSTGEGYYRTMNEIYSLETQLKQAMNRHSELLKDCTEMQKMTDDAVRRAKLGRLRSHMDFTSALSDMIKRDNADILVTMLSPLLKPNIRKTFDLISIDDALMVKPPRYEEKELISNERPEDIEFADEIEEKRIKDNYVFLMKNLIVCLKKSDIITLGQFADAMKRAYGEQILRNADFFSFFVNLCQKDEYQLGGNAGEDTFLDAYLGEGFKDTESFTFAIRKGLGGQVILSDNCMMADVELVRKEAHGE

SEQ ID NO: 40890 - protein, 238 aa, Eubacterium eligens CAG:72; identical to SEQ ID NO: 40523

SEQ ID NO: 40891 - protein, 1477 aa, Eubacterium eligens CAG:72
MPQINRIRVNNVKYNFGTQVYDDFVMRFNCQNTIYDLANGGGKSLLMLLLMQNMLPNCTLDDKQPIEKLFRQGSGNTCIHSLVEWKLDPCYQKDGFRFMTTGFCARKGRGTDDENQDGQEQTAAPTASVEYFNYCIFYREFGDNDIKNLPLVSNGERITYNGLKAYLRDLEKGGYKYVVKIFDRKGDYQSFISNYGIYESAWEIVRGINKTEGHVRTYFESNYKTSRKVVEDLLIEEIIQKSFNNKLSVDNDEGMMAQTLMDIKDKLVELSKKHSQLGAYDSQIAAIDSFKEYLSTYEAFYNRKEEIEKQLYDLLLVAMRESDKKDKELKSQDDLITKMYDELAHEKEAIAVAEVMSEKNSMAGVESLVNETRKALELKNAAIEEARGKLSLMESAGDYKDYAEYEKSYKGLQIAIDNRLREDTDITAELKILAAGYRKFYETETRRLKEKLDIAANRVKALEVRLSESKDNLRNADKEAAGLGSLSDNLENEIQELQAQLGASLSEAGTVVCENASEEYDKSFRDKELLKNEETRMSEKFNDVQQQLMSLNETISANKALIDIFTEQSEKLEKADEAGNADNERMGKIREIYSADNDEAMLSVILETYQKMRSEFTEEYKAAQELDSFIDNARKGTYICKSSERDRLKEYLESQYGSDVVEGHEWFAALNAGQKRDVLKRTPFVEYAFIIKNDFERIKADEMLKDFGKGAAAYPVISEQVLIDTKLEINKDLIVFALKDMSFLRDEAKLETQIKLAQEELESHKAQAGKLADRMELVWNDYTFALVYNAASGKVDASEAEAIRLKIADSEAAIIEAEKKRSVLNEVKEQLSRNLAQTRDDIEEKETACSLLSRIMEMNTSIDKKYERLKGLKADVDSARNRIYECEEAAASANSEYDTARDFEDSTRKAYDEIIKSWEEQYAPYYDENVSIEIDDDTYRLDKDEIESRFTGLKTALSQKNSDFADKQALMNHLSASMNKCRDAIEYRGYTFDDIKAKYEAGEIMAAGSQQLRNAKDALNNLVKSSDSVREELESQEALLNRLEGSIAHGINQIENNYGSFNEFPCDDPDEFLTQHKVLIKKLEDNTKVQEKTRRQMSDSLKDILVCRKDLERIVSDAGMHVPEEFRPEDAQGITANLTEYEAVHKEYASITRLEYKKVDEFNKNKSKLIDLLNGFNAVELADEVRISLNVPENVAKTRSMIESLNETNTFIQLEKDRIAKGIEDMQMIKDNFENRCIQTCSNIKTELDRLPQLSNINLDGEQIAIISLQIPYIKEELYKEKMSEYIDETVFMAESFKEPAERLKYIRNRLSWKRLFSVIVTDMNSIRINLYKRERIKDQSRYLRYEEAVGSTGQSQGIYIQFLIAIINYISNMNSSGNEGVEGKTIFIDNPFGAAKDIYIWEPIFKLLATNHVQLIVPARGATPAITGRFDVNYILGQKLVDSRQQTVVVDYYSSTKESELEYTRMDYEQATFDFL

SEQ ID NO: 40892 - protein, 536 aa, Phascolarctobacterium succinatutens CAG:287
MQYDFLKDFTRRMKCVGLYALLYDNSSQKYIWKERGFNTLDEQLNVIFSVMLYIMEQSLKEESCTIDNITVFLDSLNEKYYKKSMSYAECSDLAKFIVNVVLSNEGRPMYFGGYDYEQQEMKKLHISYVNNRIIYDEQDVRRTSYYLTDDGYNLLLGTLEVESNLKLTIQEMIFKLHLEKQSYDKALDDVKNIFNLMRIQLQKIQAAMLRIRRNALEYSVSEYSELLYDNLQTIDQSKKKFKGHRDVVQARVEDLEKQNISLDSLPPDDVAKLRNLREIDNYLGRAIDEYQKILNNHFDLKALYTAELEKVSQMSLVQRFNLRADFYEKLLTKPECLQNLDIFLHPLFNKEPEKAVNPNLFLELQRVRLLETEWEEEATESFDVEAWEAEQKKLLEERLAQYEASLTVILKYTISKDQLRLSELIKQLNQDERERLVPNIAVFKEIMVELLKVQEIDIDSMRIERAEFIQEETKDFRLQSMLLDILDKRAQWQRVKKLIVHRLPEDNPVLLKQLDENTGVLKNIRCSDVMLKAVWE

SEQ ID NO: 40893 - protein, 240 aa, Phascolarctobacterium succinatutens CAG:287
MAYQIEIIKQSQKIFYYLLEHHELREKKAPELHKAYIEQDEVQTLVKSQADAADSHVEAYGGVIYLIPGQENNFLGYSKGQLKKELCRSNATDKDYYLVQFVILVLLLEFYDGQGSSSKTRDFILLGDLQNSVTDKLKEGAARYSEDEQAQNGMAFTAMREAYESLRSDEKRNRQKTTKEGFMFSILHFLQEQGLIDYIEQDEMIKTTRKLDHFMDWNLLNKNNFERVQRILGAEENEQD

SEQ ID NO: 40894 - protein, 1474 aa, Phascolarctobacterium succinatutens CAG:287
MSKINAIRLVNVNYNHNSIHISDETLHFNGRSTLISLQNGGGKSVLVQLLTAPFVQKRYRNLNERSFASYFTTSKPSFIMVEWLLEDDAGYCLTGMMVHKSQNMDNDEELELINFISEYTEPCEQDINHLPVVESDKKELRIKSFNACHKMFDDFKKERINRFFCYDMNNSAQSRQYFAKLTEYGIDYREWQNIIKKINEEESGLSKLFAECKDEKGLVEKWFLDAVENKLNKGNNRMQEFRNILEKYITTYNENSNKIQQQEKLIAFQQEATPILTFGKEYEASSATVAVKLNKIYECLAELNRFAAKNETEIAVCNAELDALGKQLVHLLHEEFSSNFYYAEDKKEALIVLKEDNEQQSSQLEEQSQLWERRRHILDCAELQERLNEDLLELQMVEQRVTVSRKKNKDLEPEREYIGYLLKEYIEQELQKMQERFQQEESDKKACLDLQKQAKQELSELISRLNELHTTQGRLQGLVQAYDDAEESYNKKWEPGAAGLQRNMLGEYDAGALKVMAEKLVADEQEASDRQKQQQQNLSGLKTAFSDLERSLQNCSKERGSKEQLVVERTQVKKQLDEQLAKRKTLLQYLQLDEKYLFDKEYIQKELSKKLLEMDEARTKLLHKLDTVQKKYQELQTGKTVELSTELVQMLERLGINIVYGMEWLKNNKNSEELNLELVKQHPFLPYALIMTGKEIEDLQRAEKNIYTSLPVPIILRESLTQATQIKVDNGVLKSADVNFFMLFNDNLLNEEKLQRLLAELKAKLQKIEQELQQRKAEYDLYSAKYSELVEQSLTKESYERLKDELLSLQEAIVKLQKREEQCQAEKADNLLTQENISQDLAKIGQMIEKLKLHQEALQQLTVKYQQYLLDNKQLYECNNTLANAENAKQSLDDKLEKLQNKLEWQIKYLADLSGNMKALDDEMAQYAGYKQVPKPKNFADDIAQNTESLKARLNSIKEKLSGELRALEDNRANLARKVKKVEQKLQDRANRFGLESKEWVNERYSEAKMQELDAKQKQLTQDKKKLGEARIDIEKRLTQVQGEQNNILRQMEEKCHAVEPLPKDEVVEKNFSEEKNMLQYKRTLKEELQKSLGEQEQNIRENIVGLAEYSEGATNVEWCESFNLEDFSQEELSSYTLSLRKEYKTAQVQEDEAKRKLEQALIRLRNVEAFQEDSYKKCIDMLQELTSDAQIFVKQLNAVLESYVRISEKLQVDIAIVKQEKEQIITQLEDYLKEVHKQLGYIDRNSSIQIRGHYVKMLKLQLPDWEESANIYHRSITDLVDTIAEKGLAKLSKGEPLTELLGKLLTTKELFDAVVGINNVHVQMFKVEAQREIQISWRDVARNSGGEGFLSAFVILSSLLYYMRRDDADVYADRNEGKVLMMDNPFAQTNAAHLLTPLMEMAAKNNTQLISFTGLGGESIYNCYDNIYVLNLISSKLSNISYLKSKHIAGNDGEFLSLARVEVTDEGQMDSLF

SEQ ID NO: 40895 - protein, 327 aa, Phascolarctobacterium succinatutens CAG:287
MKKRRTLEEILGSKINAEYSEQHAYIMELVGSGRIKPVLASKKNGKKPSLYREYWELEEKQDYSALKQELLFNLAPQINITYYQNNLVAYNKERKDVLQLSSFLQNSAALLTKQVSYNERSFQIWQREKFLLQGTGKKILSHCGLELAKLNCYSTAEPFAYFAATRAVPQKLLIIENKDTFFSMRKHLLAGNNQLLGENISTVIYGAGKRVVSYFQEFNASAEPYMLADGNELLYFGDLDYEGIGIYETLAESFAEQGEIKPFIPAYLAMLAMADNYKQLPPTKKDQNRNLQGAFFRYFPVNAQSQMQSILQQDLYIPQEILTISDF

SEQ ID NO: 40896 - protein, 531 aa, Clostridium sp. CAG:230
MEYDFLQQFAKRMNSVGMYAMLMKNSWQKTTWKTFDIESVEEQLNIIFSVLLYMMEQSLEEEICTIDDIAAYLDDICNHFFRKRYSFEQSNALADFIVNVVLSDEGRAMYFPCFNFEKKEYIDTHISYIENRVVYLEDQTKRTSYKLTDQGYNLILSTLEMEGNMKLSVHEMIFRMHLERSTYDRALEEIKHIFNLLQIRLQKNEEALNRIRRNALEYSVAEYQKLLEENLETIEHTQDEFEGFAKLVRKRTLELEQANINVKVLGKEDAKKLSDLQKIERYLQDALAKHQKILGMHFDLKELYTRELEQLSQMAMIKRFSLRKELFDKVVEHPGRLTNLEYFLRPLFIQDPKKIYNLNRCLEPQKVIRKEKEEETQELIEFDAKEFEAEKERKAKKRLQKYKESLQMMLELAYIKKTITLKEIAGREAAIQNKIVCEVGIFKEIMVELIRNKEIDLVALQQEKKESFDDNSLQFHLQEMIYEIIKEQGWSATDIIVERMEPQETVTFENVSDRENALTTIRCSNVSITIA

SEQ ID NO: 40897 - protein, 241 aa, Clostridium sp. CAG:230
MAYEMEEIQQSQEIFYLLLKEHEIKEENEKELFRVYTQNNHVMNLVKSQATAAESLVERYGDVIYLIPKEENEYLGFTKQELKAQLCRSNATDKDYYLSQFVILVLLTEFYDGQGSSSKSREYMKVGELLNLVSDYLVEAGENMEPEEEEKTGLAFINMLEAYSALRSDEHGSKARTTKEGFVYHVLQFLQKQGLIHYVERDEMIMTTKKLDRFMDWNLLNQNHYDRVQKVLAVWKEDDNE

SEQ ID NO: 40898 - protein, 1470 aa, Clostridium sp. CAG:230
MSKINAIRLINLNYNNDSIRIADETFRMNGENTLLSLRNGGGKTVLVQMMTAPFVHKRYRDTKDRPFESYFQTNKPTFILVEWELDAKEGYVLTGMMVRKNQNVSELQNPEKLEIIQFISYYRENCERDLYHFPVIDKKEDHMTLKGFVQCKKLFENYKKEFPTEFFAYDMSQPARTRQYFDQLHQYGIHYKEWEGIIKKINLKESGLSELFADCKEEKGLVEKWFLDAIENKLNKETNRVREFQTLMMKYIRQYRENQTKIERLENVSSFQKEASALQQDAKEYLSMTKSRYDKEDRLTAFYRELVGLCQKVQEQEKQTFSQMDALKERSTQVLYEQISYDIYRQQDLLLDHERQKEALQKEQEQLFTEQRKVQKEKAISDAYELFKEQKDAREDIKTFSSHLEFSNKDRTQKDAERERLGAILAAQYLALAQKKETELEQQKKEYSTDVEKEKELTHMTEEAKKEQQSIQLEIAKCNEAIRSFDTAEEQFAKQYDKALVRNILGEYSEQAVRQMQEEIAQKKQDKKQKRLLVLQQKNQTEEAFYHTSRALEDLRSRQLDLFKQIERAAAKREDIEQEYQSRADILQHLELSESAFYDTGLLLDEIQKKIDKTAAVKRNLEREKEVLLQGKENLKTGVTTTLSQEFVSFLEQQEIPVVYAAQWIEQNISDSKKKKELFAQNPFLPYALLMKKEEVQKLALAGEKRMLAFPLPIVEWEKLEQYRFSTQKGLTTIDSIHFYTFFEDVILTKEEREEKEKSYDKRIKKIQEKWTIRNEEYEKYLAQKDMIGKQTLEADSLKRVQKEWQQLKKKEEALQGEEHLLNKKSNTLFEEQKAKQEELLETQKELQLAMQQEEALQEWLAAYKSYQKQREKKDTLSERLNLSSQQNSEQQKELLSLREQCKEEEQAIFLQELSLEKLQKEKEKYSSYQNDKETEEVTLLSEDVLAECKAGFEALGMDSHQEKAMLEEQLAKAKIRLERHSKALEKLLKKHHLTKEEVQENYRPSFVKKMEAKQEELSKKENVLVQNLQTEVAQIAVAKSRISDLKEKLHLKCNQTEPLPKEKVGSSNFEQRKEENRQEYILLDRKKEELQRRRLSYENSIQSLADFKDKKMRQECTFKEDFLTMEIRQTEDFRSALWKEYMQSMKKEQESRDQITKQLHLLLCTKEFMDDFFAKPLHALSSLTLDASAFLRQLEMIIESYESLSEKLKIDIAMIQKEREHLAGLLLEYVKNIHQNLGKIDRNSTITIHGKEIKMLKIHLPDWKQNEEAYRINLEDLVTTVTQKGLALLDKNENLEEMTGVYINTNNLYDTVVGTGNVEILLYKIEEQKEYQISWSDVAKNSGGEGFLSAFIILSSLLQYMRWDDTDLFANRNEGKVLVMDNPFAQTNAKHLLKPLMDMAKKTNTQLICLSGLGGDSIYSCFDNIYVLNLITANFGKSMQYLKGDHMRGAEPSTMIASRIQVEQQSLLF

SEQ ID NO: 40899 - protein, 522 aa, Firmicutes bacterium CAG:882
MPQENILVNDIISDHRERMLNLKKYYPFFKLSEVSFSWYKEGIYDSLDMGYILMAVLRFFIEENNFKERDVTYAEYAEFMNRCIRRDFKLNPPQGDMSILVDYIFDKLKNDGKPFVFHYFDPVDRKKKISRVRLIESRIENGSVWYSISAEGIEFYLDTKEIRDESRISVEQLLLEKMIQSKDFKGGTDVVRRINKEVDRLWVKKNQVMALLSADVFTGLEAYEEFFGTGIRWFDEEQKLFVKNSELIDAAQRKAESDKGNDDYGSYLKITGEIYQLDTELKIAMNNHLKLLSACTQLGIMADEMVKKAKLGRLRPSFDFRNALELAMKKDDMELLGNLVRPVMGLKLIKTFPIERIGDMITYRPEREEQAERIENPAVENIVYDDELEDARIRDNYAALIKMLLAMLRRRDSFDLRTFNEFAVKVLGDTLFENGDYYSFLVHLCQKKEYVFETDRQSMETFLDEIFRDCAAKDEYAEYLGTHFSIEPAGGDEIEISANSQDNALPFTITNIIFRNIHDSEI

SEQ ID NO: 40900 - protein, 242 aa, Firmicutes bacterium CAG:882
MEDRSLEKALEIAATLIRGEAVSSGENIALYEEYSSNSQVYDALRLILKKFDMELYEYNNALFVSAGENNRCFGFTNEELRRALGVKVNKELFLCYLITYCAMTEFYKTSGNYTYTEFVRHEEVIRAVDNVLANVIDRSAGLVLDEVEENSFKTLALLWDELPVTSTDDIQGQRAARNSKTGYVKLTFNFLVSQGLFIENQSKYYPTDRFKAMAENYYSNNRGRLYEILTGDNEEEEENAAD

SEQ ID NO: 40901 - protein, 1474 aa, Firmicutes bacterium CAG:882
MPQINRIRVNNIKYNFGTQYYDDFLMRFSCKNTIYDLANGGGKSVLMLLLLQTMLPNCTLDEKQPVEKLFATAGGSTTIHSLVEWKLDSCDVKNGYKYMTCGFCARKGRAGEDEEETQKGAGIEYFNYCIFYREFGDNDIKNLPLSSGGERITYNGLKAYLRDLEKKDFGVKVKLFERKGDYLSFINEYGIYESHWELVRGINKTEGHVRTYFESNYKTTRKVVEDLLIEEIIEKSYNNRIRGGNGDDEMARTLLEIKDKLLELARRREDIDNYEKELALLNEFSAKVNDFGGVFARKEAGKNTLFKYLFMAGAQVAKKENDAARLSEKLSGLKSARENEERLIAASLIAEEEAGLKEVRELVDSLSEKNDAMSAEYEKKREELEMSYAAEDYADYVNQETELLRLKEYMDNRHKDRSQITDEMRRLAGAKHLYMAQELADSEKSLNDLLGRERESREALENLNENFRIKDNECARAEGIIVSLKKQVEELEDDIKEKLSRTPLLVVENAAQEACEYAERTDELKNKLAALSEEEAQLNAKKESCIRERAQTDASLELTAQNLDRISERLSAARQRENELTALGKVYGEPNHEKLTAVLGHFYDNMLAQREQLKKKTDSVREYISSIENLKPADSKGVQKLCGYLQSRYEGSIISGAEYLRNKNSDECAELAGRYPYLPYSVLVGDDYGNICRDKNVMTMDCGVVPIIKLDAVEGTTDAHDADAYMLACRDLSFIYDEAGRMSGIRKASEELEQAVQELTKLEDRLAVVRTDYERVSGYACTAGENAAELEGLLGREKHNEGGLRDKADNLRELYDTLEGREKELCERRIRLEEQLAENLRIKENLDDLAELNRSLAECHLEITGNEAVKDAAVKARKLSRELHDGRERAYNELIQRRTGIQKNIENLKNTWAMYEPYYKEADDAVEMKLVPSAEIDARFMALRSLLNEELGDITDKERLMENCRTAMDKAVRSMLHRGITLEKAKELAAQGGLQVKNHEDILIITEEQDKLKQSIRDVQSELDSASAQMNRIEGSCAHARKNYEEHYGTLDAELPDNPREYTRQHQAELERLKKELSDIQAEEKKNLQEHTACLLMQKDLERIVKSVTPDADDIIKKKSAEYAESDLSEELTDAKYEEAGRSFEAVLKDEQKKRTAFLRARDLLVDRLTMLKAYELAQEIKQNIQPPQSQAEADELSDALRGTAGCIVLERDRISRGIEDMELIKSNFENRCVQICTNIRSELERLDKLSRITLDDEVIPVLSLQIPYIKEEMYKDRMSVYINETVSSAENFKTIDERLKYIRGRLSWKRLFSVIVTDMNSIRLNLYKRERIKDQSRYLRYEEAVGSTGQSQGIYIQFLVSIINYIASINAGGKEAAVLGKTIFIDNPFGAAKDVYIWEPIFKLLKTNHVQLIVPARGATPAITGRFDVNYVLGQKLVDKKQQTVVVDYHSQVAEQELEYERLSFSQESFDFL

SEQ ID NO: 40902 - protein, 538 aa, Eubacterium hallii CAG:12
MQYEFLKKFPRRMKNVGLYAVIIQNSSQKLSWKQYGFTKFDEQINLLFEVLLYIMEQSLKEEKCTMDDIATYIDTINVQYLRKDISYEQCHQLGDFIVNTVLSNEGRPMYFGGYDFEKNEYEEMHISYVANKIVYVENEVRRTSYYLTDDGYNLLLSTLEIEDNMKFNIHEIIFRLHLEKQSYDKAVNDIKNVFNLMRIQFQRVQEAMRQIRRNALSYSVDEYEEVLVGNLNTITDTKKKFQEYKTVIQERVKDLEEENINIRKLSKKEQQDLNNLRVIEEYLTRVLDEHQKILNSHFDLKILYTEELERLSQARLIQRFSMRRDLYDKVLKQADTLKNMDMFLRPLFNRNPEKIYNLNKAFSYEKSVNAGMEKDTEEEVDFDEEAFRREKEEKLQKKLLVYEKSLQYLLEKASVTGEVSLGQLKDRLDIYPEEKEIFIPNVDVFKEIMVELIRNRTIDIATLKKERREYIQEQPDGFQLNEMILKLVEEQPENNDITSIEVERLENEEAITFSEIKDEENRRKTIRCSNVLIRIFRK

SEQ ID NO: 40903 - protein, 243 aa, Eubacterium hallii CAG:12; identical to SEQ ID NO: 40566

SEQ ID NO: 40904 - protein, 1489 aa, Eubacterium hallii CAG:12
MSKINAVRFINLNYNNNAMKINDECMQFSGKSTLLSLRNGGGKTVLVQMMTAPFVHRGKQKTKDRPFESYFTTAKPSFILVEWLLDGGAGYVLTGLMVRKNQEISEEKTDALEMMAIISEYKEPCMQDIHHLPVVEQNEKTMKLKSYNSCRKLFEDYKKDKKLSFFCYDMSSPAQSRQYFYKLMEYQINYKEWETIIRKVNVKESGLSELFSDCRTEKELVEKWFLEAVESKLNKEENKVKNFQEILEKYAGKYKNIKEQLKRRDAIQKFKEAAEEIQINAEDFLVKEGEKIEQEKVIAAFIARLNVLYEEAEIERERQEEGRKKLQEELEFLKYEQLSCEFHEKNREKRNHASNREMIDLEKESLLRKQEKIQKKVHVFLCAKQQEMVNEDKQEWEIRKEKAAISRTKEENLEPERNRIGGQLSGYYEYRLSDNKEKQEAIKKQKLQIRKDISQQKDILNEYREKTKKITESKGSFRSLVRGYDNIEIKYNSNYRENLSRNILGVYEAGMLDIKQEMYDKEQKKSIQENKEQKEKFENTTEEIHRTERAIEEKREKYFQKDSDIKQAEKEKKGYEQELEERKDILKYLELPEEKLFAREEILHKAKIKMQELSSRRRTLEKKEDALQKEYKLLVSGRVMELPDNLKEEFEKLDVPVVYGMEWLKKNGFTEKKNKEIVSQNPFLPYALILTRQELKKLAERNGETYTSFPVPIIERENLESIKLDRTQSFVKMQDIHFYILFNENLLDEEKMEIMIEQKQKDIADIRETMQICKNEYEDYFHRFDVIKRQAVTKENWDKIQKKLQKLEKEKEDIFQNIQQARDTKQSLKKNFEILQKTLRELEKKIESQAARQRAFKELRTAYAEYEENNKKLQEYEREEERLENRQHLTEEKISQLEENYRELSGQENSLFREEESIQNSCQKFAAYKEINRNVKAGKLLGVDSTLRTDNNSGVKIIPSEAEVLKLEARYEAVTADISQELKELELEEEKALTRYHKSFGELRELCQKYNLKNSEWQNIIYDKREQLYQEAELEDYDKKIERKANLLNEEDKKIGILNSQLEGILKQIVSECGKGDPLEEEKISQKDLESAKNQTKYQLSELERKIAFSEKAIQKYRENLTALSEYNNFSADEEIHFEQDFKKMSEKELRDFKGMLIRDYNDIIRCVQKCRETLAQTLNKIARQEAFQDASYKTPLENMLKVCDNAAKVLRQLNITLESYDSLMKQLEVDISLVETEKKNVTELLEDYVQNIHKNLEKIGRNSTIKIREKSIKMLKVILPVWEDNEKLYSLRLSDLVDEITEEGIRLFENNENAQEYIGRKVTSKNLYDTVVGTGNVQIQLYKIEEQREQQISWNQVAKNSGGEGFLSAFVILSSLLDYMRKDDSDIFMDKNEGKVLLMDNPFAQTNAEHLLKPLMNLADKTNTQLICLTGLGGESIYNRFDNIYVLNLIEAHLRNGIQYLRPEHKKGEEVKVETILPTHIEVEEMLF

SEQ ID NO: 40905 - protein, 326 aa, Eubacterium hallii CAG:12; identical to SEQ ID NO: 40568

SEQ ID NO: 40906 - protein, 515 aa, Eubacterium sp. CAG:248
MAGSMIGEIITDHRERMLNLKKYYPFFRLMDASFDQYKDGKYCALDMGYILMAVLRFFIEENNFKEKDITYNEYLDFFKLLVKRDFGLELSDEECREAADYVFDKIKNEGRPFEFRYYDPVEHKKRVSRMKLIESTIRDNSVWYSISSDAVEFYLDTKEIKDESRISVSQLLLEKMINSNNFKGGVEVVERINEEVGRLKLRKAEVMEVLSQDVNAGIDAYEDFVSTGMKWFNDEEKLFKKNKELIDKAISRLEGFSSGTDSYYRTMKEIHYLEDQLKIAMNRHAELLRDCTQMQNTTDEAVRRAKLSRLRLHMDFSTALSDMIKKDNAEALKYLIDPLFKLNIKKTIDLRTIDEALMVKPEKYEKKEYVNDKEPEKIVYEDEVEDERIRHNYIFIMTNLLTCIDKVCLKKSDILTLDEFGEYMSRAYGDTILKNADYYAFFVNLCQRDEYVIGGDDMHSETFLDGILEEGFGGKEVRHFKIIKGGTLPESEQADSEYMQVTNVAFMKAYDDALS

SEQ ID NO: 40907 - protein, 234 aa, Eubacterium sp. CAG:248
MENRNLDKALDIVSKLIMSEQISESKDNSQLYQEYNTNAEVYDIVHMSLKKFNLNIYEYNNSLYVSAGDNNKVFGYTNEELRNKLGLRVNRELYLVYFIIYNIITEFYTDSASTTYAEFVRVEDIVKNVDSSVSAIIDKKLGMIIDDVEENSFKQIALSWDALPVITVADTADVRAAKNSKTGFVKIALNFCVSQELLMEAQNRFYPTDRFKALIENYFDGYKGRMAELMQEQS

SEQ ID NO: 40908 - protein, 1504 aa, Eubacterium sp. CAG:248
MPQINRVRVNNVKYNFGTQFYDDFMMRFNCRNTIYDLANGGGKSLLMLLLMQNMIPNCTLDEKQPIEKLFRKGSGNTCIHSLVEWKLDSHCQRDGYRYMTTGFCARKARSAEEREDAQDKEAYMAADTDTGNMTARSSTASDNTSIEYFNYCIFYKKFGPDDIKNLPLVHNGERVTYNGLKAYLRDVTKEDKDIEVHIFDRKGDYQSFISKYGIYESAWEIVRGINKTEGHVRTYFETNYRTSRKVVEDLLIEEIIQKSYNNRLSVENDDSMMAKTLLDIKDKLIELSRKNSQISSYDNQMEVLERFKEYADTYTEFYKNKKNKEEDLYSMLASAVHMATDKQSELEAHDERNTDLVNRLEDKKKSIAVAKVLSEKKSLKDVEGLVKKSKELLSQKQSRIAAVKKRLMLMESANDYYDYIEYEKELLKVDTALDNRMREDEDITSELERLAGVYRIYYEKHVGELEDMTHAAAEDEKQAYDILAEAKDNHRNAEKDCAVVLGLRDNMQEKISRDEIRQQELCRQYGVLVADTALSELEKCNNHISDISGDIHSVKSGLEEDTKQIYKVQEQINLLKTKKVMLQENISRMDEQSQLLRDNADRLADIEKVYGVRLADDLDEAVLKAYTKINTEYNEKSREYDKLNQYIEALNSGSYYMDSPDRRAFKDYLYNTYGTDVIEGHVWVSQLDDVQRENVLKRIPFVEYSFIIKNDFDRVKNNNVLNTFGRGTQIYPVISEKVLDSQQAAIDKDMMVFALKDMSFLRDDTKRRLEIKTAKEELDNLNEDMQKLEGRKQIVWEDYTFVVKYEAISGNTHTKAVENVRQELDQVIEQLSQVDGSIDIYKEKKAEDANKLENLKKQLDSALGQAEGLKKISDLYAEISEERNSLKAYNDKLAKAERAIIGYAAQLDKSREEYLRINEYKDNVDKKYTELVYNWENIFSKYYVQDDTPADGNKKPDTTEYDEENIREITGRFAGLKDILMNKNADLTDKEALKSHLEASMKKCIDSIIYRGEEPEKLKELYLQGKISVSSQEKLHEISDELTELNKQYNDSDRELGMQEAMLNRLEGSVSYAISQIEERYGTYEEFECDDPDGYVKNNTVITRELEDDIKKEAAAGKKLENELKDIQVCRKDIERIMSGAGINIPDEEILKKTDIKYRDYNNLNKEYEQTAKEYSAILKLEYKKTDEFVKYKSKLIDSLKSYNAEDLAVQISMSLNMPKDEQQTSALIASLDETNSYIELEKTRVHKGIEDMERIKDNFENRCIQTCSNIRTELERLPKLSHIKMDKEDISIIGLNIPYVKESVYKERMSEYIDETIEAAESFKDPEERFRYIRNRLTWKRLFSVIVTDMNSIRINLYKRERIKDQSRYLRYEEAVGSTGQSQGIYIQFLIAIINYISNINTVMDGGIVGNTIFIDNPFGAAKDIYIWEPIFKLLKANHIQLIVPARGATPAITARFDVNYILGQKMADNRQQTVVVDYYSNVKQQELEYTRMNYEQASFDFL

SEQ ID NO: 40909 - protein, 561 aa, Eubacterium sp. CAG:252
MADSMIGEIITDHRERMINLKKYYPFFRLMDVSFEQYKDGKYSALDMGYILMAVLRFFIEENNFREKDVTYKEYLDFFKMLVKRDFGLVLSDEEYVEVADYVFDKIKNDGRPFEFKYYDPVEHKKRVSRMKLVESTIREDMVWYSISADAVEFYLDTKEIKDESRINVSQLLLEKMINSNNFRGGVEVVERINEEVGRLRLRKTEVMETLAQDVCAGVEAYEDFVNTGMKWFNDEEKLFRKNKELIDKAISRLEGSPSGTDSYYRTMKEIHHLEDQLKIAMNKHAQLLRDCTQMQNTTDEAVRRAKLARLRPHMDFATALSDMIRKDNADALKYLIDPLLKLNIRKTLDLKTIDEALMVKPERYEKKEYVNKNELKQIVYEDEAVDERIKHNYTFVMNNLLMCIDKVCLKKSDMLTLDTFSGYMRRAYGDAILKNADYYAFFVNLCQRDEYVVGGDNMHSETFLDGILEESFKGKEVRHILIVRGESDREDGALGDAPEDADAVQNIAVSSDISEDIYNTDGTQNISVYNNKSDGTQNIENIQRTALDDIQVTNIAFKKVF

SEQ ID NO: 40910 - protein, 232 aa, Eubacterium sp. CAG:252
MENRNLDKALDIVSRLIMGEQVSESGDNSQLYQEYNTNAEVYDIVHMSLKKFNLNIYEYNNGLYVSAGDNNRVFGYTNEELRNRLGLRVNRELYLVYFIIYNIITEFYTDSASTTYAEFVRVEDIVRNVDSSVASIVDKKLGIIIDDVEENSFKQIALSWDALPIITVADTADVRAAKNSKTGFVKIALNFCVSQELLTEVQNRFYPTDRFRALIENYFDEYKGRMAELMQS

SEQ ID NO: 40911 - protein, 1505 aa, Eubacterium sp. CAG:252
MPQINRVRVNNVKYNFGTQFYDDFIMRFNCRNTIYDLANGGGKSLLMLLLMQNMIPNCTLDDKQPIEKLFRKGSDNTCIHSLVEWKLDSHCIKDGYRYMTTGFCARKARSAEEREITEEREALDTSGTGEVSGANVSSSDNTSIEYFNYCIFYRQTGPNDIKNLPLVHNGERVTFNGLKAYLRDVTKEDKGIEVHIFDRKGDYQSFISRYGIYESAWEIVRGINKTEGHVRTYFETNYRTSRKVVEDLLIEEIIQKSYNNRLSVDNDDVMMAQTLLDIKDKLIELSRKNSQISDYDSQTEVLAHFKEYIDTYTAFYNNKKEKEEKLYTMLASAVHMTEDKQLELDEHNRKNEAHINELEDKKYRIAVAKVLSEKKSLREVEALVKNSTEVLSQKEKKINDVKKRLMLMESANDYCDYVEYEKELLKVDTALDNRLREDEDITNELEKLAYEYKVYYEGHIKDYKDMADEAALSEKQAHDMLEEAENNHKNAEKDCAVILGLRDNMQEKIRDSELKQKELCNEYGVLVADTAQDELARCNDNISAISNDIEDIKNELEEDTARLYKAQENDSILKARKSMLEERISRMKEQQLKINAGHDKLNDIEKIYGVKLVDGLGEAVLSTYTQINTEYNEKLKEHDKLKKYIEAIKEGTYYIDSPERDIFKDYLYNMYGDDAVEGYKWLSQLEDDTRKDVLKRIPFVEYGFVIKNDFARVKNNDALKAFGKGTQIYPVISENVAKNTDYAIDKDMVVFALKNMNFLTDAAKKEAELKRAEDELDNISADMHKLDGRKQMIWEDYTFAVKYESALESVPEADIKEAEQELSDITEKLNKCHSEHEEYKNKKAADTEKIEKFGHELEELKKQADGLKKIADVYADISCDYDKLTSYNDRLAKAERAIIEYAAYLDKAREEYIKAGGYKDSADSRYTELVYNWENNFSKFCKNNSDISDTDISDKEYSEEDIRELIGRFTGLKDILNNKNADLTDKEALRSHLEAAMKKCIESIEYRGEDVENLKELYMQGKLSVSSQEKLRELSDELAGLQKQYSEADRELGMQEAMFNRLEGSVTYAVSQIEERYSTYEEFDCDNPDEFVKNNTLIVQQLEKDLKKETAAGKQLENELKNIEICRMDIERIMSDAGIDIPEEEILKKSDIKPLDYNTLSKDYNKTAKEYSTILKLEYKKLDEFAKHKSKLIDNLKQHNGDDLATQISLSVNMPKDGQQTALLIESLDETSGYIELEKTRVHKGIEDMERIKDNFENRCIQTCSNIRTELERLPKLSHIKMDNEDISIISLSIPYVKESAYKERMSKYIDETIEAAEGFNEQDDKFRYIRNRLTWKRLFSVIVTDMNSIRINLYKRERIKDQSRYLRYEEAVGSTGQSQGIYIQFLIAIINYISNINAVSDGSITGNTIFIDNPFGAAKDIYIWEPIFKLLSVNHIQLIVPARGATPAITARFDVNYILGQKLSDNRQQTVVVDYYSSVKEQELEYTRMDYEQASFDFISPKQQ

SEQ ID NO: 40912 - protein, 544 aa, Blautia sp. CAG:237
MQYEFLKNFPKRMKNVGLYAVLIQNSMQKTSWKQFGFAKFDEQMNLIFAVMLYIMEQSLKEENCTMDDIGAYIDTINSRYLHKEISYEDSRKLGDFIVNVILSNEGRAMYFDGYDFDQNDYHIMHISYVANRIVYLDQEVRRTSYYLTDDGYNLILSTLEIENNMKLTIHEMIFQMHLEKQSYDKAVDEIKNVFNLMRIQLQKIQEAMGKIRRNALNYSVRDYEEILLENLDTISDTKEKFQKYRELVRSRVKKLEEENINVRRLGEKEEENLENLRIIESYLNRTIDEHQKILSSHFDLKALYTRELELLSQVSLIRRFSFRNEFYDKVLENPAALENLDYFLRPLFNQEPEKVYNLNKALLYQKPSVRNEEEDIEEILDFDEEAYRKEQEQKHKEKMKQYEKSLGILLEQAVSEGEISLLNLQNKIHKDEITSKEIQKQLIPSVEIFKEIMVELIRNKEIDIEKIKRERSEFIQEQTEDFQLSEMLLQLSESRFADQKIRKIEVYRIEDGNTVTFDNVQTEVGETKSIRCSNILIRIVRNEE

SEQ ID NO: 40913 - protein, 237 aa, Blautia sp. CAG:237
MAYEAEEIRTSQEIFYYLLEHHELREEDELLLYKAYAEEEAVRNLVKSQGEIAGSNIERYGNVVYLIPKEENNFLGFSKQQLKTALCKSAATDKDYYLSQFAILTLLVEFFDGQGSSSKSREYMRVGEFMNCISLRLKEGADEEETKEDTAGISFQVLYQTYEALKSDDRGSRAKTTKEGFVYNILMFLQKQGLIEYVVQDEMIKTTRKLDNFMDWNLLNQNNYQRVLRVLGVAKDE

SEQ ID NO: 40914 - protein, 1468 aa, Blautia sp. CAG:237
MSKINAVRLINVNYNNNANRISDEILYFNGESTLISLQNGGGKSVLVQMLTAPFVHSRYRNAKDRPFESYFTTAKPSFILVEWALDQGAGYVLTGLMVRKAQDMQEESKENLDIIGIISEYQESCIQDIRHLPVVEKGKKEMILKNFNSCRQLFEGYKKDRDMKFFYYDLTNYAQSRQYFEKLLEYQINYKEWETIIKKINVKESGLSDLFADCKDEKGLTEKWFLEAIESKLNRDKNRIKEFQSILEKYAGQYKDNSSKIKRRDSIRQFKEETESIQKQTEEYRSAEQEENRQQNKIAWFIHDINGLLQTTEEEYRQSESAMEKLDQDISRVEYEELSSKFYASEDEKNLHLGNRDMIDMERENLQERAAETEEKLHVLACARQQQSVAEEKEELDLLREKIKAARQQGADLEPERKALGFALRNLFEKYLFENKEQQNIQSEYIQKTGTQAEEESRRVEDLEEKIRDCYGKKGKLESQIEVYSRQEEQFNTRYKEELVRNIVGAYEAGTLEIRHQIYEQELTRIVRERTESQKKLESGKEMIRSQERSLEDKKEALVHKKAEIQRQTEVYQLYEKELETRRNILKYLDMEAGYLLDRDRILNVSERKLKELEELRRSLEKEEDILEKEYQNLTSGKVLELPEDLKKELDNLGIHIVYGMEWLQKNGYSQKKNQELVRRNPFLPYALILSGQEMEKLAKSGRNICTSFPVPIVEREKIEEIQEKYTDKLVHFPGISFYILFNENLLDEEKLQEMIWEKKQELEKTAQAVKVRKAEYAEYFQRQEVLKNQSVTKEKWQEIQEILDKLKEEKQNLEKDILETAQNLDRLKKEHEELQDFIVKTGLEIQNQKQRIADFGQLEKDYAIYESNRAALEKCKKEEQRFQEKQKLAKERQAKLLEEQKTAQNTLNILEREAEKLNEKYTRYATYEKAGQYTLPEEISVEQMEARYVAITSVLSQELKDLEERETKASGRFQREQNELEHLQKKYRLKPVQWADVIYDRKEESHQEVILEDFQRKIQTKDMQWNDADKKAAVAQSKSNDLQKRIHSVCGEEKPLSRNEIQGQDFEARRNQLLYQKKEEKRHADFLAKKVRSYEENLTALSEYNELIPVEMEEREPVSDTLTSEELRNLKGILIRDYNQKIRETRQKKEQIVQLLNRVIRMESFQDDFYRKPLEQMLELVDDAQRVLMQLKTTVQSFDSLMQKLEVDISVVEREKERIVELMEDYIQEIHNNLGKIDHNSTITIRDRNIKMLKIQLPDWEENVGLYHLRLEDFIDKITKEGVELFEKNENAQEFFGSSVTTRNLYDQVVGIGNVQIHLYKIEAQREYPITWKEVSRNSGGEGFLSAFVILSSLLYYMRRDDTDIFADKNEGKVLIMDNPFAQTNASHLLIPLMDMAKKTNTQLICLTGLGGDSIYNRFDNIYVLNLITASLRKGLQYLKAEHKRGKEPDELITARIEVGEQIEMLF

SEQ ID NO: 40915 - protein, 326 aa, Blautia sp. CAG:237
MKRISLETLIHSRQNLSYQEQYEYVCKLLQEEKIKPVKASRTNGKKPALYREYWILEEQKDYSVYIEELKYTLSTKISIDYYLAHPDIYEKERPWVVLLDEYLKNDSDRIKIPESLNERSFEIWNREKFLDREQGKKILKHCGINVESLNIYRTTEPLPYYTHTRNVPQNLLILENKDPFFSMRNHLLSGHTEIFNIETGTLIYGAGKGIIRSFQDFDLCAEPYMKHPGNTILYFGDLDYEGIGIYENLAEKFKDQWKIIPFIPAYKAMLRKAESVKILPKTKESQNRNISSEFFAYFDEQTVCKMKKILEEDRYIPQEILNTTDF

SEQ ID NO: 40916 - protein, 542 aa, Coprococcus sp. CAG:131; identical to SEQ ID NO: 40640

SEQ ID NO: 40917 - protein, 239 aa, Coprococcus sp. CAG:131; identical to SEQ ID NO: 40529

SEQ ID NO: 40918 - protein, 1491 aa, Coprococcus sp. CAG:131
MPSINRIRVNNVKYNFGTQQYDDFTMRMYGKNTLYDLANGGGKSILMLLLLQNLIPNCTLDEKQPVEKLFRAGGGNTVIHSLIEWKLDEADIKDGYRYMTTGFCARKAKDAADAGEVQKDTASIEYFNYCIFYREYNKNDIVNLPLSEGNERITFNGLKTYLKDLGHRDMSLEVRVFDKKGEYQRFISGYGLHESHWEIIRGINKTEGHVRTYFETNYRTTRKVVEDLLIEEIIEKAFATKTGRNGEEDTMAETLLDIKDKLNVLAQRKRDIANYDHQIELINVLEGKVNSCIGLYEDNDRICKGLADVYATGRACTQEGDTHMEELAKAKADAGEQMEQQNKRLANLRVTRDYLRLEDMNRKMDDTATQIEDNEKKLAELKNQIGYKESANDYLVYRENKRQYEESRLIVDNIRNNIGSSSEKMAVYAYNRRIRDEKKLAELMAAREEAQTSYDHALEEAEYCRKVMREGEIAQAVAENNIADATAKIDEISARISELAASVNLLVVGDVKDMMNKAQEESDRILAEMTELEISIADGRTKLYDDRYRLTTVQAEYDALERSCEDARLDAEAYRQSGSQLDSIMAVYSVENPQDITGVINDRIRGTITETIKRQQEIDRLTKLAKCYEDGRPFPPSEGAETVINYISTRHGLMAMHGADYLSALPGDTKEELLQANPYLPYSVVTKGFDSLEDDINLGSIDTGSECVMVYDMDKLSDSAIVPAENMLIIGRDRKYFMSKDSIEDARKANADKIAGLTEEISLINEKLATYQEDLAFVTRLVDARYTGAEDRERELNQALLDKKDELEELKTSIKVTETELNNNTERYGDLQQSQQKESDRRQTFVMIEQLSDLARPEEQRLAEYKQRKSDLVAKLSGLQSDVLKWSTTVGETESKLAGLTRNIEDIQYKWTEYFEPYLPKSENAGVAENTDGVGVAAAAWQDGIPEEYKETLDISDERLEQEFMAMLAVSKEHAPDLEDKKKLMDALKKSMDRIQKTIEKRGFDMAVFAEAGELYPTSEDNLREMDDELARLTLIEASLMQQQKADQKAYSKLEGSIEYAIENINRTYGDSSYVREEISAADADTAIANGDAVLADMNRIFKEAEKAYSDYYKQYGFMVDLYKDVKRIVDTNDIDVSGGNVLDEDMDTLRQLFETSLMKYDRSMKALDRAKNEIMRFKGQTADTLVEMGVFEMANTIRQDVQVPDTYSQAKELLANLLQIIEFIKLEKERVEKGIEDMVAIKENFENQCVQRCMDVKTELEKLPKLSRITVGDDVIKMVDLTIPYVKDEFVKQRMSDYIDDIVKGADAYEDERKRIKYIRDCLGLKKLFGVMVTDMNAIRLNLYKRERIKEQSRYLRYEEAVGSTGQSQGIYIQFLVAVINYIAGMYSLAPEESVQSKTIFIDNPFGAAKDIYIWEPIFAMLAANHVQLIVPARGATPAITGRFDVNYILGQQMVGGKQQTVVVDYTSKTDQEELEYQELSYEQATFDFI

SEQ ID NO: 40919 - protein, 498 aa, Clostridium sp. CAG:253
MDEQVNIIYSVLLFIMEYSLREQPCTIDDISVFVDDICNRYLKKGLSYEKSGELAEFIINVVLCDEGRAMYFDCFDFDEREYKKKNISYLSNEVVYIDGEIKRTSYKLTDNGYNLVLSTLEVENNLKLTIHEMIFKMHLERATYDQALDEVKNIFNMLRIQLQKIQEAMDRIRRNALNYSVEDYEQILNENMLTISDTKHKFMEYRRIVRNRVKELEDENINIKALNDEDLEKLQNLQEIERYLSRSIDEHQKILNKHFDLKDLYSTELEQMSKMTLIKRFSLRNDLYDKIIEHPGNLINVNMFLNPLFRNNPRKIYNLNKCIQYQKPLREKNDENEEEQLDFDIMDYEEQKEKRLKKKLKKYKSSMEYLVDKAEENGGNLELAAMCDMTEEQKKTFIPNAEIFKEIMVEFIKAGSIDIDDLRKERKNIVADESYSFQLNEMLLKIADERKADGIKKVTIRKCEDGQVVCFKDIYNEFGDRRNIYCSNVVFKFEKGME

SEQ ID NO: 40920 - protein, 242 aa, Clostridium sp. CAG:253
MAYEAEEVRISQEIFYTLISKHEIREEDSKELFDGYTQNPRIMTLVKNQGDIAECTVERYGSVIYLIPYEDNDVLGFSKQELKAKLCKSGATDKDYYLSQFVILTMLTEFYDAQGSSSKSREYIKVGELINLVSDRLLEAGNNMTEDEEEKTGLAFSNMLESYTALRSDEKGRKTKTTKEGFVHRILLFLQEQGLIEYIERDDMINTTKKLDSFMDWNLLNQNNYTRVLKVLGIIDEEEKSE

SEQ ID NO: 40921 - protein, 1475 aa, Clostridium sp. CAG:253
MSKINTLRIVNLNYNNNSIKISDEAFNFNGESTLMSLRNGGGKTVLVQMMTAPFVHKRYRDTKDRKFESYFTTNRPTFIMVEWVLDGDAGYVLTGMMVRKNQEISEGEVHDELEMINFIYEYKDRCENDIYHIPIINETDAGMTLKNWVTCRKIFENIKKEDGMHFNYYDMDMPAQSRMYFEKLKQYQINYKEWETIIKKINLKESGLSDLFSDCRDEKGLVEKWFLEAVESKLNKEGNRISEFENIIKKYAKQYKDNQTNIHRMENLKEFLKEASGIKNYADEFLDYTKQRQSKESDIAGFITILDELLKETDERKNYLDEEIKNKQKQIADIRYEEISYSIYSIEEKKNKLAHEYEQLTLEKEQVVKEKEKLEKSRDILLCAKQNEAKNNAFSECKKLESRIEVSNKNEKEKEPARKELGKMLFKHYFKALSNCDSEIAEIKGSIVKQEEQEKEYNISKSECFKQKDANSLQIGKCQAKVSNYAVLEEQFNKKYNENLLRNILGIYEAGVLELKEEEYEKEIAAMKKDIAALKHEKTKNDEDYVRYGRNQDDFREVIIEKKSSFAAEKERLADFELQLKTRQDIMKYFLVDESEVYNKTVIIENAERKLKEINAAKRILEREYEQIGAEVKLLENGRLLEVSKEFSDYLSTLEIEIIYGMEWLSNNGRSLQENKKIVENNPFIPYSIILSGADFDRLAQDNKKIFTSTPIPIVKREELEDGFIESGIGTIELDKVSFYLMFRDELLDTKKRGDIIWQKKEKITKIQENIKRRDIEYGEYFSKCECIKKQSLEKDSIELSANMIMTYEKEINDAQNQIEELENLKRDIIKNNENINQKITDLNRNKSLADLRLQDFEILNENYNEYCEAKDEKIKLEKKNEDIDNKLGIINEKLENLVENIKSDERNEMKMRQEKKSFQEKYEYFKNFEAEIKENAETYNLLDEETRISKEAEYNALLNDYSNEIKLLNEQYNSVSRQFAQSRQELDELLKKHNLEIADVEKVKYDREEKNELDERISSGNMQIQLYNEKLNKVNMEIAKKQSDMEHAYNDLYRICEKKEPVSKKKITNTNFKDRIILIQNEIRDNKSDLEGVLNLCAGYRNNLTALAEYSELKAEDTESGITKSDFVGKSVKEIDTFRGIMIRDYKEILENERKQSAVITRLLNDMARKNIFRDEFFQKSIEVLMSITDNAVNFLKQLDIFVSSYEGIIEKLEVDVAMVEKESARIVELLEEYVRDVHEDLGRIDGNSTIKVHGKDKKMLKITIPEWYSNEEMYHLKVKDILDEVTAKTVTALENNENPEEVISLYINTKYLYDSVIGTGNVRIRLYKIEEQKGREISWSDVAKNSGGEGFLSAFIVLSSLLYYMRKDVSDVFTNYNEGKVLVMDNPFAQTNASHLLKPLMDMAKKTNTQLICLSGLGGDSIYDRFDNIYVLNLVAASLRNGMQYLKGEHTRGEESDTMIATQIQVTQQELMF

SEQ ID NO: 40922 - protein, 535 aa, Roseburia sp. CAG:100
MQYEFLKQFPKRMKHVGMYALVLQNSSQKQTWKQYGFLKTDEQINIIFALMLYIMEQSLKEEKCTMDDMGAYLDYLNMTYFNTGMSFDDCRKLGDFIINVILSNEGKAMYFDGYDFEQRAYKIMNISYVSNEIVYLDSDVKRTSYRLTEDGYNLLLSTLEIENNMKLTIHEMIFKMHLEKQSYDKAVDEIKNVFNLLRIQLQKIQDAMLRVRRNALSYSVSDYEQLLGENMESIDMTKQKFQSYRETVRKRAKELEEQNINVRKLSAQEEENLENLRIIESYLNRGIDEHQKILNSHFDLKILYEKELELLSQMSLIQRFSLRTDLYDKVLQDASGLDNIDIFLRPLFHQAPDKIYNLQKATQLQRPIRKKQQEEEEEVLDFDEDQWQEEYAARKRKRLMQYENSLGFVLDKMMEKGKITLQEMASSLGREEQNTLIPDIDIFKEIMVELIKSRHIDIDALHKEKSEYIAEETLDFQLNEMILELVDKDERRKHIHQIDIYRLEDGGVVEFRNIRNETGDGKTVRCSNVALEIGE

SEQ ID NO: 40923 - protein, 235 aa, Roseburia sp. CAG:100
MAYEIEEIRLSQQIFYYLLEHFELREEEEERLYRAYTEEEAVQNLVKSQAAEAESAVERYGDVIYLIPKEENVFLGFSKAKLKETLCKSAATDKDFYLSQFVILTLLVEFYDGQGSSSRSREYIRVGELQNCISARLKEGVENTSEEEEEQKGIAFRNMLEAYEALRSDDKGSRAKTTKEGFLYSILTFLEKQGLIEYVEEDEMVKTSKKLDNLMDWNLLNQNNYQRVRKVLEHE

SEQ ID NO: 40924 - protein, 1466 aa, Roseburia sp. CAG:100
MSKVNAVRFINLNYNNNAIRISDETFQMGGRSTLLSLRNGGGKSVLVQMMTAPFVHKQYRKTKDRPFESYFTSSKPTFIMVEWKLDGGAGYVLTGMMVRKSQIMEEQSSEPLEIVNFISEYTTRCEEDIYHLPVVEKGKKEIVLKNYGFCRQLFEGYKKDRSKKFYYYDMNNYAQSRQYFDKLAEYQIYYKEWETIIRKVNLKESGLSELFSDCKNEKELIEKWFLDSIESKLNREKDRMKEFQSIVEKYIISYKDNKSKIERRDTILEFQTDMKELQQYGEAYEIAEKQIHAMENRIAAFRSVLAQIEKDTVARQSEQEQQRAGMEEQLAHIMYEKLSMEIYELMEQKKYHTGNRDMISMEMNELELETEYVEKLIHSYACAKQQKIVDEYTRDNELLVEKIAVYRENEKEYEPERKKLGGYLHTHYGDKFRKAGQNAEQIQREYDSNLGRQQEMIEKECEYQTRIEELIAEIAKDQERLSSFDRQEEVFNRDYQEHFVRNIIGTYEPGMLQIKKEQYVQEQEQLHRNNMQHKRQQEETEEKVKSMQRNLQDRNNQKMQKEYELRTLTEQGEEYSRQIRERQVMMQYLELDDTYLWNDGKIMEAADRKIAECDRVRAELEKEHNLLEREWKKLTSGEILELPKDFQELLTRLELHPVYGMNWLEKNGYSVEENTELVRRQPFIPYALILPRQEMKQLELHGQDICTSFPIPIIPREELERTLAQEPTSMVQLSGISFYLWFNEKLLDEDALRVLIKNKESEMTKKQKQLENKKTEYKDALDRKQMLERQSITKEKVEKNRQQITDTEQEISEIDNQIIHDKEEMDRLEQKRSELVQIILKEKQCMEWNQRRASDFDYFCREYDSYLEKHDTLEKNRKEKTKYEDNKKQAQDLLEKYREQQRTLESRQRELKAQTENIQKKYILYQEYEPIALEGQNRPVSEMEARYEAITTKMSFQLQDLEHQLQKTNGSLNRAKEELARLQHKFLLKEDDWKELYYDEKEEMHQESVLAERKKQYKFKEAQWNEQDKQIGIISSKIDDKNKLMQEQCGKEEILPKEEIRTIDFDGRRNQLLYQIKETERALKLTEKKLTSVQENIASFTEYDDFVQKEEIQWEEDIAQMDSKCLREYAGMIRRDYRHSCEEGKNRRDKAEKILKILLCKEKYQDDFYRKPLDAMMSVSQSAHLLLAQLTTTLQSYESQLAKLEVDISIIGEEKKRIVGLLEDYVKDVHSNMGKIDNNSTITIRERPIKMLRLQMPEWEENEGLYHQRLDDLISELTQKGVEIYEKNENSAEYIGTRITTKNIYDTTVGISNIQIKLYKIEEQREYPITWAEVAKNSGGEGFLSAFVILSSLLHYMRRDDTDIFADKKEGKVLVMDNPFAQTNAAHLLKPLMDMAKKTDTQLICLSGLGGDSIYSRFDNIYVLNLVTAGLRGGMQYLRGEHTRGIEEEVMVTSQIEVIGQQSLLF

SEQ ID NO: 40925 - protein, 333 aa, Roseburia sp. CAG:100
MKRISLDDLEHALHLQNYQQLYEAVLHKIEQGEIKPVKASGKNGKKPVLYREYWLIEQARGDEEELVEELSYQYVPAIATGYYMKHLQQYREDREWLMLLNQYLREHKCLLEFPMSLNERSYDIWHREKFLKEEQGRKILKRCGIPLEMLNLYETSEPLAYYTDTKEIPQNILLVENKDTFYSIRRNLLAGKNKILGITIGTVIYGAGKGILRSFQDFTLCCEPYMKNEANRLLYFGDLDYEGIMIYENLADNFLDFCIIEPFVPGYHAMLHKAALRGQERLPHMKEKQNHNIGMKFLEYFSVQDRQYINGILAKNRYIPQEILNGEDFNNAI

SEQ ID NO: 40926 - protein, 498 aa, Eubacterium sp. CAG:38
MLNDIITEHKERMLNLKKYYPFFKLMDVSFAQFQEGRYEMLDMGYIVMGILRFFIEENNFKEKDVTYPEYLDFITSLLKRDFGLNLSAQEYKELADYIFDKIKNEGRPFTFPYYDPIEKKKCISRIKVLESAIRDHTVWYSISSDAIEFYLDTKEIKEESRISVQQLLLEKMIQAQNFQGGKDVIVRINEEVARLQRRKNEIMELLGKDVFAGIEAYEDFVHTGMRWFDEEEKLFKKNKDFIEGALAKMEAEPVQSESYYRTLKEIYELDSQLQIAMTRHGQLLSACTQMQQMTEEAVKRAKLGRLRSHIHFGALLTDLIRSDNAGLLEQLLSPVLLPHIKKRFTLDSLDEALTVKPKQAEAAEKVEEEPPQEIQFADEMEDQRIRKNYTFLMNNLLAAFEKRDTFTLSEFGAAMSRMYSPDILKNADYYSFFVNLCQKQEYVIGGQTENESFLDDILSGAFADREPVHFTITPKSAGAQDEQPMEQSELVFERKGTK

SEQ ID NO: 40927 - protein, 242 aa, Eubacterium sp. CAG:38
MESRNIEKALEISAKLAAGETVSEQGTNAALYQEYSTNPEVYDMVLLSLKKMELSVYEYNNSLFAAPKAHGSLFGYSNEALRRELGLRTNGELYLAYFIIYNIIMEFYTDTISATYAEFVRVEDIVRKVDDTTAGIVDKKNGFVLSEIEENSFRSLALSWDSLPAATVELSELRAAKNSKSGFVKLVCNFLVSQQLLSDNQERYYPTDRFRAVVENYFDESRGRIMELLDQSGEERDEHAAD

SEQ ID NO: 40928 - protein, 1519 aa, Eubacterium sp. CAG:38
MPQINRIRVNNVKYNFGTQYYDDFMMRFHCRNTIYDLANGGGKSLLMLLLLQNVIPNCTLDEKQPVEKLFRPGGGNTVIHSLIEWKLDTANNDGYKYMTTGFCARKAKDTEADGTEADGISGRFSAAEEAPAGRDNASVEYFNYCIFYREFGENDIKNLPLTKNGERITYNGLKQYLRELEHNDFHVSVKIFDRKGEYQSFISKYGLYESEWEIIRGINKTEGHVRTYFETNYKTSRKVVEDLLIEEIIQKSFHNKLAVGNDEGQMAQTLLDIKDTLARLSKKNAQITNYDKQMELLDAFSEYILGYRSLYEEKGNLRGQLLKLLMQCRQNLSGYRAQEEKQKDELLHLQEELLKQQRMIQTAEVLTEQASLAGMEELIAANEKKRAYFKEQEEHLKRQMEETESLVEYREYLQYQKLYDELLAAITANGQTDEELIKQLYALAVVIVPQLVQKKNAAGEELQNAETQYRACQKEAAQTKADYQQLLGGAAAAEQIAVHTAKEIEQAEKELGACMEKAGILVMEKAGEEYSACTQKIKEQEEQLLQTEGQLSQVEALLSKGRQQQASCRARIELLTEQLGQAETKKEQEQKEKQQLLQLKAVYGEQDTRRACRVVLDNHRRLEAECEQLTADCTQLTQFLENMKHGIFSAGGRHREKVKSYLSGRYGEDVKEGSEWLSGLSEDERKQVLAAFPYAEYAFIVENDFSRIKEDPVLADFGRSAYVIPVLSAQAAKAQLTAENEQYVVYARKDMAFLKDEKLRGREEKLAQEELAAAQEKLARLTDRKEIVWNDYVRIQELSKLEEEPAKKEFEALSVRLEELQKEAQRLQEEMEQEEALRKKGRERKAQVQEKLAQNRERYPYVQKCAKLAESLLVQYREKQEYTQRAADAKQEQLLKEQEMQAQEKAEQTALQRKNALAEEYDRLQSRLDKRYQAYISMEADGGQSAGIHVLQSAADGSAVAGLADADGHALSLEQLENRFAGVKKALDEKNADVHDKEELLRHYRAAMGKCSTAIARRHFTMEELAVKEAQGEAVPNPDDALCALEQEREQAVQQEKAAAEELEAQNALMNRLQGSIAHGKSQIEEKYGAFEAFDCDNPEQFIVQHKNYKDSIAGQIKELEKEQKRQTEKMQDFLVMEKDLSRIVAKAGIEVPEASETENADTMAGQPEDTDINVADFSGYETVQKEFEKLCALEVRKLEEFLKKKDKLTEELTACDAKELALEIKMSVHVPKDIEAVKQLKSRLSETNTLIALEKERVSKGISDMERIKDNFENRCVQICCNIKTELDRLPKLSSITMDNEVISIIGLSVPYAKESDYKERMAAYIDETVLMAESFDNTQERLKYIRNRLSWKRLFAVIVTDMNAIRVSLYKRERMKDQSRYLRYEEAVGSTGQSQGIYIQFLIAVIHYISSINAPADSAGVLGKTIFIDNPFGAAKDIYIWEPIFKLLKTNHVQLIVPARGATPAITGRFDVNYILGQKLVHNRQQTVVVDYYSRTKNEELEYTRMDYEQAVFDFTL

SEQ ID NO: 40929 - protein, 507 aa, Roseburia sp. CAG:303
MTEEYILHKDVITNHKDRMFYLRKYFPYFKITENNFSQFQNGKYESLDMGYLLMAVLRFFIEENNFREKDVTYQEYSSFIKEIYERDFGLVLDQAEEQSLSSYIFDKITNEGRPFLWSYYDPVEKKKETLRVRLLDSRVTKEGVYYRLTSEAIEFYLDTKEIQDESDISVSQVLLSKMIASRNFRGGIQVVQRMNNQVARLQKQREEVLGLLAGDVFHGIRAYEKFMENGTKWFAEEQKMFHKNMELIEEALKRADTEAAYGQAVKDIYDLESELKRALINHSRLLSDCTKLQIQADEMVAGAKYSRLKKNFDFKEAQCILMEENNAARLEAFILPLLRIQPKKRFSLLQVDKLLTLRMDREEKGEEIAENVIPEMYVTEDEKEENRIRENYRLYVRILLYDILKKDSFTIEEWCGDLVKMLGKDVLKNSDLYSMMIHLAQKNQYSMQEVMQHPDTFFEEYLKMILQEEPAYRKLNFKIEYLEHKFCPMAGCEIKNFRIVKGEQTWH

SEQ ID NO: 40930 - protein, 240 aa, Roseburia sp. CAG:303
MALEKALDIVSALINGEEIRRNGGNAGLYEEFALGTQVYDEVKLILKKLNLDLYEYRDGLYITAGDNNQIFGYTNEELKRELGIKRNRELYLCYFIIYQIMTCFYKDSTNRPGQEYVRSDQVIQSVDQALASVIRDLKELSLDEVEENSFKEIAMVWEDMPLVQTEDALTRASRGSKSGFVKLVFNFLVTQELFLETEGRYYPKVRFRALMEHYYDEHKGRLYEIMRGESDAADKQNQGK

SEQ ID NO: 40931 - protein, 166 aa, Roseburia sp. CAG:303
MNEIRLNLYKRERIREQSRYLRYEEAVGSTGQSQGIYIQFLIAIINYISSIYSRNTDSIALKKVIFIDNPFGAAKDIYIWEPIFKMLKTNNVQLIVPCRGATPAITGRFDVNYVLGQKLVNGRQQTVVVDYYSSVDSEKLDYTTMSYEQGVLDLVMGNNAEFGESI

SEQ ID NO: 40932 - protein, 536 aa, Roseburia sp. CAG:303
MVKIDFLNDFDKRMKFIARFSVLCSNSFDKKKWKDYGVENRDVQMNYLFTLLLCIMEYSLKEEDCTMDDMAAFLSDISFEYYHQNFSYEKSMDFARFIVEEILGNSGMTMYFQAFDYESKTYKKINIRYIDNKVVYQDGGVKRTSYYLTEEGYNMILATMEMENNLRLSIHEMLFKLHLEKADYHKAVDDIRNIFSQLKKQSQKIMEAMHLIKRNALSYTVEEYRQLVEDNISTIADTREKFRMHREFIEEKIEEFEEKEISADNFSEKEKENLENLRKIGGYLSKTLDEHQKILGQHFDLKKLYDYELENYSNMTLVQRFPFRKDVYDEVLKDVNLLKNMDRIFNPLLNVKSDKIFNPEKMFEYQKRIRREKEGEEDFELDFNSEEYQKEKEQKRQERLRKYERSIRIVLDKLLEYGELDLAKLSMECGMEEQQDLIPSVEIFREIMIEFLTAGTVSVEDLRKEQAGYLMEASDSFVLNEMLLTILEDKKYGTIGMIQVYPAKEEKAVYFKNLKDEAGNFRNLKCSNIKFIYEKR

SEQ ID NO: 40933 - protein, 254 aa, Roseburia sp. CAG:303
MAYEIENITYSQKIFYYLLCHGALNDTDMGVDDLYRAYVEREEVMNLVKNQAEIAGCSVERYGSSIYLMPDMENKYLGYTKADLKKEICKSGATDRDYYLSQFVILTLIAEFFDGQGSTAKSREFLKLGELQNIVAEKLKAGYEMEQQREENGDQENILDYKSMTEAYQALKSVEEGTRAKYTKEGFVSIICDFLDRQGLIVFVQEDEMIKTTPKLDNIMEYKILNKDNYTAIMEVLRAEDEQDRENKNFKSEL

SEQ ID NO: 40934 - protein, 654 aa, Roseburia sp. CAG:303
MKIRNERADIEEVCRKTEMQINQLRKNITEYENRQREFEKLCRKYEVYGKAVMSLKRIRNEKEELLKVQKQLTDSMKETEFAVHTITDKLKRIQEQEKYLRKKRTEYETYAKMAESQKAQKGMDTEIAKTEAAYLALTREISDSIEELKKRQEWFSSHIVQKKRELEKKNRYKIEEKEYKNLLYSEEQYDHLENRKEQIERTLNDANENNNTLTGKIEMIKNELKHVYQNLKESTGYEEPVPRKNITDTEFEKRINFRKHDYTQMQTEIKSMQERKQQLSVFAEGMTEYEDESIETENKHVEEVKQRIPDIATVALDILAAYQKEKKKKKNQISKEMVNMQIQIYDKIHGIASKREYADEYFKKTFDSLLVQTKQPLYLSQQFEINRISYENQLEKLKIDLAEMDQEQKNIEVMLAEYIRQVNNNIAMIDKNSTITIRNRTVKMLKIQVPDWESEKEHFRLRLHDYFENVLKSAIYVVEKNENLGEYIGKAILTKRLYDEVVGIGNIRIKLYKIEEEREVPITWAQVSANSGGEGFLSAFVVLSCLLSYMRRDETDLFSNGEEGKVLIMDNPFAQTNAEHLLKPLMEMAKKTNTQLICLSGLGGDSIYNRFDNIYVLKLVDSGIRKGVQRIESRHIKGDGIREVVPSEFRVEQI

SEQ ID NO: 40935 - protein, 328 aa, Roseburia sp. CAG:303
MKKTKIGLKDIADAHPEMDYLQLYEYIMQMVDNGEFLPVKRAKTNGRKPALPLSFWKIREEQDDYAEVYEELDYRLNPQLHTEYYRKNPQAYLKDRDKILLLSNYLDCHSELLKIPETMNERSFEIFHREKFFQEEGGLNFCKRLGISREMLGFYETSEPLSYYSRSKKTPQNILIIENKDTFYDIRRYISQTGSILGKEFDTVIYGAGKGIWSTFADYVNQAEEYFGADNRLYYFGDLDYEGILIYEHLVKGNQIQIALFKRAYEKMIEKAQSSGIENLPDTKQGQNTGIENIFMDSFCEKTQSEIWNILKSGKYIPQEILNEHDWG

SEQ ID NO: 40936 - protein, 502 aa, Clostridium sp. CAG:269
MENEEKEVFTAEEIKKQAYEEIIKDVIEEIDSREENLKIYYPYFVINKKLQDEKTEIDLNSVFVAILSYLLYTGKLNNRKIEYQDIIDFTEYFIYKIYNKKQENVKEIVNKILDVAQNNGNNFTYEYYSLKEKENKDRHIKYIEIKLGENGKLNYYITPQGIDFYLKTKEFPDSAQITINLLLFRKQIEKGSFNYAYDTIKRLNIEVKKKSEQKELVLEALMYGGKEGIEEYNKYHESVEGQINEEEELFGEVLELVDNIYNEYLAKNESNQLNEKEKQTISLIKKIEKELNKTINSHTKLLKEAIEMTKKHDEIIGMRARSAFSEKFKFEQEFEKVISKTNNPEKLFYFISPFLLPKKLKSFNPMKSLESQKINQDKKEEEQKEKSQTHQIDTIDDITKKRVVHNFKFYFENMLFLLKTRKSFDLKEYSEFIRSNYGEKSLYNGDFISFVIFLNGKKELTVESDEMFKDYSFNQIRIITQNDDIDFGNGLKITNIIISANS

SEQ ID NO: 40937 - protein, 243 aa, Clostridium sp. CAG:269
MEEIKDSLNIALEIINTLLQNKEIKKSENTELYQQYVGNDEVESLCDMIAEKMGFNIYRLDNTLNLCVMIENKVFGYSNEDLKKKIKILNKNEDIYLMYFIILTIITCFYRESGLNSPRSYLGLDELIETINIKFQSLVKEDIEKISEENEYNFRDVKKVWERLPDAREDINSGKNDKISFVKLVLNFMQEENLIFFDEERRIISITTRFKSIVYFYFEYSKENKNRLLEYVYELGGNENATY

SEQ ID NO: 40938 - protein, 1460 aa, Clostridium sp. CAG:269
MPHINRIRLVNVNYNDAKSIYDDFNMRLDGKSTTYDLINTGGKSMLILMLLQTVLPNTYLKKEKPIKNIFIGGNTKRTSHCLVEWELDEGYEYKYMLTGFCARKKQESDNDEEDDSKLEIDYYNYCYFYNDYAQIDIKKLPLVTRDGNDKIYMSYDKLRQYLIGMKKDGLPVEIFDSKKDYMKRIEYYGLISAEWKLISEINVSENYIEKYFKENKTSRKLIENFLIKIIDNINLQNSDETEDTLVDTLIELKDNLMLFRKQNDNKKEYQQAKEMYENLQKENAKFIDEFNRIDKINKKANEAYQYKQHKMNELKDKIQHETDEIARLQDENTRLNIENEKYKIDKLHNDKAEIENDKQNIDTEIQKIQAKKDDVEKKLALSKAQNEYVEYLENKQERDKTQIQINSMQIADKDLAKKYNIYGYNYKLKLQELIEKISKQYSDKSKEKDEKTSARKIAKDQENFARTNFTKSSLNIENYQKQIDEENESKNIITNEFTEKGKLDLILNIDEGIEKEEKLQNECKEKVEKNNAEIERLDNENIKINQELAQNRANQILQNKVFNDAESDVQEYEKAKNSIEKLAKLFDVDLANIKQTIEASIEEREKQRNSYQIEKQIKSRKLELINKYNTIIPNEDILHLKEKLENKCNYVIAGFEKLAEYDEEKRNEIIKNNPLIMYSVFVDNNSFEKLKVKQIETELQNLVPIANIEMLRQEAVIKSKDYIFPISVDVLQNSNPEKLEEYKAKLEKNIEGLNSKILDVKSRIDREQEYLNEVKIFEQTYSSKNIIDSLYENVDSTKSQIEKLEKEQKDLSNNIQNNNEKKEELSKENTLLEKDQKSILEEIEVLNELKNINNELQKLQDQISKEKSNEQILKESLEEKIEIVQEIEDEIRGLEKQINNLENQKNRYLIKLSELTEFEETEIIEESFEEIETTYKALTEKFSTSESTYNQLVKILNMCNQNMNNCQNRIEENGYYVHDFEEKNQIFEKINESDLKSYKTNIDILEKNIKSLKGRLTEKDKAESEIIGQIKLSIGQLQKSGFEYEIEDKISNNEIIKTYMNENKNKIISNKTNIRNITNKIQDVENEVEEFKKECIGLENFITDKKIEQTEIDIENILEAELYTYNKIKQESISLDKELSKQKQNFDSYIKHIKECVENYYIKQDVLESIEGIKNPVCLLSEAENNNQGILTIIELIDERIRHIDEAIEKLEKYQENFITKCFEKAETIVRDLEKLPGLSKIKFGGKDINIIKLELFEYEKDEKIRRMKEYIYKIVQDMEEKPEEMTKEVLNEKLSSKMLVGQIINIDKAYVKLYKIEDVQEHSTYKRWEEDLGSDGQVNAIYFMFAVCIISYISMLTRKDGSSKCKKVIIVDNPFGATSAVFLWKVMFEILKENNVQLIAPGHNISKEIISMFEVNYVLKHEFKDGNKKTVVVEQEFRAEDSLKNMNFDTIDGNQQKLF

SEQ ID NO: 40939 - protein, 331 aa, Clostridium sp. CAG:269
MEIKEQIIVLVKSKKSKTINIKEIRENLNLEYTPQNEKILKNEIEKLVQERYIEPQKTSKTNVEGISEKYKIIKQDDANIKQEIINLSNKLKIDYYLKNTKEYQKDKEIINSISKFISKPIEGVLTINERSYQIFQNEKLLKEREDIIKKLGLTLQDLKCYETYEPFFYYENKEFSKGKILIIENKDTFWTIQNVVKTTKYKNIYLVIYGEGKKILKSFEFINNFKLENNIIEYFGDIDYEGINIYEQLKSKYSQYNIKAYKTGYQKILDIEKNPNKIRANQICNLKNNEEFLKEFDKDYQRKLKYIFENKLYIPQEVFNASIAEKIMKGE

SEQ ID NO: 40940 - protein, 510 aa, Eubacterium sp. CAG:76
MAENMIGEIITEHRERMLNLKKYYPFFRLIDTSFSQFKEGRYEALDMGYIVMAVLRFFIEENNFKEKEVTYKEYQEFFNNIIRHDFDMKLTEEESGEVADYVFDKMKNEGKPFEYAYYDPVEKKKRVSRVKLIESTIKDNTVWYSISADAVEFYLDTKEIKDESRISVSQLLLEKMINSNNFKGGVEVIERINEEVGRLKVKKNEVMDMLSKDVKTGLEHYEDFVNTGMKWFVDEEKLFKKNKELIDKAIERLESNSSATESYYRTLKEIHYLEDQLKIAMNKHAELLRDCTDMQNKTDEAVKKAKLSRLRPHMDFTAALSDMIRTDDASLLSFIIEPLLKLNIKKTFDIKTIDEALLVKPARYDKKEYVTEDTPEDIVYEDEIEDERIRHNYIFIMNNLKECINRKCMNKSDILTLGEFNNIMSEAYGEEILNNADYYSFFVNLCQKDSYVIGGDNMQSETFLDDILKEGFEGSEPVHIIMEKGTDEIIDYTNVQVMNITFRKEADDGK

SEQ ID NO: 40941 - protein, 234 aa, Eubacterium sp. CAG:76
MENRNLEKALDIVSKLITGEELTERGDNSSLYQEYNNNAEIYDIVHVSLKKLNLSIYEYNNGLYVSAGENNRVFGYTNEELRKELGIKVNKDLYMAYFVIYNIITEFYTASSNTTYVEFVKVEDIVKNVDYSVSAIIDKKLGMIIDDIEENSFKQIALSWDELPVITVEDTADVRAARNSKTGFVKMVLNFCVSQGLLMEAQSRYYPTDRFKALIENYFDEYKGRMAEIMQSLI

SEQ ID NO: 40942 - protein, 1486 aa, Eubacterium sp. CAG:76
MPQINRIRVNNVKYNFGTQFYDDFIMRFNCRNTIYDLANGGGKSLLMLLLMQNMIPNCTLDEKQPIEKLFRKGSDNTCIHSLVEWKLDNNAVKDGFRYMTTGFCARKARDAKDEENVTDGTDTLTQAQASSSDNTSVEYFNYCIFYRKFGENDIKNLPLAVNGERVTYNGLKAYLREAEKSDYNIKVYIFDRKGDYQSFISRYGIYESAWEIVRGINKTEGHVRTYFETNYRTSRKVVEDLLIEEIIQKSYNNRLSVDNDDSMMAKTLLDIKDKLIELSKKNSQINDYDNQIEALTYFKDYIATYKEFYSNKSNIEDKLANMLLSVINAEGRKEAELSEHNEKEQELYNELSDKKYKIAVANVLKEKKSLNELDKLVKEALSDRNKKENQIKTAREKLMLLEAANNYCDYINYEKELVKVNTAIDSRMIEDEDIASELNRLAAIYKQYYDKAEKELSAKTARAAIDEKNLRDELKKADEKHQEDKNNCAVIQGQESAVKQQIEKDEKELKRLADAYGILIVDDIISKIEELRVQHNGILKAEALLEESIKETTKSVYKTEEKINIAESNIAMLDERIDQLQSQIISRQENESKLKDLQRIYGIAGADRLKEGIFKEFLRMNDKYNEDSQKAVKLGKLIEAVSAGSYYIDNPSYNKFREYLKSVCGEAVTEGYKYLENASEQQRKDIVKRIPFIQYSFVIDSGFDKLKEAELGTETQDSAVYPVISAEALKDENININSDKVIFAFNDISYLTDDKRRDVKVRILREELDNLNDTITKLNSRKQTVLEDYVLSVNAGDTSAEKLDAPEELLKRKNDIKENIAAYRAELGRYNDKKSQDMAELENVRKSKKSVELNISRYEEIAVVNERVTAGYVTLKQLTEKLKAAEAQIIECADYLDKIREDYIKADEYKTNVDNRYSELVSVWENTVSHFYNESIDYNNDEADKINPDELTAKITGLKDILSNKNSDVSDKENLRKHLKASVDKCIEAIEYRGHTLEELKGMYETGTISVSDRTKLMGLNNELHEYQKEYDEGSRETEAKEALLNRLEGSIAHAKSQIEEKYGRYEEFECDNPEKFADDMSVAVAELEKNIEKYAQLRKHMSDELKEIQLIRKDLERITYNAGIDIENYAELSESDIEIKDFESVAKEYEQTAKEYSSILKLEYKKADEFNKYKTKLIDELKNYNGAELAVEVNVSVELPVNAAKTEQLVKSIEDTNSFIELEKERVHKGIEDMERIKDNFENRCIQTCCNIKTELERLPKLSHIRMDNEDIAIIGLYIPYVREEMYKDRMSAYIDETIVAAESFKEQEERFRYIRSRLSWKRLFSVIVTDMNSVRINLYKRERIKDQSRYLRYEEAVGSTGQSQGIYIQFLIAIINYISNMNTVSDGQPLGKTIFIDNPFGAAKDIYIWEPIFKLLAVNHVQLIVPARGATPAITSRFDVNYILGQKMADKRQQTVVVDYYSNVKETELEYTRMDYEQASFDFI

SEQ ID NO: 40943 - protein, 536 aa, Clostridium sp. BL8
MEVEFLKNFNLRMKKLGSYALICKNSMFKSSWKNYGFNEDYEYLNLIFAVLLYIMEQSLKDENCTLDDIAVFIDDINSKYFNKSLSFEQCKNLGEFIVNTILCDDGKVMYFKGFNFEDREYKDIHISFIGNKIVYINNVVKRTSYYLTDEGYSLLLSTLEMENNLRLTIHELIFKMHLEKATYDRAVEDIKSIFNILRMQLQKMEEAIRRIKENALNYSVEEYSDLLQGNMESLQETRGKFKNYKEHVDDRIKELKEKDINIKRLDEKELDNLKYLGIISKYLTRTIEEQQKILNSHFNLKNIYARELREISSMAIIKRFNITTEIFDKILEDSSKLDAIEKVFRPLFNMPIEKKYNLNKSLQYQKVIKEKEVEDDELISFEDEDWEREKEEQARRKLLSYKEALRVLLELICDKGETSLGEISKIVEENKSLKEILIPKVEVFREIIIELLKGKEIHIQELREEVSATLQESGQLQFQLNEVLLDLVEEEPKLAHIKTIKADKLFNNEKVKFSEVSSEKGKVKSVICSDVLFNIS

SEQ ID NO: 40944 - protein, 238 aa, Clostridium sp. BL8
MYNIEDITMGNRIFYYLLKNGELKEEVERDLYRAYSEKEEVMSLVKRQGEDFNCSIEKYSGVIYLIPKEDNEFLGYSKGELKRELCKSGGTDKDYYLSQFVILTILVTFYNSQGKSSKSRDFLKGGELSNLVNEKLKDAVEKEEVENLEKTSGIAFTNLYESWQALKSSDKSTTAKTTKEGFIYTILTFLENQGLIMYIKDDDMIKTTSKLDNFMDWNILNKNNYERVAKALGGVDGE

SEQ ID NO: 40945 - protein, 1464 aa, Clostridium sp. BL8
MSKLNSLRLVNLNYNNNTMKVNDEIFQFGGESTLMNLRNGGGKSVMVQMMMAPFVTKRNRDLKERKFNSYFTSPTPTFILTEWVLEGGDNRVLIGMAVRKKNSSEEDDEELDIINFIHEYRGSNPYDIYNLPVVENQGNTLKIKSFGNFKTLVEELKKNRDFNFNYYDMNVASQSRNYFETLKQYKINHKEWESIIRKVNMKESGLSELFQEAKSIPGLVEKWFIKTVEDKLNREENKISNFQEIIKKFIYQFKENEARVQKKAAIELFKEESENIALAADSFNKERIHKEEIENEIANLILFLKTSKEARELEQESLREILNSLRAELKDIQYEEASVGFYKLMDEIEALEEEINNTSLQIEKVEGEKLHLERTKGVYQCAKIYEDYKKTSQRVQKYENQLELANSNQEETEEERKHIGFTLKNYYLKEEETLENQLKDNMESLDKTKEEIETIASNLKDFDAFIFSNSKRLGGLQSDIKRYNEVEEKFNDKYKKKILRNMLGFYPEDLILTCKNAYEKQETALNEKIKNLNKTLVLRKEEVPKVESEKVRLSSLINKINMKLEEGEKQKIEIEEKIKERKDVLKYIEFSEEKLYQTEEILKTFESKIELLREEEKTLLGRVLKVKEELTILETGRNLKLSKELERKLKGRGIDLVYGVDWLKNNSYTMEENFRLIDKNPMLPYSLIMEDEDINKLKSEELGVYSNSPIPIINRRNLDKNLGKINKELWVLDDITFYISFNHKLLNEEELRILLAKKEEEIRKAEELLNLKRKDIDTYQGLRNNIKTSNLHKDSYKNLLNEIEKDEKELKTAVSQFEHMNEKLEELKNSIEKGEKQIKEEEKLQRDLKDEMDSFKELALQYEKYKNYKIEAEKVSKTISEADDLKAQKEEYIKQKRNYLKSLEEQKRELSSNLSKIKEQVSRFLQYEQGTIIEKDIEDLQGRYLALTSELMKEIKVIEEELKEARENFREKETELTTTQDEYGLFEEDFRQVFYDRTKENEAKKQLKEAKRTFDKLKEAEVERKIELAGLEERKRGIISSLEENYGRAYPKERGEIIFVNFPERILEKNEEIQRADTRLKVNIKEQEIIGKTLSSLDSYGDFSVNQFIEINTPIKSIERFKGELVRDYNQCIDRNMKERNNLSDEITKVSKIHIFSDDDFFMRTLSTLAEIVDEPQNVIETLDTALKAQEMILMQLYKDLELINEERANVEDILFDYVLEVHENLDKIHDNSTIKIKDKYVKMLQIKLPDWESNKELYRIRLRDLVNGVTEKGLALLTENQNIEEMLSKTITTVNLYNEVVSISNVDVKLYKVEEDRQIPISWNEVSKNSGGEGFLSAFVILSSLLSYMRKDDSEIFSTSGEGKVLIMDNPFAQTSSEHLLKPLMDIAKKSNTQLICFTGLGGDSILNRFDNVYVLDLKASKLRNGTQKYLVSTHEKGEELVHDLISSRFKIKEEEVEQMELF

SEQ ID NO: 40946 - protein, 334 aa, Clostridium sp. BL8
MKDLRKLNKKRIDTIEMQKYLGIEDYLEFASIVKDLEVKKVISPVASSKGNGKRPALYNRYNILQEEIDYSKYIEELHYGLDIRLNKTYYLKNLEKYIEDRDYVLSLSRFLKKHPEGIETELAVNERSFQVWGKEKFLKKGGERILKNLGLTLDYLKVYETTEPLPYYSFDKTTPQNVVIIENKDTFYSLRKFLLSGKNSIFGVNISTVIYGGGKTIFKSFKDFKLCVEPYLAHKDNKILYLGDIDYEGILIYENLSEAFKDEVNLEPFVEGYKEMIDKYLRENIDLPITKEGQNRGIKTLFLDYFQDEYKKEILKVLKMDKYIPQEILTIEDF

SEQ ID NO: 40947 - protein, 539 aa, Peptoclostridium difficile DA00145
MEMINILEGYNKRVNCIGSYYLIATLANNRNKFKEFDNIQFYNLLIQVLCYIFDRSLRRKNCLRDDIKDFIEEINRMDYKIMLSEDDLKDLANYIINGLTNSGKVYLFTYYSLEQEKHIDESIKIIEDKNVKINNQERLSYSLTTEGYRLLLSTKEYDELFQIQISQMIAKLRIEKGDYQGAKEDIYDIINTLEIHQQKIDNYIKIIKVNILYIKEEKYSTVIDTTVETLLEEMDKYEELKKEVKLLIKDKEDYLEKDEDIDKEKIKNIRTQLLQMKELIDGIVLAKSTATNLLSRVQDFREEFKEILKKLLTTPVLKRFNFKEEILDRLEKDSDFLLIIRELYISLFKVELPNRFNIGVAYQEQKLLNTREIENEIVNKDELEIIENKEKEERINYCENYYFDFFKYLIKYGLEKGQFTLEEFLKNYLKYDKVIYLEITKDSKLMRDIIIYFANQRESINIKKIIRMLENSAFSPNTDFQIERLIERLLVEDFELLNSVSHIKSNKIFEDEMKINTEINLETMTAVKLEIANIKFEII

SEQ ID NO: 40948 - protein, 242 aa, Peptoclostridium difficile DA00145; identical to SEQ ID NO: 40505

SEQ ID NO: 40949 - protein, 1451 aa, Peptoclostridium difficile DA00145; identical to SEQ ID NO: 40506

SEQ ID NO: 40950 - protein, 336 aa, Peptoclostridium difficile DA00145; identical to SEQ ID NO: 40507

SEQ ID NO: 40951 - protein, 539 aa, Peptoclostridium difficile F253; identical to SEQ ID NO: 40504

SEQ ID NO: 40952 - protein, 242 aa, Peptoclostridium difficile F253; identical to SEQ ID NO: 40505

SEQ ID NO: 40953 - protein, 1451 aa, Peptoclostridium difficile F253; identical to SEQ ID NO: 40506

SEQ ID NO: 40954 - protein, 336 aa, Peptoclostridium difficile F253; identical to SEQ ID NO: 40507

SEQ ID NO: 40955 - protein, 539 aa, Peptoclostridium difficile P23; identical to SEQ ID NO: 40504

SEQ ID NO: 40956 - protein, 242 aa, Peptoclostridium difficile P23; identical to SEQ ID NO: 40505

SEQ ID NO: 40957 - protein, 1451 aa, Peptoclostridium difficile P23; identical to SEQ ID NO: 40506

SEQ ID NO: 40958 - protein, 336 aa, Peptoclostridium difficile P23; identical to SEQ ID NO: 40507

SEQ ID NO: 40959 - protein, 539 aa, Peptoclostridium difficile P31; identical to SEQ ID NO: 40504

SEQ ID NO: 40960 - protein, 242 aa, Peptoclostridium difficile P31; identical to SEQ ID NO: 40505

SEQ ID NO: 40961 - protein, 1451 aa, Peptoclostridium difficile P31; identical to SEQ ID NO: 40506

SEQ ID NO: 40962 - protein, 336 aa, Peptoclostridium difficile P31; identical to SEQ ID NO: 40507

SEQ ID NO: 40963 - protein, 306 aa, Peptoclostridium difficile P45
MDKYEELKKEVKLLIKDKEDYLEKDEDIDKEKIKNIRTQLLQMKELIDGIVLAKSTATNLLSRVQDFREEFKEILKKLLTTPVIKRFNFKEEILDRLEKDSDFLLIIRELYISLFKVELPNRFNIGVAYQEQKLLNTREIENEIVNKDELEIIENKEKEERINYCENYYFDFFKYLIKYGLEKGQFTLEEFLKNYLKYDKVIYLEITKDSKLMRDIIIYFANQRESINIKKIIRMLENSAFSPNTDFQIERLIERLLVEDFELLNSVSHIKSNKIFEDEMKINTEINLETMTAVKLEIANIKFEII

SEQ ID NO: 40964 - protein, 242 aa, Peptoclostridium difficile P45; identical to SEQ ID NO: 40505

SEQ ID NO: 40965 - protein, 1451 aa, Peptoclostridium difficile P45; identical to SEQ ID NO: 40506

SEQ ID NO: 40966 - protein, 488 aa, Escherichia coli HVH 193 (4-3331423)
MSLGFLEQARNESMARRELSIQSHALLVVRTLDSIYSALQRNPFDGVELDALAAIMYLFDAMLYYADRERQPGMTRKEAELCLVGHLNEAYPGQEEPDYAQVASKIFAAIKDPFRLRYYDFSQRTHSEEQIVRLVRYDQLSGSDDILWSLTDYGMLFYTLRLDETPIERAAILAWRTLKTIRRGEIDKAVHQIQSTQRQLEQYLIGMRMKVRSAQSGDLSASYAHDIRPVLNDSFDKTREVLEHIQNSMSVITEMLVEGRSKLNPDKLNKLRKAQEIFAEVCAFTQCYQDCLLDVNKDFERARLKLIIPRDNTLFRETLEKGALIPLLSHSPDIVEKEIDGLIARLLAPRRQDDDRHILFDPEALLNLYLDRFEQALPHEIQDPTDQPVAIETNLRNIPESVIKKCSDWVSDRLKNWGHVSFTDVFDAYECEEFSEQEQQVCLLHIGSLAANSDPAIEVEIDEAIETTLWRANNVKLLTVAPLDPFEE

SEQ ID NO: 40967 - protein, 1478 aa, Escherichia coli HVH 193 (4-3331423)
MWLIKRVYMDGAGHEEAFYKDLTLDYIGLSQAVSSPVVEGLRSPVRNAKVVTSTYQQLVNGGGKSTYIALLLSIFEPSVSDFTQYLANHRQSEYHYRNYFYKELSVVLVEMVNESGQTLLLGHAHQRNGDDVDRTLFICDAPDSLLGAPFDEVPSYSRAERKFELRPYANSLRSFDSWLNLKVGSEGGMHWRKTTRQNEWRAFLLEQQINVDLIKTMVTFNSEEGGLTRFIEYKTEHDFLGAFFACTMSKDAAERLRELVAHEVERQGELEGIRRNESFLKDVLANWLAFLDPAKQLESIQAQQQLLDDGFREAMRDLAAFVGDAQVEQTQLEDNMDSLQTHIGQAMSLREQLGKRRALLEYDLVQHRFNKQKAIVDALQDEADTNQRQIEITHAAIDYKAYAKALNEYRQADEDLKVFQSETERPLQVIFERTAGEALGTLEWAIDRHRQQEATLEEELGQMDRESHVLRQSYDKIQKTLGGLETERDGYKRDKFQGESQRNELCEAGLIQKDETPVAAQYRLELTLHDAKQSEELANTILHQKEQALEAQLHVVREASIEKSEAQQKLILAEQKHQSAVDSALVLAKNYQKLPTSTRHDLDIEDTSWHSELCGLQLDKVLNANAQTLNGMKERLLQARHELDELRVTGHELVAKQVNEALEAFYAAGIARDKLWTFPHYLASAYNDDAQKIAAVIDQNPGRYLSLVALDNVTFEQVHKISEILPWKKAPIAIYLLDEAQDLRRETSELVQVVLSNPDKHGYSQAAYETRLQDLENTVASQDVSVKATESALKVLESFRNDWSRHYEQYGKHWAGLLDQRELALLILENADAALKQAEHDEQTLRDEKRDVQVRLNNAQQQKIQAEKAHDKVSLFVEKEWAKRETAIMKLEQLAAQIQRSKNTLYTQRERLERLSELEKNKRSEKTLLIIQIGSWSNLCNEPFYSEITATEGMEGRSPEYAHEMAAQAHKKLLEAANGDQVTVLKQQLKDAEQAQRYASDRLTAQPTYNTYPDEVKAAAINELTVINNSIVRLKEQQKQFTQNLISSQVTLQKFSQSCEEASKALDEDFVWEEKPIEIEAIQTSLAEIVNNLYAIEHQIKFLLEQKTLLLRKIENVKERLQNAKTAQAMIQPITPSSAAGLPGRILSIKEYADDLAAQCQMYAGLNETLKQQNMRVSVVWGKFRKRIEEELAKVPDARASQEYLRQLDSIATYHEVLGDLERVGTGISQVFEAVQDSLEQFQRSIDLTVTHLTAHLEGAIKLLRRAMSVKIPEDCPVLPGRPIIKMTDRLNDVAADLKGFASSRLQQWIARGQIPRAPNRDALTADLVQSVFGEGELEVRLLKTNASRPQWTPVTRLEGSGGQRLTSAFLLFVTVGKVREYDTGISSAGFLLADNPLGKSNANDLMRIQTQMAKAYKIQLIYLTGISDENAQSMFDNHLFLNKVQKLRRRDLVTVDKERHALWAASLAAKPQFDPVI

SEQ ID NO: 40968 - protein, 347 aa, Escherichia coli HVH 193 (4-3331423)
MIWLSRLESTANKHRLAAGKAARTVKANAVLDEVLRAHNQEALSQEVPDLLSQAVTQLLERDWRAQPKHKASWQRYWRGMSLPSTFVYEGAIVPTKTTSEIAWHPWLARRITGQLTQPIKARLQQLNTYLFRQTGGDKSLFPGLLGHRERSLLIFGDEKALDSLPPDGWKHVTLTLADMGAFRRAPPLPYESSRCHDLPAIIVENSDVYYRLCQLNRAQTRWSLVIYGAGNKVSGQAECVSQLLEVEQVEQLLYFGDLDVAGLKIAHQLRCKLLNDYGISLHLDEWLYNKLILNGLMTAEGNANNERFDFELKCGWMPKFVLREMKTLLAIHRRLPQEGVASLGLFI

SEQ ID NO: 40969 - protein, 504 aa, Aneurinibacillus aneurinilyticus ATCC 12856
MEGLDIDELTSGYRERMRRLALFDTLYELDRKREQDLEGTSLDMKGLGLLTLLFFFEQKLIRQSKTGVKQLAAFLKNISEQRYILPEDKYEDVARTIIQTFRPTDGKKRSYHYYDWEEKTEQSIEYSILKANSFDVKSNTQYYTLDEDGLELLFATKEFYSEFQLSINQLILRKQLDKGEFKGALRQINEMRIDVETLQERMVKLKHEIQRSIVSEETFERYKQLLEDIYGRLSREDEEFTELRQFVKETRERLYSRDVHQKEKKTYGYVLKINRELEAVHYDHSRLLDQTLTLKNTTLITAQESLYYTGIQSFNFDQDLVSQIVSSPLPLEAMKGVLHPFLKVEENKRWSPLTVLAEQNITEEREEKVEQGFIEVDLDQAGDPYRKGLIRKYKELMELFLSAYEMERGGTLSAFIDFLEETGQASVYEQRYFYDFWLILHQRSPIIQGSVDEQEGKTLLGDALALIGDRIFTIKEGKGIIQKVGRYSIQEMIVELEGEEDELS

SEQ ID NO: 40970 - protein, 246 aa, Aneurinibacillus aneurinilyticus ATCC 12856
MNYPEKKVIQAFQLYTELAREGVADMEAVQQYKTDDDIGALLDIFSHEVDCVIISTSEQIFMVPETKLSTFHVSNDWIKRNYLRSSATNGDIYLLYFSTIVLFGRFYDTYQSQEPTRQFIRLDEWVHFIQERINQLKSYDEDELKGFEKEFSYNWSLIIEKWEDMDDIKETAKRQSGNTISRLSFIHTVKRFLVDQDLVQEIGNDEITLTEKAKTIIQRFFMEVEYNKGIFEFIYGFERVEENASH

SEQ ID NO: 40971 - protein, 1479 aa, Aneurinibacillus aneurinilyticus ATCC 12856
MDLKGWKRMPAISKIRLTNVVYEEGNKRYNDELFLFDGHNGAILLENGGGKTVLIQTALQAIIPHTDIAERKIKNTLLLENAPAHIAIEWITNDQPRRYVVTAVTLFITKQGLDSLRYVYEYEVNDPNGIDGIPFVREGKEGKRTAERGEMQDYYSQMRDRSFLAHTFQTIKEYRTFLEDQYHIISDEWESVIKINSSEGGVEAFFDDCKNTNQLFNRLLIPTVENSIAGHDSKMFADMFEKQYTNFKQYKKLKETIEENKRIQAELEKFVKTFEQLHQSKLTYEKIKQRAKGLWEETQLQKRKATDEQIAILQKIEEWEGRERKHGVKSASYDIAFEKSILRTLIHDYNQEFANYSKLEEELEGYQTDYYSLKLAELKVEQKNFQDQMKHIKEEMKKLNQTEERQELEDQLEEAKRTLLGFFMRKMEEVKKEIQGVSFELNPIKDQLQQSQDTLKRLWEQEAKQQKELSRIESRLETRKKDLEKLEQQLLANPKQERVQEEINKWNKRYQFLDNEIIQLNQEERKIQIESKEAQGHKEELQEEKGKRALKYEKVLYQLDEMEQDQKELIRKLASVRPQWAILKSLYDNESTIASRLGETVERLTNKRNLLLYRERIAYRFVDDHGEQNIFFADAFVESQLKSWKNQFDYLSTGIEYLQSLEKSDFEEKKRYPLWSLTLITTNKSKPLLREKLKGVADRLQFPIHVITTEEATIIHRGQGKHPWVTPLHWNKGMEDEAFREWKEEIAQSAKDTTLLREQKEKEIKTWENVLQAFNKFMEQYSFEKIMQLNEERSNLMIQLEQLALSIQKEDKRMEELRSKLALLKDTVDNYQDEKQGLEWKIDKGNSYLQYSHEVGEDRQKEQQLKEQLKALQTEVHSVKHRHETLIEDKEEIEERIRSLKSNFKILEEDESFSEVKTLTPLFTGENKKTIQEKIRTIEFKIRQINVSYGEWNARLENARQSIERTQKDLDQLRMEHSQLLDENRLFPGDGKQWLKDLWAKVRKLERQVTSVNQEVQQKLSAKKKQEGKCQTKIEQFQKDYPDETIYEFTSALIEVKEQLKVEKTGLRETKIYLEQEKKRNEQELTSIKEAEHSLYRFIEKHYFNAPDIIAIGLSSEEILEFSYHRKRFVDSIIRDLEKTRGLVKEENEKVDREKQSFKQFCQTISDVKMRQMAENGVEHKRTYADLVDFKKNMLIGVERATSYANEHIRQKDTELQAFINQVHAHLKTLVEELKQIPKKTRIKVESDWKQIFNFSIPEWEEEEGKSRIRDYIEWILQQLESDRFLTDLGMQDAREIRKEIEMWLQSKQLLQMVMKNEVMKVNCRKVTNDNKVTTRSYSWEQSNVWSGGEKWSKNMTLFLGILNYVAEKKQHIQPNMKRHRAVILDNPFGKASSDHVLTPVFFVAEQLGFQVIALTAHAEGKFLQDFFPVIYSCRLRESADPTKKVMIKEKWLHHAYFQDHEPKSIDRLGEMEQMVLFE

SEQ ID NO: 40972 - protein, 343 aa, Aneurinibacillus aneurinilyticus ATCC 12856
METIKKLLSIYPKRTITLTQLEELMKPYIDTYGEFSNIILNLESEEVLGMVKSKGRTTRTPSLALQYRIDKRLLATNHHMALQRFRNVLHPSINIDAYYRKDPSIWQSDLPYIQKVDEYIKKYSFPTEKVPAPERSFELVGDEKWVVEKRGKELLEQIGVFDKLNIIPVSEPLMFAINPTNIQNTTQLHLIVENKTTYQGLLPALVEAEFSTLIYGCGKSVIKSIEQFSIQYPLNAHHQFFYFGDIDREGLLIWHSLTKRQPTYLALPFYRACLEKTAVEGKEYQRESEEAQNLFLSFFLPEEQDKIRKLLAEGKYYPQETLKTEELQKIWRESDWKALISMS

SEQ ID NO: 40973 - protein, 541 aa, Clostridium symbiosum ATCC 14940; identical to SEQ ID NO: 40610

SEQ ID NO: 40974 - protein, 236 aa, Clostridium symbiosum ATCC 14940
MAYEIEDIRLSQEIFYYLLEHHELREDNELRLYKAYTQEETIQNLVKSQGEISDCHIERYGNVIYLIPKENNSFLGFSKAQMKAALCRSNATDKDYYLSQFVILTLLVEFFDGQGSSAKSREYMRVGELQNCISKRLKEGAKSRGEEEEEKQGIAFSNMLEAYEALRSEEKGSRAKTTKEGFLYHLLTFLQKQGLIDYVEEDEMIKTTKKLDSFMDWNLLNQNHFQRVKKVLGEVE

SEQ ID NO: 40975 - protein, 1483 aa, Clostridium symbiosum ATCC 14940
MSKINAIRLINLNYNNNAIKISDETFHLNGDSTLLSLRNGGGKSVLVQMMTAPFVHKRYRDAKDRPFESYFTGSRPTFILVEWALDQGAGYVMTGMMVRKRQEISGEETGSGEELEIVNLISEYKERCLLDISHLPVVEKTKKEITLKSFGACRQLFESWKRDKSVNFFFYDMNNQAQSRQYFDKLKEYQINYKEWETIIKKVNLKESGLSDLFADCRDEKGLVEKWFLDAVESKLNRDRNRMKEFQNIVEKYVEQYKNNRSKIERRDTIRCFCEEGEKIRAEALQFEESLKRVAFHENQIAGLRAELGRLRNEEEEAREKLLQEIKEIQEKREYLLYKKLSGEYYELEKQERFHSSSRDMIDMEREALKRECSETEKRLHLLECARQQDETDEDGRALLEAVERFELAKKKGESLEPERQRLGSLLKQYYQEACKSWEAKQEQNRKEQETVRETLKSKEERLEELQNQIIDYASRMAGQKTRIAVFDQRENRFNKMYGESLKRNLLGEYEPGALQILLQIYEKTLEDVIKERLTLRQKQETETEEKKKLERRLEDLKQELGRNGEEQRELFRIGREYGEELSERRKILRYLELKDSLVFEQDAILQASGRKLKEIQIARRELEQEEERCQKEYERLTQGKVLELPKEFEAMLRELEIPCVYGMEWLQKNGRSAGENQKLVKRHPFLPYSLLISKRELKTLLSFTEKGDGKEVYTSFPVPMLLREELEGRAGEEAGTVLEWNKIHFYVYFNQNLLDEAALKRMVEEKAHQMDKLKSAISRKQEEYQGYFEKQEKVRNQKVTKESYQENQEKLEENGRREQELKGQIEAAAAQARTLEEELEQFRGRIQKLENDDRWQTQRLSEFKEFSSEYAAYLEERNELERCEKKAASLSEQKAVCREQMERLRRQLQTLENAAADLKEKVRDNREKYLVYETFPEHFAEIEAPWQTGEGREEAYAQMEARYQAITAGFSMEQQELERWVLECRKRHGKSKEELAWLRDKYKLEDGAWKTVLYSREEEYHQRSVLEERSEKKILKDSEWNKEDRVLLLLRQSMKQKKEKMAETCGKDEPLPQSEIMSEDIDAQMNELSWQEKEKKQQQEQHEKRINSYEQNITSLSEYNHLEQREEISWETDISLLDKKQLDDFKGETVREYRLSISASGECKARMVQQLNRILRMDVFREEFYRKPLEAMLEVSGIAAQVLAQLNITVQSYQSLMEKLEVDISLVEKEKARIAEILEDYLKDVHENLGKIDHNSTITVRERPIKMLRLELPSWEENLTVYQLRINDFLNEITRQGIEWFERNENAQEYFGTQLTTKHLYDTVAGIGNVQIHLFKIEEQREYPITWADVARNSGGEGFLSAFIILSSLLCYMRRDDSDFFADRNEGKVLVMDNPFAQTNAVHLLKPLMDMAKKTNTQLICLSGLGGESIYNRFDNIYVLNLVAAGLRNSVQYVRTEHIKGTEAETVIASRIQVAEQMEMMF

SEQ ID NO: 40976 - protein, 340 aa, Clostridium symbiosum ATCC 14940
MKRITLEEIEKNGKFETYEALYRHILSEISSGRLSPVKASCINGKKPALYLRYWVTEEEKDYGCLKEELIYGLTPLISPDYYLKNLSLYEKDREWVRMLNGFLTERRELLNQTESINERSFEIWGQEKFLKRGQGMRILKNCGISPDFLNYYETTEPMPCYTHTREVPQNLLLLENKDTFYSMRRHLLEGKDTILGMKIGTLIYGAGKGILKSFQDFSICAEPYMQNRQNQIYYFGDLDYEGIGIYEKLEQLFGDQYSIRPFMPGYLRMLEKAEGVLLPITKEQQNRNLTGQFFACFPQSAVEQMKKILESEQYIPQEILNIRDFGGLERVNLPQSVTHS

SEQ ID NO: 40977 - protein, 534 aa, Clostridiales bacterium oral taxon 876 str. F0540
MKVNMDNLKMLEGYRRRMNLLSSTYFLSEFVVNRRDGKEFDNHEFYNLIIQILCFIMDRSLKGENCTREDIVNFMDDINRVCYKKTLTRERIGELVYYILRKGLRNEGYAYSFSYYDYDNEKDSHINVQLINDEIIDIDGETKTTYFLTEDGYKLLFSTKEYDDIYEIEITKMIAEFKIKNGDYKSAREDIDKLVNLLEIQCQNIDNYIQRTKRNIAFIQNEKYSEVIGKTFDVLLSQMSKYSELKTMVLGKLDILYTEDVSSERILEQIGDIKMVLSGLDKAIFFIRKLHERKDSFSSQFKELLKSAMFINYNGRFDFEKEIMQKIEKDASFIGNLDRIYKPLFKLQSPNIFSLHVPYDEQNLQGEKVSKEIEVMSEEVELEDEKEEIMRAYNAFYEDFLRSLLDYGFRCESFYLSSFIADLKKDKNIYVEKTRYGGLVRNMLLFFAHEGEEINLEEVRKELRKVAVVNPSESFDILYSVSTLSKYYRKLPTIKISVLDETFTFLTSINLEERTATKLTVPDMEFTFIQQGGL

SEQ ID NO: 40978 - protein, 241 aa, Clostridiales bacterium oral taxon 876 str. F0540
MMEEKIKGATKIYYQLLKGGEIKRILNKELYNLYANYSDVQETLKFMAEESKCDLLLTTDALYMIPRPENDIIGFNYKNDEDFKSVKDETDYYLGLYIITVIINEFYSSISPMEFISVNELVKKVERRLEAAASKDDAEELENEYKYNIRSLKDAWFAKENIPGDKEERLGKQTWSFQYRYGCVRKMIIFMTNQELVLYSKEDDEIRPTQKLNDLMNYYFLDNRRKAEIESIFFDTIREDA

SEQ ID NO: 40979 - protein, 1433 aa, Clostridiales bacterium oral taxon 876 str. F0540
MFINRYKYVNFVYGDSKNRIMTSEPFEAMGKNMQVEATNTAGKSISIITLLQAVVPLVDTDKNSVDVFTSKEPVYMLIEWISEDNTRVLTGIGIERKMQNFAEDDKRQDKSKLFDIVTFIAEYDRPNKFDLDSIEITYEKDEKLYCKSISEVCAMFEKNMEKPAGVKFIKHYKKSYLKEYKEKLEEYGIFPDEWATVIARLNKGESVLSKYYEDNNTTEKLMKNLIVPTIEENIENSKGNSFIKDIQDSLKKYREFSKEHRNELIEYDSLCITKEKLQVLMNASNARIELEESEEEIRLKFGELYNSVEDAHRSIGFRMEDKHRENEELNTKALSIKLNRDSREYFNLETEVKKLKSEIDTLRDELEITEDLIEDNTRMAALCNLKEWTDRRNRIVSDISKLVAEKDKKEKTQNEIMKKLNNLGFSIREYYEKEIKEVQRKQEENKQEESKLLYEENALKEENIKLIEEATHTAIQQGELKEFFRGYEAREAEIIKRYSDASEYITNTLEGKMFSIDKLVKISEASIGNLKEDTLKLKSEITGLEKELKDSDLKMSELGAIIKEKGETAAKQEEELLKFIEAKEYLTETASKFLLDASNIFERELFKREISDVILKKKEKAEGLSENRKKLVKELEFLKGDSKLHLPDALKEEMDNLGIKVISGLDYLNKQGLSAEEKTKIYKENPLIVSSLMVTRKEIELIKGISFKINSSTPVPLMLREDLSKEGLWELTNNVAESTSGRFIMFYDSSMLDEKALVEKVNSLNEQQSKLSISISKLNEDIEALYSLKNKAESFNYDMQYEQRTRASISLLYKNIEDMVASANEIERKIPEIKAGLREKENSLVDIEDQISKQKDKIDKLTEFNDSYCGIYNKNYVNKEVLSRKAKEIDRAQKTNRENQDSIGKRREGIIEYRAKLNERLESLKDKSSEYSIYKEGVLLTEEPTVLIGMFKEYGSNSEANNLSRINENLSRREEEKTEAENKMKIYERTAKTSNFDLLIKSLEEYERTLNELKDEKMKIYGQKEQKTGALKEKENKLSADYNKIVNSYGVPPLPPVEIIEMNYSEEMLSIDRAKQKNESALKDLAETSKNLEVYSGYLKDYKGITNNFEAMSMEKIKADYGSIQERKSSLDEKIKECNDNLMKAQSELAPHLSGERIEVYNTIAGMTDINMKADFLQNVIIATDGELDRLLARKLEIEGEKEYIYNIIKDYVDEILKGLKRLNDIARINRERLMKITLKEENIDYNEIKNIIDSVASNDNLNISSLVTTYYLLDVVAKIRRIQVDIMKYELFNSTMKNWDSLKTSSTGAQKFCISFILLAVLLEYKRFDERYPERSSLGKVLVMDNPFGEISENTLLKPVFELAEKLKIQIISYTHIQNQAIRDRFDKIYLLKVNKTASGREIVKLETYKDKITERASVSPFFLEQVAFDSI

SEQ ID NO: 40980 - protein, 240 aa, Clostridiales bacterium oral taxon 876 str. F0540
MSTGGINIDTIKIKEKLLIHRKKENRAKIELEELKDIIDDEYKNVVKTVQELVDEKFLEPVKRYGLNSMADALYKRYRIVYDESNGALEEENEELMEELNGHLYFKINIDVYKQNLKLYKKHRSYVRLFSDFMKKNSNLLKIQCSINERSFEVFGDEKFLKEDSLAKEMFKAMDLDMNILNFYMAPEPFFFYKSDAKTPQNILIVENKDTFYTVRKLMLEGKQIFDMEFQRLYTVKVKRY

SEQ ID NO: 40981 - protein, 488 aa, Salmonella enterica
  subsp. enterica serovar Indiana str. ATCC 51959
MSLGFLEQARNESMARRELTIQSHALLVVRTLDSIYSALQRNPFDGFELDALAAIMYLFDAMLYYADRERQPGMTRKEAELCLVGHLNEAYPGQEASDYAQVASKIFAAIKDPFRLSYYDFSQRTHSEEQIVRLVRYDQLSGSDDILWSLTDEGMLFYTLRLDETPIERAAILAWRTLKTIRRGEIDKAVHQIQSTQRQLEQYLIGMRMKVRAAQSGDLSASYAHDIRPVLNDSFDKTREVLEHIQNSMSAITEMLVEGSSKLNPDKLNKLRRAQEIFAEVCAFTQRYQDCLLDVNKDFERARLKLIIPRDNTLFRETLEKGALKPLLSHSPDTVEKEIDGLTARLLAPRRQDDDRHILFDLEALLNLYLDRFEQALPHEIQDPTDQPVAIETNLRGIPESVIKKCSDWVSDRLKNWGHVSFRDVFDAYECEELSEQEQQICLLHIGSLAANSDPAIEVEIDDAIETTLWRANNVKLLTVAPLYPFEE

SEQ ID NO: 40982 - protein, 1478 aa, Salmonella enterica
  subsp. enterica serovar Indiana str. ATCC 51959
MWLIKRVYMDGAGHEEAFYKDLTLDYIGLSQAVGSPVVEGLRSPVRNAKVVTSTYQQLVNGGGKSTYIALLLSIFEPSVSDFTQYLANHRQSEYHYRNYFYKELSVVLVEMVNESGQTLLLGHAHQRNGDDVDRTLFICDAPDSLMGAPFDEVPSYSRAERNSELRPYANSLRSFDSWLNLKAGSEGGMHWRKTTRQNEWRAFLLEQQINVDLIKTMVTFNSEEGGLTRFIEYKTEHDFLGAFFACTMSKDAAERLRELVAHEVERQGELEGIRRNESFLKDVLANWLAFLDPAKQLESIQAQQQLLDDGFREAMRDLAAFVGDAQVEQTQLEDNMDSLQTHIGQAMSLREQLGKRRALLEYDLVQHQFDKQKAIVDALQDEADTNQRQIEITHAAIDYKAYAKALNEYRQADEDLKVFQSETERPLQVIFERTAGEALGTLEWAIDRHRQQEATLEKELGQMDRESNTLKQSYDDLQKMLDGLEADRERYKRDKRQGESQRNELCEAGLIQKGETPVAAQYRLELTLRDAQQSEELANTILHQKEQALEAQLNVVREASIEKSEAQQKLILAEQKHQSAVDSALLLAKTYQKLPTSTQHDLDIEDTSWHSELCGLQLDKVLNANAQTLNGMKERLLQARHELDELRMTGHELVAKLVNQALEAFYAAGIARDKLWIFPHYLASVYNDDAQKIAAVIDQNPGRYLSLVALDNVTFEQVHKISEILPWKKAPIAIYLLDEAQDLRRETSELVQVVLSNPDKHGYSQAAYEARLQDLENIVALQEVSVKAAESALNVLKSFRNDWRLHYEQYGKHWAGLLDQRELALLILENADAALKQAEHDEQTLRDEKRDVQVRLNNARQQKIQAEKAHDKLSLFVETEWAKRETAIMKLEQLAAQIQRSKGTLCTQREKLERLSEIEKNKLSEKTLLNIQMGNWSNLCNEPFYSEIMATEGMEGRSPEDAHEMAAQAHKKLLEAANGDQVTALKQQLKDAKQAQRYASERLTAQPTYNTYPDEVKAAAINELTVINNRIVRLNKQQKQFTQNLINSQVTLQNFSQSCEEASKAIDEDFVWEEKPIEIETIQTSLAEIVNSLHEIEYQLKLQLEQKKLQLQKMENVKERLQNAKTAQAMIQPITPTSAAGLPGRIQSITEYTDDLVTQCQKYAGLNETLKQQNIRVSTVWGKFRKRIEEELAKDPDARASQEYLRQLDSIATYHEVLGDLDRVGTGITQVFEAVQDSLEQFQRSIDLTVTHLTAHLEGAIKLLKRAMSVKIPEDCPVLPGRPIIKMTDRLNDVAADLRGFASSRLQQWIAKGQIPRAPNRDALTADLVQSVFGEGELEVRLLKTNASRPQWTPVTRLEGSGGQRLTSAFLLFVTVGKVREYDTGISSAGFLLADNPLGKSNADDLMRIQTQMAKAYKIQLIYLTGISDENAQSMFDNHLFLNKFQKLRRRDLVTVDKERHALWAASLAAKPQFAPVI

SEQ ID NO: 40983 - protein, 347 aa, Salmonella enterica
  subsp. enterica serovar Indiana str. ATCC 51959
MIWLSRLESTANKHRLAAGKAARTVKANVVLDEVIRVHNQEALAQDAPDLLSQAVTQLLLKDWRAQPKRKVSWQRYWRGMSLPSTFVYEGAIVPTKTISEVAWHPWLAQRITGQLTQPIKARLQQLNTYLFRQTEGDKSLFPGLLGHRERSLLIFGDEKALDSLPPDGWKHVILTLADMGAFRRAPPLPYESSYCHDLPAIIVENSDVYYRLCQLNRVQTRWSLVIYGAGNKVSGQAECVSQLLEVEKVEQLLYFGDLDVAGLKIAHQLHCKLLNDYGISLHLDEWLYNELISNSLMTAEGNANNERFDFELQCGWMPQFVLREMKTLLAIHQRLPQEGVASLGLVI

SEQ ID NO: 40984 - protein, 488 aa, Escherichia coli 907672; identical to SEQ ID NO: 40487

SEQ ID NO: 40985 - protein, 1478 aa, Escherichia coli 907672; identical to SEQ ID NO: 40488

SEQ ID NO: 40986 - protein, 351 aa, Escherichia coli 907672; identical to SEQ ID NO: 40489

SEQ ID NO: 40987 - protein, 345 aa, Escherichia coli 908525
MSLGFLEQARNESMARRELSIQSHALLVVRTLDSIYSALQRNPFDGVELDALAAIMYLFDAMLYYADRERQPGMTRKEAELCLVGHLNEAYPGQEEPDYAQVASKIFAAIKDPFRLRYYDFSQRTHSEEQIVRLVRYDQLSGSDDILWSLTDEGMLFYTLRLDETPIERAAILAWRTLKTIRRGEIDKAVHQIQSTQRQLEQYLIGMRMKVRAAQSGDLSASYAHDIRPVLNDSFDKTREVLEHIQNSMSAITEMLVEGSSKINPDKLNKLRRAQEIFAEVCAFTQRYQDCLLDVNKDFERARLKLIIPRDNTLFRETLEKGALKPLLSHSPDTVEKEIDDLTAR

SEQ ID NO: 40988 - protein, 1478 aa, Escherichia coli 908525; identical to SEQ ID NO: 40488

SEQ ID NO: 40989 - protein, 351 aa, Escherichia coli 908525; identical to SEQ ID NO: 40489

SEQ ID NO: 40990 - protein, 488 aa, Escherichia coli BWH 32; identical to SEQ ID NO: 40681

SEQ ID NO: 40991 - protein, 1478 aa, Escherichia coli BWH 32
MWLIKRVYMDGAGHEEAFYKDLTLDYIGLSQAVSSPVVEGLRSPVRNATVVTSTYQQLVNGGGKSTYIALLLSIFEPSVSDFTQYLANHRQSEYHYRNYFYKELSVVLVEMVNESGQTLLLGHAHQRNGDDVDRTLFICDAPDSLMGAPFDEVPSYSRAERNSELRPYANSLRSFDSWLNLKAGSEGGMHWRKTTRQNEWRAFLLEQQINVDLIKTMVTFNSEEGGLTRFIEYKTEHDFLGAFFACTMSKDAAERLRELVAHEVVRQGELEGIRRNESFLKDVLANWLAFLDPAKQLESIQAQQQLLEDGFREAMRDLAAFVGDAQVEQTQLEDDMDSLQTHIGQAMSLREQLGKRRALLEYDLVQHQFNKQKAIVDVLQDEADTNRHQIEITHAAIDYKAYAKALNEYCQADEDLKVFQSETERPLQVIFERTASEALGTLEWAIGRHRQQEATLEEELGQMGRESHVLRQSYDKLQKTLGGLETERDGYKRDKFQGELQRNELCEAGLIQKDETPVAAQYRLELTLRDAKQSEELANTILHQKEQALEAQLHVVREASIDKSEARQKLILAEQKHQSAVDSALVLAKTYQKLPTSMQHDLDIEDTSWHSELCGLQFDKVLNANSQTLNGMKERLLQARNELDELRMTGHELVAKQVNEALEAFYAAGIARDKLWTFPHYLASAYNDDAQKIAAVIDQNPGRYLSLVALDNVTFEQVHKISEILPWKKAPIAIYLLDEAQDLRRETSELVQVVLSNPDKHGYSQAAYETRLQDLENTVASQEVSVNAAESALKVLESFRNDWSRHYEQYGKHWAGLLDQRELAILMLENADAALKQAEHDEQTLRDEKRDVQVRLNNAQQQKIQAEKAYDKVSLFVEKEWAKRETAIMKLEQLAAQIQRSKNTLCTQRERLERLSELEKNKRSEKTLLNIQIGSWSNLCNEPFYSEITATEGMEGRSPEYAHEMAAQAHKKLLEAANGDQVTVLKQQLKDAEQAQRYASERLTAQPTYNTYPDEVKAAAINELTVINNRIVRLKEQQKQFTQNLISSQVTLQKFSQSCEEAGKALDEDFVWEEKPIEIEAIQTSLAEIVNNLYAIEHQIKAQLEQKTLLLRKIENVKERLQNAKTAQAMIQPITPSSAAGLPGRILSITEYADDLAAQCQMYAGLNETLKQQNIRVSTVWGYFRKRIEEELAKDPDARASQEYLRQLDSIATYHEVLGDLERVGTGITQVFEAVQDSLEQFQRSIDLTVTHLTAHLEGAIKLLRRAMSVKIPEDCPVLPGRPIIKMTDRLNDVAADLRGFASSRLQQWIARGQIPRAPNRDALTADLVQSVFGEGELEVRLLKTNASRPQWTPVTRLEGSGGQRLTSAFLLFVTVGKVREYDTGISSAGFLLADNPLGKSNANDLMRIQTQMAKAYKIQLIYLTGISDENAQSMFDNHLFLNKVQKLRRRDLVTVDKERHALWAASLAAKPQFDPVI

SEQ ID NO: 40992 - protein, 347 aa, Escherichia coli BWH 32
MIWLSRLESTANKHRLAAGKAARTVKANAVLDEVLRAHNQEALSQEVPDLLSQAVTQLLERDWRAQPKHKASWQRYWRGMSLPSTFVYEGAIVPTKTTSEIAWHPWLARRITGQLTQPIKARLQQLNTYLFRQTGGDKSLFPGLLGHRERSLLIFGDEKALDSLPPDGWKHVTLTLADMGAFRRAPPLPYESSRCHDLPAIIVENSDVYYRLCQLNQIQTRWSLVIYGAGNKVSGQAECVSQLLEAEQVEQLLYFGDLDVAGLKIAHQLRCKLLNDYGISLHLDEWLYNELILNGLMTAEGNANNERFDFELQCGWMPKFVLREMKTLLAIHRRLPQEGVASLGLVI

SEQ ID NO: 40993 - protein, 496 aa, Streptomyces albulus PD-1
MSEAGLHGRDTLGLATRVKALAVADPVLDLERRKPLLASRGWAGYQMEELALTAIDTVTLKMDFDDGARHEDIVAAMARVAGLQMPQHDRDEHTAVAGWVLDNLLNVGTVDRDFSHLYGIVSNSTYTAHAFSFKLLREVPGPDGRPRLRASNEAIAVLVGAVDLDIASEQVAADAKLEALVRRGRLTDAHRAAEMALRRTVQYTEHIRTRLEGMRRDICSVDWVRDVQRMQTEALEHIEDRINAENTIKDNLVRMMENSTEDTTPAQAAELIAILQECLRRHASLQANLQEVGERFRAEQERQSFVPPPSRAHVALERQLLVPALQLPVRHAYPLLSTFATAVTPPHRPAIIYLPDLIAGLMTSPAEPDGDDGLIIEPEFGDALDTATFSDEQYTAVASLLKQTDTDGIRLSDLLNAARQHGVSAGQRNLDHLLALHVLGLFGAPRHDPERGTVLAALADDRELDDDRFAGHDLLVVHNPAASVQPAANDLEEGAA

SEQ ID NO: 40994 - protein, 1498 aa, Streptomyces albulus PD-1; identical to SEQ ID NO: 40832

SEQ ID NO: 40995 - protein, 361 aa, Streptomyces albulus PD-1; identical to SEQ ID NO: 40833

SEQ ID NO: 40996 - protein, 501 aa, Bacillus vireti LMG 21834
MNESWEGFAGRMQRLNPLFELGRGMDVGELKPYVQTILMQVLLAIFYRELNDDEQRKKSDIKYMVEDAIKQMKLLADDKQIERITSGLLYSGKEEYSQPFEALYYDEIRQVWETQVFRYVTMDELYTNLEMGGSIVYKLTEISQEMIFMSREMAEEFSITIEQLYSMQLIKNGNFRKATRNLDHLISRVNRLMAKEFSFQKEMINNPKILLMEEEMQRADNRAEIENQFEEEKTHFRTITSMIEKTKRRNEEDDDVQKELHLLQEKVGHTRQLHDRFAKLVIQNISYEMKLKAENPSLFWENSLVSFREHFYENLFMKEGVRSFREIETVLSPLFSPKNEFILPLDWIWGEQEFDDKQVTNVVIEEEAEEEIPQVRVTDWNSVSKAWSYVFQQLQAAGEFSLAELSTFPLEVQDLWLEESETIDLWMMFDKKPLKVQVLHRKEETLSDEREILLYKLMNEYPQFQVFEGMKLYTTFDHRAEPLLWQRTKITPFKLCIQEAR

SEQ ID NO: 40997 - protein, 248 aa, Bacillus vireti LMG 21834
MSAETTKRAAAVYFTLLKDKVIDEYSEHFQTYFEPEVRQTVLLLADESGTYIIESPKRIQLVVQPTGSVFATNFTHMKEKHKHIETKRHFHLISIVIMSFLASIDRNQAAKIRTQREGISYYTLERQVNDLIMNWDGILKTKPNFGEEERIDMKEVVTMWKYMEVETDDYGAKKANRRTRIGLIAGAIRLLETERLVVILDRDDIPKVIPKQELFERIEYLYHDYDRYELLKQLMTLEEDGHAEDSSN

SEQ ID NO: 40998 - protein, 1487 aa, Bacillus vireti LMG 21834
MPKIHRIRIVGLKYDGMQKQYKDTTFNFHNEETSTNGLISMMNGGGKGVFLQTIFQILKPGTAWGKQNNRYYQQFFFNNKEQFIPYTFHVVIQWELDGADRRHLVTGGMFSAEQRLAINEESGNESRTLEQEAKILPVFTFYTREFERKEEAALEHIPLVENEEVADTESLKDYLKWNGYDVYKDTKKHYRILDTYGINRKDWDILKDINKDEGGVGKYFEGAEDDHSLFQKRIIPTVSQILHRTDHQKNDLVEIFKSQASIAKDLPVLLKREQAHKEFLEDIVPFDEHLAKGIEHKEFIENSIKVGRQLLGALEHLKKTEEETLLTLEKDIEKLTLKQANLRFQKDNLEFAKAHREVLDWEKKLKEEQKKHTSLQEDVKEKQERREELAFQTILKEWYEYEQTIRSLSQQIAKLEQNSGLVQVNQRMDEIKKEALLQWETSYQSIQEAMKQYDGYQKFLKKKETELSRQDKHMTKEFAQLSAEIDRLYTHMHAFESKEETLITEFGDRITYDLQGTIESLSKQIENKKVQLDELDTKDQESTEKQKQLAASHGTLAQSITFLEEKCEELKRANEVQTQKEAKLVEKLRGLLMDVTVPLSHAQLSKYALQIEELLGKNKHQGEQIKKELWETQLDHSLNDEPFWIANKDVKELKEWIDEKTGIDVFYGTQFLQSLSPEDLAKYLLTYPLLPYGLVVSQHQWQKINQQVLSGRLFNSPVPIFLREEMNKEKDQASFVIINGTENALLTDKNQFTSWKISIAKQIEEKQETLVEMEKTEASFRRILKEIDRFLSSELSIDLERTLSQEQNALLSEKTKLQEIITQVEREKELQLQLKKQLEKTKRKRKELSTDVETLAKFAEEKTRHQENKQVKLERENQKEALTIKQEEIGKEYQTFVELQSKWKQTYFEWKLTIEQTIKEIAAFIEVAAFPAEEKADLSEEVPRLSPHLLEEMNGSIEELKQLQKSKEEQASELLVIQATKESEQKQQKKLEKKLMAHPQDWKEVPEPDEPISILENMLQTAQKEAKTAEKEERDQGTAVTVAETSIQHVIEQREKLAKKVAKHELQPEEWEDLDLEVKAVEINDQTKIAKDELKKTEKQLKETEASITGFEGDLLTLSVILKEEAAVFTDQDVEKIKNQGKACILSWCGEHQAIQEEGKEKHAKIEQSLRNLKLAIEGKDWEIRFKKEVLTTLDHMDTRHYSHIQTIVKNMKRFSQSGLEQLERDKERAEKAQNFWASRASMKVMSISESIRSMIAKMKLKNERGTFPLVQLKEDILPKRAEEIEPLLKQHFVTAINKITKQFDMIDHNNLSLDQEIKQLISDEQILFVSLRNRYPELLVYNMRTDNAFMYGKPKREHYSTWQTINQGSKTKSDGSGGQKLSARMVMMMMLLSVKSETDQSWVPLVCDNPFGQAASAHVLDPIFAVAEKLKFQFIVVTPPELVKTEISQRFDAYYKLDFIREKGKEIVSDTIVPAFRIYQGEEVIQ

SEQ ID NO: 40999 - protein, 357 aa, Bacillus vireti LMG 21834
MGTIDIIETRVRGFIADIQHPSQKKRINMNDLELQLRKLMDDYFEMDGYSLFFKTIQTLQAEGELIPIQNKQYNGKTPALALYYWVNIKAQAAKWNRLEMMKLSDQFDFSYYERHPEWQTKEEWNRIQNVYSFLQSSHQREWVSVEERSLELFGHEKFLLDGEQFSEGRGFLTRIGITDAQLKMVSYGEPFVFWLKQGKAIDEIQRILIVENLSFFHTSIQLLEAGQLDYEPDLLIYGEGTKIERSFSFFFRMFPPKNYLFYYAGDLDAAGCGILIRLIEKYPDSCIQPALKIYRKMLECLEQKNDQKRGQTQNPKTRDAFFQWFTEEEQALLMGLWQENKRIPQEVLTIESWRRWM

SEQ ID NO: 41000 - protein, 498 aa, Clostridium butyricum DORA_1
MDIEYKSVVENYRERIGRLALFDPLYSLSKKKTMDKSNKEVDYFGLGMLSLLFFFENMLMRNKKTGVKELAEFLHVNTVEFINLDEQGFEKVARTIIEIFRPASGKRSSKSFFNYETKSIDNVQYSILKAGRADLQSNVQYYVLDEQGLELIFATKEYFNEFQLSINQLVLRKQLEKGEFAGALRQINEMSLDVKNLQDRIIKIKHEVNRNIISNETYDRYKNIIEDINNRLTHENEEFDELRQFVHETKEKVAAEKTRDEDKKAYTLILRIDKELGQVHYDHSMLLKESIVLKTSALEAAQECLYYAGIDSFNFNNEITARVFSSPLPLHSIRTIINPFLYLERKKSWSPLTVFSPQRIENIGRSDKAENFMEVDEKYKDDNDFIMLSKQFFKFGEIIFEALGEDKKITLENLIMYIQDKKKDVLYMRSFYDLWMILHQKSPIILEDNDESEEDLLSKFYSVFKDKCRILSIEERKGIIKANNRFEIKNMIFRMEDE

SEQ ID NO: 41001 - protein, 245 aa, Clostridium butyricum DORA_1
MQYNNEKIMKAFKLYLILSAKGYAGKDELRLYIADDTIRALVEQFAKEADCTIFSAGDNIYMIPLSKDSVFHVSNDTIKKEYLTSKAVNLDIYLMYLSIIVLIGEFYDSYSSTEPTRDFITMSDWLESINERIESLKEHKEEELKTLDKEYDYNWSAMAKKWSDMDEIKETAKKQDARTVSRVSFLIQVKNFLIKNELVSDIGNNEIELTEKAMIIVQRYYMEYDYNREILDFMYNLDNKEESES

SEQ ID NO: 41002 - protein, 1486 aa, Clostridium butyricum DORA_1
MPSISKIRFTNVVYENGDKRYNDDIFEFDGENGAVLLENGGGKTVFVQTALQAVVPNVSVSDRKIKNTLLLENSPAHIAVEWIINEKPRKYALTSVTLFMKNGEAASYKYVYEYDEGDDESIENIPFVIENQDAGKRASSKDEINEYYVKMSQNRMNAHTFVTKKDYCDYIEDNFKIIPSEWQKIAEINGAEGGVEEFFDACKTTGQLVDNLLIPTVEDALAGEGTKAFADIFEKQREHLKQSKQLRTQISESRTVCDRINEYVNVYKDFSGSQEELDNRKLFLKAIYDFENKEKDENIRKNAANIKENEDNFQKEQLYNMKRASYELRILEDKKNEQYKKYKDFSEEYENLKNINHELLQKYSDLQNAAFKYKIKSEADIEEAEKRKLRDLEQNKEMTDIQSELKENSEKLNGYFKNEENKLKSARNEYKEELSQNNTRLQNIEKHLKEAEKKNNDLNSEKSKNEGQIKVLENDMVKIENAILSNKDKENIKDHLLILKNKVEYLEKNLYDYTSSRNVLKNEKINENNNLNDLRKDLDKEKEINSEFASDIKNIEIKMEEILKYIKEFKSGWFNYDKENIYLKQESILSQIETRVEILRDEKEKCIINERISHRYSDDYKDSEYFTADFYLERLIKKLREDIGYVESGSEYIKKYSRIHDVSIDSLTDTFKYWPITLITSEGNVSKIVDIAEKLNENISYPIIVMSEKEAKKEITEENTILFSNVVIPGLWKNNSDKILFEKWKSEILNKASESTKIRKDKETEFNNACEILKKVRGFYEYCPFEHYKEINALIKNSNEKIRTLQNTVLEKENHIKEIDEEIERINLKEKHDNSEISIVEGQIQKCFDYIGKYNEVNSLKEVIKRIQNEIEGVLLELEKLKKDIDYIKDRIKEKEKDIDEVERNIKELKKDVVYNEVKDYEPVLSDKSVELLKRIRQDINDRLNKKNKDRSSIVERIRSAEEKREIFSKQYEDFKKKLDEDINININDALETKQGDEAEIERLNEKILNLKEPLRKKQNEVVKIKSLYDTSYGGYNTQKEKYLNEYERIIEFDVSCEEISNMLYEEKKEIDSKTAALLKEGKKIQKEKDEIEKALYKLEVANGSENFLFDNTKSYELTEEEKQNIPYKRISSVEEHIKKYKDILTTLYNKKEYVVKEKEKFIKFCEDKINDVRLKEMSVSGVRTKDTLQDIEKWQYLMNERILRAIEMAENDIREHDKEIQQFINHIHSYLVTVCEELRSIPKKTRIKIDDVWKEVFIFEVPSWEEKEGRKNISEYIDFVISALEDDKFKDENNLEDAGKVRKEIEKYLVTKQLLKIVMGDKDIKVKCRKVTNDGKMRSAPFSWQVSNSWSGGEKWSKNMSLFLGILNYTAEKRQHIKPSFNKKHYRSVIVDNPFGKASSEHVLNPVFFIAEQLGFQIIALTAHAEGKFIRSYFPVVYSLKLRNSKNNTTQIITKEKEIKYAYFKDRDSETLVRMGGVKQTSFLN

SEQ ID NO: 41003 - protein, 336 aa, Clostridium butyricum DORA_1
MSDSILQKFLNNHKKKTILLSELEKAVPGNISYDEFAESINKLIENNILTVVNSKNNNGKSIPLYMKYKINKYELKKEGIEEIKEMSLKVHNDINLEEYYKLNIEEFEKDKKYIVMIDDYLKENGIPQSYVTSPERSFNITGDEKWIDEKEGKKLLQRLKINDLLKIINISDPLMFSINYKCINDNIHYHLIVENKATFLAMTDYINETKFTSLILGYGWKINGNIFMLNRQLNLKGKNIIYYFGDLDNEGISIYNSLDTRTEVTLADKFYKALLKKPVSLGKENQNFNKEAVNKFLKYFSQQEREYILDMLKNGKYMPQEALSKEELKTIWNEII

SEQ ID NO: 41004 - protein, 486 aa, Paenibacillus larvae subsp. larvae DSM 25719
MDNKLISIFQNNECSPEMLQSMRDISYLSGVLSDLGSQNAFQTPAEILKFLRIIQLINEEALGLDDQIENSDTLYYRYRNRYSDPDPPSRRKVEQIINVLVKYNWISKQSRQLKMRDIGKRMMDALIRLANDSLAYYMHDDIGRSLFQARRDAELSEAYDDHGISGGNKIASMIRNVENAIQLMYERELEMLADRNALPQLEIIHELMQELEVKLTERFRQFQTLEDSLVLSNLMQQGTAVLAEGTNLSIGMINKYLKFTTMQQTVLLSTINPEKVREFILRMYDPPLESDIPNAHQLMSFMEQNQYKGESADGLWVPVKFAAPISANAIRESVHYLETYEPVINPLREEETEVEYMEEEIYIDQLSELMGESQWMLTKSMIQTDAIESYMEQVEVAPMEQVMIEATSAEWGDAINALTAIAALVGNKKLMIDQASKGVTIDQPLYEKKWEWMSRDDRYQLVRKRNSRVRSDQTETQGNGGNKEDV

SEQ ID NO: 41005 - protein, 253 aa, Paenibacillus larvae subsp. larvae DSM 25719; identical to SEQ ID NO: 40603

SEQ ID NO: 41006 - protein, 1072 aa, Paenibacillus larvae subsp. larvae DSM 25719
MIPRKMWFSGIRDYEGTKMDLSYQQEHVLITGPNGSGKSTITYCMGAVLYSSKVDIEGLRSRNLAPDEIWKAQIRLLFKNEGYARIDAPDYVEFSLSILQEPGQPVKKEFIISTGDDPEEWEEKIRYTSGDRQYNFSAYKKDLQYKYKIDPDMFYLIWYQQEVNQFAVMHPEERFRIFAEMHGIDQVQRNWEESMEKLKETQETLRVAESNVANKKQWLQIKKSELDRYEDNQQRLLEGGKWYAHSLLQLEAYYKREQEQLNSQIEQFELEKEQQQEHIGEMKGREAEVNVKMTALQKEIDQLKAELSQCDEQLQALDIVMKETKTAITELERELQEVSKEKERITRTEDEVKQQLTDVTLQLNDTLEQDTKLNFEIEKSEVRNQELTGVISRLEALIERDQKEETEHQERLRQFVSSHHVQEELNRLEQSLLIAKDKRHEHLNCVRDLKEELARLEDERDWSRRQMDSLTYFSSRGIRAYALRELVELDGSAQLKSEERFNSIKYTIFFDGHMVAVPNDLYHVPLRKVVPDRSVTELMPLQLRVKEGLDEEVFPHAVKALWWVEQFFKDGDIRIEHGVLVDPMGIRGPQEQSRYILSARALIARKEEVARSIRELSLKLEELDESIRQDTKRMQELNSIIHLVREAEAFMTREHERASRVIKQEEETARREELVEHIRELRKVQKELIEKRLKLERDQGELKGEAEFYVRLGQQKEKYQDLNAKQRYLRSLSGQHEELEHQHENCEDQLDNLEKELRKQQRELQDIQDQQEREERKLRQIHNQLQSRIDSLDTVKGGYVSSIQELEEFKRLAPHIYNEVARGDSLQSVNPSQLSSLSQIRSDLETGKVKFNHARNETGIDPEAPENYKVVEKEYQRHQDEYKRTSVLFEQDQERTGQLKDQLETTINMRVLEIKQRFKSYMGLFQFEGEIEWDQFEDRRGRTHFNLYIKARKEGHRGTLEDVSVKARGGKVGKGVSGGEESLSSLLFALALLQNLQTTPGFIVLDEFDSALDEQRKLKVFDLYGRELERKLIILTPKSHEKSYLDRFSKAYIVHHDPTVPRSKVTGIIKKY

SEQ ID NO: 41007 - protein, 434 aa, Paenibacillus larvae subsp. larvae DSM 25719
MSAIENIFSYISQYILKNGEQLDTNYTRIISLVDVDIVKQTARTFRRVGTLTLSLDAYAQEDAQIPDIPLLKWTLGKRAILDDLQAFEWLNKGWIMKEMRFKQDGKTIERVHYRMGYRLFVYLQKKTDREHQEKIRQFASYQLDAQKVLRGLVFDDKERAVLLSSLTHHVSDSIYWKIEELAESDLFPSSWSALKRIKCLTFLLAFIMISNHKELFDWKEIGAQYYGGIGGSKAFDDYKEEFICVLEEWSKQSVEILGMISPGKIIPLYFAGHLRGERSCFQAGPVYALTDLSIAQDQYSTDATTLWLVENRGILTRLSAERNFLRETGSLIVCVDGHLRSVHKRFIHNLLKNSCIRQAIFWSDYDKDGLLIAGEMVEAVSVYPLTLKWICHDHKVIKNWSEYQQYMGALLQEVCLEQELILGKAEDWRRWIIN

SEQ ID NO: 41008 - protein, 420 aa, Bacillus wakoensis JCM 9140
MERFSLSKEIYESIARKLIQTFRPTMGKKRTVHFYNWETRAEEEIQFSYIRDNDFKEGVQYYALDEDGLELLFATREFYSEFQLSIHQLMLRKQLEKGEFKGALRQINEMRIDVETLYERITKIELEIKRNIVSDETFARYETLLNDIYGRLTRENDEFDELADFVTETRNHLYYQDNDKKERKAYTLLLKISKELELVHAEHGGLLNKSVHLKQTALKAAQESLYYAGVDSFNFQQDITARMLNSPAAVETMKGMVAPFLGIEQTKVWSMLSLFEKQVVTNQDNEQEKQTTFLGLENEDEEQLYVSYQREIYQKYMTLLMEWYESNEVRELTSFLSFLRTEGQADVLHERMFYEFFLVLHQRSPLVQDQSFDEQSQAQYVLTEVMEILGGKTLYVEELPDLLQVTERYSIQNMLIRLEE

SEQ ID NO: 41009 - protein, 245 aa, Bacillus wakoensis JCM 9140
MLLEESVVMRAFTVFRELTRNGFVEGETFEEYSSESQIRRLVEAYAEEVDCKVVAAGDRLYLVPTTKLSPFHITNETMKKTYLKSNATNADIYTMYLATLVLFGEFYDSYATREATRDFIQIDDWVRAVTKRIDFLKEHDLEQLKELEHEYSYNWIQIVEKWDSLDDYKETAKRQSGQTQSRLSFIDSVQRFLKDQELVMEIGNGELRLTEKAKTIVQSYFMDYEYNRGILDFLYQHEYKEEEED

SEQ ID NO: 41010 - protein, 296 aa, Bacillus wakoensis JCM 9140
MPAISKIRFTNVIYEDGNKRYNDDMFHFDGENGAILLENGGGKTVFIQTALQAILPHTSLADRKIKETLKLEEGPAHVGIEWIVSDKPRRYAVTAVSLFLGQDKVDSYRFVDEYRENDPNSLAEIPFVQESSDGKRPAGKGEIHDYYKGRTSSSGELFDTLTSFKEHIEDHYGIITKEWENIVKINSAEGGVEAYFDQCKTSKQLFEQLLIPTVENALAANDGDSFVDTFSTRRKGFKEYQQFQETIQENKLIQEKLEHYVDVFARKKGRWMCMKTKNVLEKPIPFFIRSVLNKLS

SEQ ID NO: 41011 - protein, 335 aa, Bacillus wakoensis JCM 9140
MKEVITSYLLSYSRKTIALEELENIAQGEGKSYLHFAELILELEEDGILECVKAKGRTIKKPQLAYSYRINQAILKDEHFNRLQRARSVLHKRIQLDRYFQLPPVQFEQDQPYLQKISEYLQKNNLPQDRVPAPERSFELIGDEKWMTDGSGVELLKRISLWDEMRVIPVADPLMLAVDVSKRENSIHFHLIVENKTTYQGLLPALRDTEFTTLIYGSGRKILRGMDHFHEQVPLTGQHHFYYFGDLDLEGINIWSELSESIDARPAIPFYSACLTYASVAGKRNHRRVEQALANFLKYMSDEDKQKVREMFEKGHYLPQEVLKTNVLQDLWRNW

SEQ ID NO: 41012 - protein, 489 aa, Photorhabdus temperata subsp. khanii NC19
MSLEFLEQARNESMARRELTIQSHALLVVRTLDSIYSALQRNPFNGVELDALAAIMHLFDAMLYYADRERQPGMTRKEAELCLVEHLNEAYPGQEASDYAQVASKIFAAIKDPFRLRYYDFTQRTHSEEQIVRLVRYDQLSGSDDILWSLTDEGMLFYTLRLDETPIERAAILAWRTLKTIRRGEIDKAVHQIQSTQRQLEQYLIGMRMKVRAAQSGDLSASYAQDIRPVLNDSFDKTREVLEHIRNTMSAITEMLVDRRSDLHPDKLNKLRKAQEIFAEVCTFTQRYQDCLLDVNKDFERARLKLIIPRDNTLFRETLEKGALKPLLSHSPDIVEKEIDDLIAHLLAPRSQNDDRHILFDLDALLNLYLDRFEQALPNEIQDPADQPVAIETNLRGIPESVIKKCSDWVSDRLKNRGHVSFRDVFDAYECDELSEQEQQVCLLHIGSLAANSDPTIEVEIGGDAVETALWRANNIKLLTAAPVHPFEE

SEQ ID NO: 41013 - protein, 1478 aa, Photorhabdus temperata subsp. khanii NC19
MWLIKRVYMDGAGHEEAFYKDLTLDYIGLSQAVDSPAIEGQSSPVRNAKVVTSTYQQLVNGGGKSTYIALLLSIFEPSVSDFTQYLANRRQSEYHYRNYFYKELSVILVEMVNESGQTLLLGHAHQRNGDDVDCTLFICDAPDSLLGAPFDEVPSYSRAERNSALRSYANSLHSFESWLNLKAGSEGGMHWRKTTRQNEWRAFLLEQQINVDLIKTMVTFNSEEGGLTRFIEYKTEHDFLGAFFACTMSKDTAERLRELVAHEVERQGELEDIRRNESFLKDVLANWQAFLEPAKQLESTQAQQQLLDDGFREAMRDLTAFIGEAQIEQMQLEDDTGSLQKHIDQAVSLRELLGKRRALLEYDLVLHQLNKQKAMVDALKGEADVNQRQIEITRTAIDYKSYAKALDEYRQADEDLKVFQSETEKPLQVIFERTAGEALGVLEWAIDRHRQQEAKLEEELGQIGKDSNVLRQSYDQVQKTLGGLEADRRIYQGDKRQGESQRDELCEVGLIQKGETPAAALYRLELTLRDAQQSEEQANTAHHQKEQELEAQQHVVREMSVEQSKAHQTLILAEQKHQAAVDSTLALVKTYRTLPASTQHDVDVEDTNWHSERCGLQLDKVLHADTQTLNGMKERLLQARHELDELKLTGHELVTKQINQALEAFYTTGIARDKLWAFPHYLASAFNDDAQRIAEVIDQNPGRYLSLVALDNATLDQVHKISEKLAWKKAPIAIYLLDEAQDLRGVTPELMQVVLSNPDKCGYGQAAYEARLQELENTVALQEASVEAAESVFKVLQSFRGDWRLHYDQYGKHWSSLIEHREQARLTLENADAALKQAEHYEQTLRDEKTDALARLNSAQQQKIQAEKAHDKLSRFVEMEWAKRETAIMKLVQLAEQIQRSEETLVSLREELERQRELAENKRAEQTYISIQISEWNNLCNEPFYSEITATEGIEGRSPKDAHEKAAQSHKQLLEATKGDQVMALKQQRKDAEQAQRDASKRLTAQPAYKVYPDAVKSVALNELALINNRIAHLNEQQKQFTQRLIAAQGTMQYMSKKCEEASKALDEDFVWEEKPIEIETIQTSLAEIVNSLHETEYQLKRQLEQKTLQLKKIENVKERLQNAKTAQAMIQPITVTSAAGLPVRILSITEYADALATQCRMYASLKETLKQQNICVATVWGRFRKRIEEESARDLDARASQEYLRQLDLITTYHEVLGDLDRVGTGITQVFEAVQDSLEQFQRSIDLAVSHLTAHLEGAIKLLKRVMSVKIPEDCPVLPGRPIIKMTDRLNDVAADLRGFASSRLQQWIARGQVPRVPNRDALTADLVQSVFGEGELEVRLLKTNVSRPQWTPVTRLEGSGGQRLTSAFLLFVTVGKVREYDTGISSAGFLLADNPLGKSNADDLMRIQTQMARAYKIQLIYLTGISDENAQSMFDNHLFLNKVQKLRRRDLVTVDKERHALWSASLVAKPKSEPVF

SEQ ID NO: 41014 - protein, 347 aa, Photorhabdus temperata subsp. khanii NC19
MIWLSRLESTANKHRLAAGKAVRTVKANAVLDEVLGVHSQEALRQDVPGLLSQAVTQLLEGDWRAQPKHKASWYRYWRGMSLPNTFVYEGAIVPTKTASEIAWHPWLAHRITGQLTLPIKARLQQLNTYLFRQTKGDKPLFPGLLGHRERSLLIFGDEKALDSMPPDGWKHVTLTLADMGAFRRAPPLPYESSGCRDLPAIIVENSDVYYRLCQLNRVQTHWSLVVYGAGNKVSGQAECVSQLLKVEQVKQLLYFGDLDVAGLKIAHQLHCKLLSDYDISLQLDEWLYDELILNCWVTPEGNANSERFDFESLCGWMPRFVLREMKMLLATHQRLPQEGVASLGLVI

SEQ ID NO: 41015 - protein, 489 aa, Paenibacillus sp. FSL R5-192
MDELVGNSMISILGADTPDHLQKEALRDIVKLAGVLTELREYFEEPLKVLEVLKMLNLIQREALGLDEPLEDLEALFYRFRNRYGTEPNIPMERLLNVLQKYNWIIRGKKRLTMMDAGKRMMDMLIRLANDSLAYYMQDEIARSLFQAKRDADLSEAYDDKGISGGNRLASMIRNVEDAVEKLKERQLEFLADRHALPQIQIIVELMQELNARMDERLERFSTFEEGFTFAPILKRGTEVMFEGTQVSMGTLNKFLKFSHLQQTEVGQEISPQAIRQFIIQSFFKRSDSELPSGHEILSFLEQDRISGERLDGMWVPVQFASPISNRQLADTVHYLENYVPSTEPVQEYAEPQYIQAEEWTEEELEARLQEVEWHMTKTNIRTDEVERVLEEKERLGLQELLLEAGSHHWSDAVNALLAVAALTGAQKASIDESTEVQPESLTEGTIQDKEWEIVERGRGKYAVQRTGGNTQAASIGSDGTTDRGTEPG

SEQ ID NO: 41016 - protein, 212 aa, Paenibacillus sp. FSL R5-192
MGAMERLTAVLSPDEEYAFVQIMFSSSASVRSDSFGLSKREVMKILKLKQEDEQGLISFLKRVNQSISRYFQVVYDERRDRIVALIHVPARQARDLLSSESLALLMFIFYHQEVLQNEYTLFAQLLEAFGHESLDVRRKILMNLDALMKLGAVVKYENPSNEEAYALTTIGSRLFSDSYLKRFAEFSHSQQLHMDDVLKFFKRYNLTAGADS

SEQ ID NO: 41017 - protein, 1079 aa, Paenibacillus sp. FSL R5-192
MTPWAIRFSGIRDFVDTQLELGDRQDHVLIGGPNGSGKSTISFCIGAVLASQKVLVDGLRSRNLPPDQVWRATIELVFENVGNHQVEAAGYVGFRLNMEQKPGDPVKKEFWIYEGEEAWNWDKETRYVTGDSTNHLHEYRHQLQHKYKVDPDTFYLIWYQQDVNQFAVMRPEERFRIFSEMTGIDRMQKHWESVKEEQKEAQQALQTAESNQHQHKLNLGNWQQEKERLLSRNERRLLGLQLTLTASATLREKYEQEYLRLKDKLEEIEDRHSEEIDKWVKLESDHKRYDEEMKQRTQEKEVMDCVLDELEIQVNHLNEEHDARVLEHRKLADQLQELQERIQNVPYAEAEVRERLQIHQAELDRLEQELIEKKQAHIHADEKWDALTKVSAKLDYELRQHEIKLTEAEAMVAQYGSSSSLELEAQQLEKKRIELQDQRRKLEDMLQLLRKERQALTRDEVRSIRQDTSIRSLEERGLTVYTLRDLLEMDEHSPLELEKRLEPVKYTLFVNGKGFRAPTDLYHVELPEVVPERALDVLDEQGLRVKQGLDDIRYAAAQKALWWIHTLHSQVKEQKSGLQDGQLLDSWGRRGAQEKEQWLLNPRGVALRIRQTDEEVLKLEQRLEGVHQQYDTCEERLKSIRSILHQIRTAEGVIADVARRDWAKQEWERTVNELQRWKEKRDQLQLEQEALSQPIVMLRLKLQTLQEYMSIYHEASDQNVELERLRQLGHELERSKSHVKQLERELEDKLAESDQLERALESTARRLREKAQFITATNRVLDDLKLEKKQVSERCGVAEQAYAAEQQFYLNWAEQLPAVFAAITEEQPDFPVKMQWNEAEARHEKEMALTQLQLACREAIDENALENYEKVKQEYDRGAQGVLEARSLLQQLEESLEDLEEKLMNTIHYEVRRIHQRFVHYMDKFSFDGEVSWDMQEQKQGNVKYFLHIKARKQGHRGTLEEISMKGRSGKVGKGVSGGEESLGSLLFALALMKTIDANPGYIMLDEFDSALDESRKAKVFELYRDELARKMIILSPKSHESDYLNYFSEAFAVYHDARITRSALIRIKKKAEIQEQGH

SEQ ID NO: 41018 - protein, 477 aa, Paenibacillus sp. FSL R5-192
MNPEMKEFIYKHYLKKGLELEDNPVTDAGIIYALDVYQVSARIRKRVARITAMMMEDDEDHSLNAFSDIEERAIHLFYSTGVRKTDTDLKRSGLLESDIQALLHRGFILRIVRYEPDGKTGKQSEYRMGYRLYQLLELKKLQEEEKSQELVEDWCSALTTVLNAVKEDPNIFPEDSAKTNQIYEYRQAFWRFVEKFVSVLKQTSGMNEIADSLEMDRSAWTHKKLLLYVEFVIAVAEIVSIKTSFDWKEIGARHYRTIGGSKRFDIHKLSFLEQFEQNLGFPLHVIGLSSQGVITPVYFAGQLSGTGGFQYPQGFLHATTDLTVFSTHFYTTCRVLWIVENRAVVTRMVAEPDFLMRSDSLVLGIDGQLRGGHRKFITDVLTHSKHLEQVVVWCDIDHAGFVITKNVESLLQSHTALITKWILPISSANQREQFQGEAHQWASFETEMEKRLALGHAGEQEAEMGGAERWMSWLATV

SEQ ID NO: 41019 - protein, 501 aa, Paenibacillus sp. FSL R7-269
MNWNDFGERNKRLNPLWSLGAGMNLGELQPYKEMIALSVLLQVYYLELESNEQRAREDLVDLAWSSLERFGIAKSGSPESVERLIDGLLWSGSGGDFEAHYYDDHTRQIGVQKYKYFTVDEDATRISWEENGTTIYRLSEYAMELIFMSHEIIDEFQVSIKLLEIQMHIKHGRVTRAMQDVNELISRVRKMTQQQQEYRNALRRNPKHIFSEYGAQRHERLEEIHQQFDEERKHFDNIHRSLARLANDEKDVIDFNELRQLSERVELSRRVHDELAEVVLSIFEAETNLRLNFPELFWGAAGFNFRTHVWEEWVKPEGLRDGDSLEMLISGLFSPSQDFIYPLAWAWEEQEVGFLPEDTQDVPEEAREEEDIHYVPRGIPWTEVCELWLPVIAGVAAHGSFTFTAEAFTEQEQRRWADCPDAVDLWVQFFHTVITVEEQEAEGHGVADECQKLLQRLMLDHPELEVLRGTRLRTTISAQQQSSIRIPGLEISPYTINIVEK

SEQ ID NO: 41020 - protein, 252 aa, Paenibacillus sp. FSL R7-269
MSYSLEQVQQASRLFFDLLRRKVIPLDDPAAAECLQDTAAYDALQYVAKEAGCRIMNSGHRLHLLVSPIGSGFASNFTQLRNKYSRIERKTHLHIINVIILVFLAEMDQDEQHFKPGQDSMSYIQLSDQVSELFQGWIGMDEDGSFSKQWRLDIQAMHRVWTSLYMQTRSQEEGDSLTRGAGSRIGLIHEGMKLLEEEHLVFISENEKRIFPREELYERMRYLYHDVDRYKELKALVGRTLSEQEGEAHAAY

SEQ ID NO: 41021 - protein, 1507 aa, Paenibacillus sp. FSL R7-269
MPRIERIRIAGLKYEKMLKKYEDMILDLCNEEGPANTLITLMNGGGKGVLLQSIFQLLMPRAAWGKDNENQVEAFFHNHKKQLKPYTFHVAIEWRLDDKERAEYITTGIAMTAQHSMDQLEIKVDYLLYALLKYEETAELTLSTLPLYDHELNTPASFEAIQQFVRERRGEINVYGSSSSDLKKYYAYLADHDIHIDEWRNMRRINGEEGGIKGYFQKNDAFTNHNLFERLIIPEIGSSLGGSLREDEGSLQRMFVDTATVAQRLPMLEQRERAFAEFTSLAAPLYEAVKLGTEADLSFRETERLGAQLYTVIHDELKQAEDKRRRTSDELAGHYLEAKTLRFESDNLKYLRLKEEHDGKQEHFRAVSDNQTRAKQRLEESKQREKLLEVAHYLARRKLQLRQMEQWQKEIEAIEGSLAMKERQKVIQGAKQELRIQWEQVYRLWQAKSLYYSGQQRSHAAEEQILRKGREELLLELGRVDGKLQELTAMIRQYTEDLGVFASRHGQEAAHSPAGALQRALIAARGLIEQIDALNEQRKTAEDQKLLLHTQHTRLAEKLLGAEVQAEELTGRIEAQMNKESQLWSQLVVLLEMYEEHQLLGATALFEAKPLIQERFIRRLEDTEQQTKRLRRDYYQQLLDVELQQEAYWLPNHDIVTVKDTLDALKISSMTGTMYLNDQPYLVREEELERHPLLPYGLIVTKREAAKLQPELLKELLLKAPVPIFVREEMAEGGTDAFLLLAHQGPQMVLQPDHFQEWKRGMASRLREQEEELQAEEAYLAKLRSARQEYERLHLSEHTASLRIRQKSAETLLQELRSQLNEMNAEQARYEEVLDGISRDLSACEADKSEQETRAAALREWSERSRKHEQNYTDKHKSVEQKNNLTKEIAVKDQQLNRLKAEMDSLALQREKWIGDARYSVFPRLQNWFPDVEFPGESAGAKVQGSVVEADAKADDAAADEALNETVQDKLLQLLSTVESLQQSLSQNELEIRTRTAQIKAAREQLAELEAAVQQVDAGWPSAPEPQEAPDMIQSARVRQKSDTMILDEDYQQLRDSFIRCQTELDSLRKELGKSEKAIKEKHERTVELWHEPLEQKEEEISLRVRENEHLLNTCKQALASMDQWLLILGNQSRIMDTHVENRVPLREVPEELQLSVRESCETLVEDWLQRSKESRSQRAEVSRKVKEEKTELSGKVAKSGWNAELETKIQERLNNVHWDDFAIALQVLDSMLQSSRDQMESIRSDKEDMELSRKLWVGRAAKRVVQIVDILKRMERRMIIHNENGHAFPLVKLNYKNINVPRTTDDIEPLVSEYFNRCISSLLERFPKMEQVPASAVRELINDGRMVYAALQNRFPVLQVYKPVTENYFLYAAPEDYHYSDWEVINRGALDEAVGSGGQRQSVQLLVAMMIMTHKRVNRENKGWTVFLYDNPFGEMVSNNVLDPVFEISKALKFQWLIVTPPELVKNDVSIRFGVYWQLYFGGDKGDALDSVLIKGGRKLIPASLF

SEQ ID NO: 41022 - protein, 488 aa, Paenibacillus sp. FSL R7-269
MNTEVWDGFRERVSILNPISMLGKGMDLGVALNPYLFQICLAVLLEVFYREIKDDDHRHFYDIKEIVNHVIEEQGLEATEDHVERIANGLVSFGPPQSRQSFPGKVFDPNTGEFVEKPFFYLTIDTAYSKKREAVYKLTQISQNMIFLSREVILEFSIEFEQLYTLKLIRNKNFKSALQSLDMLITKLRFLISQEMEYRRQFLRNPKIMMGPDKEVRYEKRKEIERQIKEADDRFESMLRMLQKSDLATLEARGQIMEMELKVRKSSELTTSLHTHMYENIELETSTRKNRPSAFMKKRTTSFKTDVWENELLAKGIGAPDTMELLLSPLFSPRPPFIYPLGWIWEEQNTKQSEDELEAEQVQMEQAVEKPKRDWSLLCRLWGPVFKELLRDSSVRLGSRPVSEWTLEALEMWMIFKTEPMHVPLSLGEAKPYPDERMELIRQLILLDPAFKEIAGKTIRAVFTNEAPLQFMGVRISPITIFIEPQEG

SEQ ID NO: 41023 - protein, 247 aa, Paenibacillus sp. FSL R7-269
MTTTSEQLHQASAVYFHLLKNHMVDKKHDALNPYFADPAIQEAVHIFAKQSGTLVLETFTKLHLVVEAQGSLYASNFSHLKENHGRIKSIPEMYMAHLLLMVLLSEIDGDMTIRNERELSGVGFYKWVELMDQTFAKWTKDLTERPELEDQWGIAITTVMDIWNGKHMHDGDGKISAGTKTKFHFCMLAAKLLEEEKLVRLLDDREQTIVYPTDDLYERLDLLYHDQERFKQVKEILALRRPNYASH

SEQ ID NO: 41024 - protein, 353 aa, Paenibacillus sp. FSL R7-269
MSTKWIKTYLESLKRQTFDIFSLEKTVQNHIGMKAFEYASFANDIKALERDGVIEPVKSKMKNHQNGRFPVLPIYWRVLRMKEEPRWDMRKMVQLAAVIDLSFYQSHPECQTEETWRRIESVAAFFMDLTPKSWVEREERSYQLFHDEKWLKEKSAEFLRRLKLSLSDLYVQVSPEPFVHWHKPGKLLEDTREILIVENRAIYHTCLRIMREGLPVCGFRPDMLIYGEGNHIHTSLPYLMELGVPVGLCTIFYSGDFDPSGFWIYSKLRRTYPDYPIHLALSLYASIAYHARVPVEVKPGQPKGEDDVQIFFEDCSGYQDVELAARRSWKERHRLPQEALSYEVLKGEVPHEH

SEQ ID NO: 41025 - protein, 502 aa, Paenibacillus sp. FSL H8-237
MKWSDFGERNKRLNPLWNLGAGMNLGEIQPYKEMVSLSVLLQVYYLELESNERRSKEDIIELTWTALERFNIANLGTTESVERLVDGLLWSGNGGDFESFFYDDVTRQMSVQKYKYFTVDEDATRSSWEENGRTIYRLSEYAMELIFMSHEIIDEFQISIKLLEIQMHIKHGRVTRALQDVNELISRVRKMTQQQQEYRNALRRNPKHIFSEFGVARHQRLEEIHHQFEEERKHFDSIHRSLARLANDEKDVIDFNEIRILSERVELSRRVHDELAEVVLNIFEMETNLRLNFPELFWGAAGFNFRTHVWEEWVKEEGLPSGDSLELLLSGLFAPNQDFVYPLPWAWEEQEVGFIPDLVMDDFEDEVDAEPVQYIPKGIPWAKVVDLWKPVFTALAEQGSFTFTADAFSAEELTGWANTPDAVDLWVQFFHTDFLVQEQAPEGGSGVSDECQQLIQYVLAEDLLLESLRGKTLRTSIAPEPASRVRCPGLDMSPYMITIVER

SEQ ID NO: 41026 - protein, 252 aa, Paenibacillus sp. FSL H8-237
MSYTLEQVQQASRLFFELLRKKVIPLDDPAAAECLQDAGTYDALQYVAKEGGCRVMNSGHRLHLLVNPLGSVFATNFTQLKNKYSRVERKTHLHIINIIILVFLAEMDQDETHFKSGQDSMSYIQIADQVSSLFQTWIQMDEDGRFSQQWQLDIQAMSKVWTSLYMQTKSQEESDLLTRGAGSRIGLIHEGMKLLEEEKLVFISETEKRIFPREELYERMRYLYHDVDRYQELKSLIGRTLAEKDGATYAAD

SEQ ID NO: 41027 - protein, 1493 aa, Paenibacillus sp. FSL H8-237
MPRIERIRITGLKYEKMLKKYDDMILDLCNEEGPANTLITLMNGGGKGVLLQSIFQLLMPKTPWGKDSENQVEAFFHNHKKQLKPYTFHVAIEWHLDNNERNEYMTTGIAMTAHNSLDQQDIKVDYLLYALTDYGEAAELTLSTLPLFDEVTAEPTSFETIQQFVRDRRGEIVPFGSHSSDLKRYYDFLAIRDIHIAEWRNMRRINGEEGGIKGYFKKNDAFTNHNLFEKLIIPEIGSSLNEGLKEDDNTLQRMFIDTATVAQRLPMLEQREQVYSEFLGMAAPLYELVKLGVEAENVVQETELRGRQIYTVIYEEQRNAEVERSKIADELAGRYQDAKQLRFETDNLKYLRSKEETELKQEEFKKLSDDQSRARGRLEDSKAQEKKLEVAYFLAKRLLHTRQIEQWQKEIQAIEGSLEMKERQEVIQAAKEQLRKQWDVVFNLWQQTIREFETAQQDLTAEERELRKERESFLVELAGLDNQINELTLSIRQYTEELGAFAAQYGQDAAHSPAAALQRTVSAAKTILQDIGDLEEQHKQEEIRKLALHKSHAELSEKRRSYEREADELGVLLESQTQKESQLWSQLVVLLEMYEEHNRLGATGLFEEQDVIPARFIRKIDEVEQQTKRSRRDYYNQLMDVELQNQSYWLPNSDILTVKDTLDSLKIQSTLGSSYLNDRPYLEREEELEQYPLLPYSLILTRREADKIQPELMKDTLLKSAVPIFIREEMAASHQASFMLFANQGPQMVLQPDRFQDWKSSIQGKLKEQEQILQDSEAYLSKLKSVRQEYERLFQNENTMTLTTKHEALIKLQAELQQSIINLSNEMNENEGTLTRIGRELAENKALSVEHEQRAGVLQAWIERTKKQEQDYKEKQKIIERKNLVSKELAGKDQQLEHLKVQMESLSGQRNKWTRETEYAMFPRLQRWFPEIVFPTDRQLSDEGEVIPVDPVEQNLLLQQLSTVESLQQSLTENELEVRTRAAQIKAASENLAELESSLNQVDVNWRKATEPTETSESIMAARNRQKTDTTSLEEDYQIVHDGYIRCQTELENLQKELRKVEKGIKEKHERAVELWNEALEDKETEIQERCQANELMLNQCKRSLDRMDVLIQTLSNQIKIMNAHIEDRVNLRSVPEEITLRVRESCEPLVADWLLRIKDSRIRQDEISKKVKEEKNSLTEKLAKNERNSELETKILDRLNTVHWDNFAIALQVLDSMLRSSRDQIESIQSDKEGMDLSRKMWVGRASLRVVQIIDIMKRMERRMIIHNENNYAFPLVRLNYKNINVPRTSDEVEPMVSDYFNQCINELLKKYPKIEQVPALVIKEVINDGRIVYAALQNRFPVLQVYKPVTENYFLYAAPEDYHYSDWEIINRGALDEAVGSGGQRQSVQLLVAMMIMTHKRVNRENKGWTVFLYDNPFGEMVSNNVLDPVFEISKALKFQWLIVTPPELVKNDVSVRFGVYWQLYFGGVKGDMLESTLIKGGRKLIPVSLF

SEQ ID NO: 41028 - protein, 484 aa, Paenibacillus sp. FSL R7-277
MEKLDQPLISIFQTDESGPEMHQALRDIALLSGVLNDLGSQNFLQTPIEILRFLRIIQLLNEEALGLDEPIENVDTLYFRYRNRYEDLDPPSKKKVEQIVNVLVKYNWISKQTRQLKMRDVGKRMMDTLIRLANDSLAYYMHDDIGRSLFQARRDAELSEAYDDHGISGGNKIASMIRNVENAIQLMKERELEMLADRNALPQLEIIHQLMQELEMKLTERLRKFHTLEDSLVLSDLMQAGTSALADGTNLSMGMINKYLKFTMMKQTMLLSSINPEKVRMFITQMYDPPPESDIPNAHQIMSFMEQNEYEGESMDGLWMPVKFAAPLSGAAISEAIHYLEDYEPLVDRMQEDIQETQYIHEEIDITQLEDMMGDSAWLLTKSMIETDAIEGFMQEVEQAPLETVIIEATSAEWGDAINALTALSALVGSKKLTMEEAAAESESEAPRYDKEWDWMNPKDINQVVKHNKASMNRQKRSDDELDG

SEQ ID NO: 41029 - protein, 224 aa, Paenibacillus sp. FSL R7-277
MSLTDELNVNPLNVMQAIKGMLTEAEEIVFMNLLFSSSATIRVGNFGLSRREVEKQLKISNDDEQFNSFLMRVNQAVSRYFKVIYDVKRDQVIVMMRVPARSARSTLSKESLAILLFIFYQQEVLQHEFTLFDQLLNALGHETTKANQRLILNIDQLKKIGALEEYDTNSNEKAYTITGIGANMFSDSFLRRTVEFSQSNQLNKEEVLKFFKRYNLYQEGTDEA

SEQ ID NO: 41030 - protein, 1073 aa, Paenibacillus sp. FSL R7-277
MIPWKMWFTGIRDYQPTMMDLSGQESHILITGPNGAGKSTITYCMGVVLYSSKVDLEGLKSRNLLPDDTWKAHIRLLFKNEGSVRMDAPAFIEFSIYIVQEPGQPAKKEFIIQSGDDPEQWDETIKYTSGDRQYNFTTYKKDLQYKYKIDPDLFYLIWYQQEVNQFAVMDPQERFRIFAEMHGINQVQHNWEESMEKLKEVQESLRTADINVSNKKQWLGIAKAALERYEDNRKRLVQGGRMYAGALLKLETFYKQEQQHLLAKQDQLLVDQEATKDNLDLLQEQAERITYELTQVQAEKEQINEEITLLQEKLSLVNNEINETTNVINELNHQLKELNQEKSGITRTEEEVQAQLEAITLQLQERNRDLAKADADIQESEGMIAQLMNSSYILHAQIQQDKALEYEHQGRLWQYHSSYDVDKNIAALEQRIRDFKHERDKKAKLLQALTEEGFQLEHNQLWSDRQRESLALFKANGVRAYTLNELVELDESARPAAEEQFEAIKYTVFFDGMHVQAPNDLYHVPLRSIVPDRSVTDIQELQIHVKKGISDDVFPHAVKALWWVEQFYQAGEIRVENSLLIDPRGIRGPQEKKNYILSQKALQKRKEEIQKNISQLNTVLADIEDSIKSDTQTMQELHAIIQAVRESEAFLTKKHEREGRAAKYALEVLRLDEQKQQLQEIKVVHKKILEKQVKLEHTQEILQQEADFYVRLGQQKEQYETLQQKTKHRQSLAAQQDMIKQQSDTLEEQLDRIEGNERRQNRNFAKNQDDVEQVTRTLQQMNIQLKDTHEALETSQINLLTAIEEIENFKGTAPFIYDELVNEPAPELSNVKKTQSFTKLRQEYESGKVTFDNARYESGLDPAAPENYKVIEEEVHRLQDEYKRTSLLYEENQERAETLRDQLETTINMRVLEIQQRFKNYMSGFQFEGQIDWKQQEDRKGRVLFHLFIRARKEGHRGTLEDVSVKARGGRVGKGVSGGEESLSSLLFALALLQNLQTAPGFIVMDEFDSALDEQRKLKVFDLYASELKRKLIILSPKSHENSYLDRFSKAYIVQHDPTVPWSKVTGLILKRE

SEQ ID NO: 41031 - protein, 435 aa, Paenibacillus sp. FSL R7-277
MNTSDDILSFISRNYLKKDEQLEMPTVISDDSLVDIDIVKRTARTLRRVGIITLAWQDGLSAEEPPEQQLLRWTVGKRALLDDNQQTFDWLSKGWIVKEVRFKQDGKSVDRIYYRMGYLLYVQLINKQKDTERDIIDQFTFYQSEAARRMEEIMCVPGERMLQLKGLTVFLTESLAWSITTLKDLAVFPANWSVSKRIHSLHFLLAFGMISCTKEIFDWKEIGARYYPGIGGSKAFDLSKIEFLNMLETLSGQPAEALGMISGGQITPIYFAGTIEGKWSNFQAGPVHALTNISVSQDEYSTAATTLWLVENRAVLTRMSAEPHFLQETNSIIVCVDGHIRSLHRYFIRQLMNSSSIGQVILWSDYDEAGLQIAREMYQSLSGHDVRHKWICPDHSILTSWPEYQKRMEDLLQYMKLEQEIVLGEAEDWRSWINH

SEQ ID NO: 41032 - protein, 507 aa, Paenibacillus sp. FSL R7-277
MNWNDFGERNKRLNPLWSLGAGMNLGELQPYKEMIALSVLLQVYYLELESNEQRAREDLVDLAWSSLERFGIEKLGSPESVERLVDGLLWSGSGGDFESHYYDDHTRQIGVQKYKYFTVDEDATRISWEENGTTIYRLSEYAMELIFMSHEIIDEFQVSIKLLEIQMHIKHGRVTRAMQDVNELISRVRKMTQQQQEYRNALRRNPKHIFSEYGTQRHERLEEIHQQFDEERKHFDNIHRSLARLANDEKDVIDFNELRQLSERVELSRRVHDELAEVVLSIFEAETNLRLNFPELFWGAAGFNFRTHVWEEWVKPEGLRDGDSLETLISGLFSPSQDFIYPLAWAWEEQEVGFLPEDTPDVTEEAGEDEDIHYVPRGIPWTEVCELWLPVIAGVAAHGSFTFTAEVFTEQEQRRWADCPDAVDLWVQFFHTVITVEEQEVEGHGVADECQKLLQRLMLDHPELAVLRGARLRTTISSQQQDRIRIPGLEISPYTITIVERSEMIRI

SEQ ID NO: 41033 - protein, 252 aa, Paenibacillus sp. FSL R7-277
MSYSLEQVQQASRLFFDLLKRKVIPLDDPAAAECLQDTAAYDALQYVAKEAGCRIMNSGHRLHLLVSPIGSGFASNFTQLRNKYSRIERKTHLHIINVIILVFLAEMDQDEQHFKPGQDSMSYIQLSDQVSELFQGWIGMDEDGSFSKQWRLDIQAMHRVWTSLYMQTRSQEEGDSLTRGAGSRIGLIHEGMKLLEEEHLVFISENEKRIFPREELYERMRYLYHDVDRYKELKALVGRTLSEQEGEAHAAH

SEQ ID NO: 41034 - protein, 1507 aa, Paenibacillus sp. FSL R7-277
MPRIERIRIAGLKYEKMLKKYEDMILDLCNEEGPANTLITLMNGGGKGVLLQSIFQLLMPRAAWGKDNENQVEAFFHNHKKQLKPYTFHVAIEWRLDDKERTEYVTTGIAMTAQHSMDQLEIKVDYLLYALLKYEETAELTLSTLPLYDHELNTPASFEAIQQFVRERRGEINVYGSSSSDLKKYYAYLADHDIHIDEWRNMRRINGEEGGIKGYFQKNDAFTNHNLFERLIIPEIGSSLGGSMREDEGSLQRMFVDTATVAQRLPMLEQRERAFAEFTSLAAPLYEAVKLGTEADLSFRETERLGAQLYTVIHDELKQAEDKRRRTADELAGHYLEAKTLRFESDNLKYLRLKEEHDGKQEHFRAVSDNQTRAKQRLEESKQREKSLEVAHYLARRKLQLRQMEQWQKEIEAIEGSLAMKERQEVIQGAKQELRVQWEQVYRLWQAKSLFYSGQQHSHAAEEQILRKGREELLLELGRLDGKLQELTAMIRQYTEELGVFASRHGQEAAHSPAAALQRTLIAARGLTEQIEALNEQRKTAEDQKLLLHTQHTRLAEKLLGAEAQAEELSGRIEAQMNKESQLWSQLVVLLEMYEEHQLLGATALFEAKPLIQERFIRRLEDTEQQTKRLRRDYYQQLLDVELQQETYWLPNHDIVTVKDTLDALKISSMTGTMYLNDQPYLVREEELERHPLLPYGLIVTKREADKLQPELLKELLLKAPVPIFVREEMAEGGTDAFLLLAHQGPQMVLQPDHFQEWKRGMASRLREQEEELQAEEAYLAKLRSARQEYERLHQGEHTASLRIRQKSAETLLQELRSQLNEMNAEQARYEEVLAGISRDLSACEAEKSEQETRAAALREWSERSRKHEQNYTDKHKSVEQKNNLSKEIAVKDQQLDRLKAEMDSLALQREKWIGDARYSVFPRLQNWFPDIEFPGEFAGAKVQGADAEADVKADEAAADEVLNEAVQDKLLQLLSTVESLQQSLSQNELEIRTRTAQIKAAREQLAELEAAVQQVDAGWPSAPEPQESPDMIQSARVRQKSDTMILDEDYQQLRDSFIRCQTELDSLRKELGKSEKAIKEKHERTVELWHEPLEQKEEEISLRVRENEHLLNTSKQVLASMDQWLLVLGNQSRIMATHVEHRVPLREVPEELPLNVRESCETLVEDWLQRSKTSRSQRAEISRKVKEEKTELSGKVAKSGWNAELETKIQERLNNVHWDDFAIALQVLDSMLQSSRDQMESIRSDKEDMELSRKLWVGRATKRVVQIVDILKRMERRMIIHNENGHAFPLVKLNYRNINVPRTTDDIEPLVSEYFNRCISSLLERFPKMEQVPASAVRELINDGRMVYAALQNRFPVLQVYKPVTENYFLYAAPEDYHYSDWEVINRGALDEAVGSGGQRQSVQLLVAMMIMTHKRVNRENKGWTVFLYDNPFGEMVSNNVLDPVFEISKALKFQWLIVTPPELVKNDVSIRFGVYWQLYFGGDKGDALDSTLIKGGRKLIPASLF

SEQ ID NO: 41035 - protein, 531 aa, Bacillus weihenstephanensis FSL R5-860
MNTNIESMLEGFNERMKHVAMFSPILRLEQPTKFKELPIPTVALYILLYMLENKLAFNKNTTKEELQYVILEVVRRYWNKNFTKADADELEDWLVSKNLRNRGRAHTFTYYDFNKKDEKTYYFHLIEYGEGMNVFSDTEDRVDDFTLSSTGLELLFKTKEVFGELQITISQLFFKRQFEKGLFTDALRRVHEMHTLIEDEKKKIKKLQNTIIKDALGVSQRSELEVMIKRIDETLKSEHEQFDDLRKLVEEKIDEFYEGSLTEKEQEGIHIIQEIEGKLLQAISVHESLFTEKQKTQNIMSESLESSIIHAFSVHLDFENEILRELIETPATEEVLNAISKPFLPLRHYKTFNPLLALVPQKRYKKKQLKEEEIVEVDEEKMRLQEEEEARKKEEIENKEYRYITALLKHLVEKDKYLLSDIFQMIETQDERLYEDILYNPDPLLGLIAELHQSEYNRFEKVTSDVWKNLPDDKKINRMLIRLSNEFVTLQEIESFSLLETGRSHYIGTMKYKDMLITRGDFYGVDRRNRK

SEQ ID NO: 41036 - protein, 250 aa, Bacillus weihenstephanensis FSL R5-860; identical to SEQ ID NO: 40465

SEQ ID NO: 41037 - protein, 1457 aa, Bacillus weihenstephanensis FSL R5-860
MPRLMKVRMTNIQLDEGKKIISNSLWEPNAKDALFILENGGGKTSFIQLVTQTVLPNSNLSKRLLKEVVYKGTTGHIMTEWKLDGENLPYKYLCLGFTYMNGETKTEELNYFTYLFTYNRGDTLNIDTLPTTVNGKVTRLNEYRKFLRQNDIRIFDVNRDYKKELKRFHLIEDEWKMIQKINGDEGGVDNYFKTASSTYDLLVKLLIPEVENTIFDSEEKKKEIQTYFKEYSKNLLSIPDMKRDLDDFQRIKNCAEDMVKAVENFQVKKKSFAEAQKHVVTLKKSIELQIADKEEKIDILMDDIEKNEALMYEADWKIDSYKSHILKGQIEAKEIELVAAENELKIKTEQLKQAKALLQQLEAKKEYGDYLDIHKKVLQLNEDISSLTASKPELEKRRNESKTLLTEALNFLIEEQQFALDDINNNIKFMIEEVNLKDAERKRLEKEKQDLYGEYKDAENHLNNYQEGKQKLIDELGEEAGYDPSVTFKSLHEQQLQSSVTIAQKEEKSRLNKQDMDEKREFVTGQRIAIDNKNNEVTSLKAEHTTFEKEKYNLLSLLSDDGKNTINIFEDMQEFLRYYQYSKVEAEQKIDKLKQYIHDLAKKLSLWESHDFFVPDETLLKVQQHLEQKGVITMLGSEWLSELSSEEMKSQYLNSYPLLPYTLLVEEANLTEVKKSLNSLNKELLNVPLLFYVKSKLQIQTKSVDAKIDELFPLYDELYLYHQLDVQWFASRAKIQEIIDGLKMELSQYKEQLTFAQITLNNYNEILTALETFHTRYSSTFSESNMQAVQKLSEDIKEIHQQINDTNEHIKMLENENELISKFISDEKVKIEKRDSHIKRFQSFMDLYSNPEELVEKVKYLKDQHDQYGTKVNLCEEEVIEQRETLDRQKDKKRSVESVMDGLDKERKHHQLDKNLEPSDSYTSEEKNEYVARFTAVQKDYADKNQAKNSFEENLSDKKNELLKSEKRINDIGFTLEEVKVFYSQEINLEELITKQKETVNTLSISERDIEIEKGKVGENLKEKTKQLELAKKEIDEKYGREVFLYEWEHEEELNRFKQSKEQLGEANKALVTKKELLRNSIIDAEKAMVHLQIENLPLYNERFGLILEEEIISKSKTYQKYAQTHANEHVTKLQKFKEGKKGVYLSFETYLKKIQESNNPKTEQFANGLSKLKTSDQIFELEFILESFNRIFDTINAFEEDLKRKITECEKDKVKLVDLCFQRVEAIYKNVTEIPKFSKVKVFGYELQLIKMRWDRFDDETTHSNLHYHVQTILETLQRMKRENKLENELNEYLVQKLDTVVLLDKIAPIKKCFVSIYKPRKKSLMTTSPENWKPWDEVSKWSGGEEFSSYMSMFMILVTYLRKKVNARDDSWKVIIADNPFGKASSEHVVKPIMELARNSKIQLFCLTAHNNEDIRSHFECVMSNRYYNTVGIELLQVEHREKGVSLGMFAYEHD

SEQ ID NO: 41038 - protein, 358 aa, Bacillus weihenstephanensis FSL R5-860
MRKWETFIIDYMNKSKKTFVKTIDIEHHLKTLLKQEYDDDGGYFKYSSTLKNMVEEEKIQPVKARGHNHQTPPVFNEYRLVKKERRTNPTHIKKLMTDYPLFNMTAFYDEAEFEKWKFYIDRVHAFLTQNSDTKNNILKANERSFELFRNEKFLLDKEGTKFLANLGLTLSDLNCRRTYEPFVEYQPNPSKKPKNILIIENRDTFDSIKELMIDGIDTWSRITFDMVIYGEGDKIQRSFYFLEEYELEDYEVYYFGDLDARGIHICSELIKIDNRVKPFIPFYIELLNRYGHEPSTRTIERKLKQTIIDDSLKLFSSFFEGDYIDELKRYTDIIQNVQIYIPQEGLNLVILRKLGERR

SEQ ID NO: 41039 - protein, 333 aa, Clostridium straminisolvens JCM 21531
MYQRNDFEGTSLDCLKDFRQRMNNLAPFIHLARKLTGFQKYGEVDMISVGFSVLLFILENMLIGREECSIDNIADFLQLLLKRSYDINMTQEESREMAFYIRDSIAGSGGEVVDFKFRNLETNKDESISIKLIDTSYYEIKKSARYKLTDQGMELLFKTREIYTEFRINITQLYLKQQIEKGIFSGALQTVNELNLQVRQLREKLESLLLNIRQNVLGIDFEDLKQLFSRIKEQFEIERREFGNIKRILKEHRENIEKINYFELEEDELRKLEQIKVLSEKLNITTAEHDRLFSEKLDIVGEYLKTIEISFARESANLLTLKKVSLMYLFQKI

SEQ ID NO: 41040 - protein, 237 aa, Clostridium straminisolvens JCM 21531
MENFSPDSVRKAFSLFMNLIEKSKISKKDEPELFMSYEDPEISYIMRIFEEESGIMVLHSSDTLYYTPRTDNRFFGFTNEELRDKMGFANNTELYLSYIIILSIIIKFFNGENYNNKIRTMLNVEELEAYITSKLQAVEAMENNEEIDEALNFNFRNISKLWLDMPAYDEKIKNFSQSKGTRISYIYRTIKFLQEQGLVNLDNDSEIYTTDKMDTLVISYYPESTRKREILSFIERI

SEQ ID NO: 41041 - protein, 558 aa, Clostridium straminisolvens JCM 21531
MPRINRFRIVNFKYDDDKKCISNEVFEFDGKNALLNLENGGGKSVILQLALQVVLPNTSMGSRNFSDYFKPGASPTHIMMEWKLDGPIAEYLLTGICVSKNSDGLRYFTYTHKYTLPHDFDIKGLEAINEKKQVIGFLEYQNYLKKLISDMRLNINIYSRDRQREYRDKLYTFNLFKEEFEAIKVINQTEGGIDKFFENARKSRNVIEKLIIPNIPQREGETSGILAETFKKHLENLKNIPIYQHNIKMYEAFCEKASKLLSELYDYGVTVDEINNISRDLLTLSNLITIASNRLYDESENLKNNDRDYLAKIEELSYKTESLEYQKILIELESLKARHEKVLREINKLEDKIQKCKEKINFMESAVMYQEVISTRSEISLSKAQLDALSKEKEEIDKEYQNYIYHAKILLEEEITKIQKTMEDLKNQRDVLSKEKKELGIKVKEKDIERDSVRDNISSIRTKLKDKKEILGQLSSYFNLRDMTILLAPSEELLNFTKQRDELLSKIENLKKEIEEINGLMEDLSIKENRINESTAALRQQKDNSMKKSKFLKINTQK

SEQ ID NO: 41042 - protein, 139 aa, Clostridium straminisolvens JCM 21531
MVKFMERKPKRQIYGINVDMLIYGEGKKIINSYSFIEEVAMDKEIEKVYYFGDLDYEGIGIYNSLSLKYGKDLIVPHVRLYQELLKAAKKPPKLRTNQSEVPLEPFLEHFDEESRREIAAILYDGKYIPQEAVKFVPEK

SEQ ID NO: 41043 - protein, 475 aa, Klebsiella oxytoca KA-2
MARRELTIQSHALLVVRTLDSIYSALQRNPFDGFELDALAAIMYLFDAMLYYADRERQPGMTRKEAELCLVGHLNEAYPGQEASDYAQVASKIFAAIKDPFRLSYYDFSQRTHSEEQIVRLVRYDQLSGSDDILWSLTDEGMLFYTLRLDETPIERAAILAWRTLKTIRRGEIDKAVHQIQSTQRQLEQYLIGMRMKVRAAQSGDLSASYAHDIRPVLNDSFDKTREVLEHIQNSMSAITEMLVEGSSKLNPDKLNKLRKAQEIFAEVCAFTQRYQDCLLDVNKDFERARLKLIIPRDNTLFRETLEKGVLKPLLSHPPDTVEKEIDGLTARLLAPRRQDDDRHILFDLEALLNLYLDRFEQALPHEIQDLTDQPVAIETNLRGIPESVIKKCSDWVSDRLKNWGHVSFRDVFDAYECEELSEQEQQVCLLHIGSLAANSDPAIEVEIDDAIETTLWRANNIKLLMVAPLYPFEE

SEQ ID NO: 41044 - protein, 1478 aa, Klebsiella oxytoca KA-2
MWLIKRVYMDGAGHEEAFYKDLTLDYIGLSQAVGSPVVEGLRSPVRNAKVVTSTYQQLVNGGGKSTYIALLLSIFEPSVSDFTQYLANHRQSEYHYRNYFYKELSVVLVEMVNESGQTLLLGHAHQRNGDDVDRTLFICDAPDALMGAPFDEVPSYSRAERNSELRPYANSLRSFDSWLNLKAGSEGGMHWRKTTRQNEWRAFLLEQQINVDLIKTMVTFNSEEGGLTRFIEYKTEHDFLGAFFACTMSKDAAERLRELVAHEVERQGELEGIRRNESFLKDVLANWLAFLDPAKQLESIQAQQQLLDDGFREAMRDLAAFVRDAQVEQTQLEDNMDSLQTHIGQAMSLREQLGKRRALLEYDLAQHQFDKQKAIVDALQDEADTNQRQIEITHAAIDYKAYAKAQNEYLQADEDLKVFQSKAERPLQVIFERTAGEALGTLEWAIDRHRQQEATLEEELGQMDRESNALKQSYDELQKMLGGLEADRERYKRDKQQGESQRNELCEAGLIQKDETPVAAQYRLELTLRNAKQSEELANTILHQKEQALEAQLNVVREASIEKSEAQQKLILAEQKHQSAVDSALVLAKTYQKLPTSMQHDLDIEDTSWHSEQCGLQLDKVLNANSHTLNGMKERLLQARHELDELRMTGHELVAKQVNEALEAFYAAGIARDKLWTFPHYLASVYNDDAQKIASVIDQNPGRYLSLVALDNVTFEQVHKISELLPWKKAPIAIYLLDEAQDLRRETSELVQVVLSNPDKHGYSQAAYEARLQDLENIVASQEVSVKAEKSALKVLESFRNDWRLHYEQYGKHWGGLLDQRELALLILENADAALKQAEHDEQTLRDEKIHAQVRLNNAQQQKIQAEKAHDKLSFFVETEWAKRETAIMKLEQLAAQIQRSKDTLCTQRERLERLNEIEKNKRSEKTLLNIQMGNWGNLCNEPFYSEITATEGMAGRSPEDAHEMAAQAHKKLLEAANGDQVTALKQQLKDAEQAQRSASERLTAQPTYNTYPDEVKAAAINELTVINNRIVRLKEQQKQFTQNLINSQVTLKNFSQSCEEAGKALDEDFIWEEKPIEIETIQTSLAEIVNSLHEIEYQLKLQLEQKKLQLQKMENVKERLQNAKTAQAMIQPITPSSAAGLPGRILSITEYADDLATQCQMYAGLNETLKQQNIRVSTVWGKFRKRIEEELAKDLDTRASQEYLRQLDSIATYHEVLGDLDRVGTGITQVFEAVQDSLEQFQRSIDLTVTHLTAHLEGAIKLLKRAMSVKIPEDCPVLPGRPIIKMTDRLNDVAADLRGFASSRLQQWIAKGQIPRSPNRDALTADLIQSVFGEGELEVRLLKTNASRPQWTPVTRLEGSGGQRLTSAFLLFVTVGKVREYDTGISSAGFLLADNPLGKSNADDLMRIQTQMAKAYKIQLIYLTGISDENAQSMFDNHLFLNKVQKLRRRDLVTVDKERHALWAASLAAKPQFDPVI

SEQ ID NO: 41045 - protein, 351 aa, Klebsiella oxytoca KA-2
MSSVMIWLSRLESTANKHRLAAGKAARTVKANAVLDEVLRAHNQEALSQEVPDLLSQAVTLLLERDWRAQPKRKASWQRYWRGMSLPSTFVYEGAIVPTKTTSEIAWHPWLARRITGQLTQPIKARLQQLNTYLFRQTEGDKSLFPGLLGHRERSLLIFGDEKALDSLPPDGWKHVTLTLADMGAFRRAPPLPYESSCCHDLPAIIVENSDVYYRLCQLNRVETRWSLVIYGAGNKVSGQAECVSQLLEVEQVKQLLYFGDLDVAGLKIAHQLQCKLLSDYGISLHLDEWLYNELILNGLMTPEGNANNERFDFELQCRWMPQFVLREMKTLLAIHQRLPQEGVASLGLVI

SEQ ID NO: 41046 - protein, 539 aa, Peptoclostridium difficile E15; identical to SEQ ID NO: 40947

SEQ ID NO: 41047 - protein, 242 aa, Peptoclostridium difficile E15; identical to SEQ ID NO: 40505

SEQ ID NO: 41048 - protein, 1451 aa, Peptoclostridium difficile E15; identical to SEQ ID NO: 40506

SEQ ID NO: 41049 - protein, 336 aa, Peptoclostridium difficile E15; identical to SEQ ID NO: 40507

SEQ ID NO: 41050 - protein, 539 aa, Peptoclostridium difficile T11; identical to SEQ ID NO: 40947

SEQ ID NO: 41051 - protein, 242 aa, Peptoclostridium difficile T11; identical to SEQ ID NO: 40505

SEQ ID NO: 41052 - protein, 1451 aa, Peptoclostridium difficile T11; identical to SEQ ID NO: 40506

SEQ ID NO: 41053 - protein, 336 aa, Peptoclostridium difficile T11; identical to SEQ ID NO: 40507

SEQ ID NO: 41054 - protein, 539 aa, Peptoclostridium difficile E19; identical to SEQ ID NO: 40947

SEQ ID NO: 41055 - protein, 242 aa, Peptoclostridium difficile E19; identical to SEQ ID NO: 40505

SEQ ID NO: 41056 - protein, 1451 aa, Peptoclostridium difficile E19; identical to SEQ ID NO: 40506

SEQ ID NO: 41057 - protein, 336 aa, Peptoclostridium difficile E19; identical to SEQ ID NO: 40507

SEQ ID NO: 41058 - protein, 501 aa, Bacillus firmus DS1
MNESWEGFAQRMQRLNPLFELGRGMEVGELKPHIQTILMQVLLTIFYRELNDDDHRRKSDIKYMVEDSIKQMKLLADEKQIERITSGLLYQGREEYSRPFEALYYDEIRQSWETQVFRYVTMDELYTNLEMGGSIVYKLTDVSQEMIFMSREMAEEFSITIEQLYSMQLIKNGNFRKATRNLDHLISRVNRLMAREFSFQKEMINNPKILLMEEEMQRADNRAEIEKQFEEEKNHFRTISSMIEKTKRRNEEDDHIQRELILLQEKIGHTRQLHDRFAKLVIQNISYEMKLKAENPSLFWETSLVSFREHIFENWFMKEGGSSFDRVEKVLGPLFSPKNEFILPLDWIWGEQEFDEKQLTETMEEETAEESITHQRVTNWDSVIKAWSYVFQYLQTYGEFSLADLTTLPLEVQDLWFEESETIDLWMMFDKKPLKVQVLHRREESLSDEREILLYKLMQEYPQFQVFEGLKLYTEFDHRAEPFLWYQMKITPFKICVQEEK

SEQ ID NO: 41059 - protein, 248 aa, Bacillus firmus DS1
MSAESIKTASAVYFTLLKDKVIDENSEHFQAYYVPDVRQTVLLMADESGTFIIESPKRIQLVVQPTGSVFATNFTHMKDRHKQVETKKHFHLMSVVIMAFLAGIDRNQAAKIRTKREGISFYTLERQVNDVIMNWDSLLKAKPDFGEEEKIDMKDVVTTWKYMEVDTDDLGARKANRRTRIGLIASAMRLLETEGLIVILDREEIPKAIPKQELFERIEYLYHDYDRYEMFKELMKTEEDQHAENTSN

SEQ ID NO: 41060 - protein, 1486 aa, Bacillus firmus DS1
MPKIHRIRIAGLKYDGMQKQYRDTTFNFHNEETSTNGLISMMNGGGKGVFLQTIFQILKPGTAWGKQNNRYYQQFFFNNKEQFIPYTFHVLIQWELDGADRRHLVTGGMFSAEQRISMNEESGESKPLEQEAKIVPNITFYTREFERKEEASLEHIPLYEDGELAETEGLKDYLKWNGYDVYRDTKKHYRILDTYGINRKDWDIMKDINKDEGGVGKFFEGAEDDHSLFQKRIIPTVSQVLHRTEHQKNDLVEIFKSQASIAKDLPVLLKREQAHKEFLEDILPFEESLAKGVGHKEIVDDSIKAGRQLLGALEHLKKTEEETLIELEKEIEKLTGRQVDLRFQKDNLEYAKAHREVLDWEKKLAEEQKKHIVLQEAVKEKQERKEELAFQLLLKEWHEGEQSIRALSQQIAKLEQNSGLEQVNQRMDEIKKEAAQQWEKSSAAIREAVQQYSGYQRFLKKKANDLSKQDKQKTQEIAQLRTEIDFLYSQIHEFESKEEQLIKEFGDRITYDLTGFIENLTKQIETKEAALEDLQAKENRSNEKQNQLASSHGTLAQSIQFSEEKCEELKKKSEEQKQKETKLYDQLQGVLQGVTAPFSNALLSKYALEVEELLAQNREQGEELKKALWETQLDYALNDEHFWIANNDVKELKEWIDEKTGIDVFYGSQFLQSLKPDETASHMLSHPLLPYGLVVSRPQWEKINKQVLGGRMFKSPVPIFMREEMAGENQQNAFVMITGTEKELLADKNQFTNWKIQIAKQIEEKKDILAELEKTETALRSIIKEIDRFISHDLAGDIEKVLHQEKEVLLSRKTELQAIIVQEEKEKELQLGLREQLEKTKKKIEKLSKDAESLAEFNREKSMHQENKRVKQEKEKQKEAFEKLQNELGIELQTMNDLQEKWSQTYLEWKLSAEQNIKKISFFIDGAAFPAAEKAEASEEVPRLSPYILEKINGSIEELKQLQKSKEEQASELLAIQATRESEQKQQRKLEKKLHALNEEWKDASVPDEPISILENMVQTAAKETKAAEKEEREQEKTVTIAETSLKHGMDQRKKSAKKVAKHEQQPEEWEELDLEVKTVEIADQTKQTNAEIKKTEERKKETEQNITEFENNQLHLSVILKEEAAAFSDEDIEKIKSQGKQSILSWSEKHQAIQDEGQEKHAKIEQSLRNLKLAIEGKDWEIRFKNEVLSTLDHMDTRHYAHIQSVVQNMKRFSQSGLDQLERDKERAEKAQNFWASRASMKVMSISEAIRSMIAKMKLKNERGSFPLVQLKEDILPKKAEDVEPLLKQHFVSAINKITKRFEIIDDNNQLLDQEIKQLISDEQILFVSLRNRYPELLVYNMRTDNAFMYGKPQREHYSTWQTINQGSRTKSDGSGGQKLSARMVMMMMLLSVKSETDQSWVPLVCDNPFGQAASAHVLDPIFAVANKLKFQFIVVTPPELVKTEISQRFDAYYKLDFIREKGKEIVSDTIVPAFRIYQGEEAVH

SEQ ID NO: 41061 - protein, 357 aa, Bacillus firmus DS1
MNKINIIETRVRSFIEDIQHPKQKKKLNINDLEFQLRKLLDDYYEMDGYSLFYEAIQSLQDDGQLTPIHNHQYNGKTPSLPLYFWVNVKAHTGKWDRLEMMKLTDRFDFSFYERHPEWQTKEEWSRIRNLYAFLQSSGERETVSLEERSLELFGHEKFLQDAVSFPDGKGFLARIGVSEEQLKVVKYGEPFVFWMKQGKEINDIQRVLIVENLSFFHTSIQLLESDLLDYEPELIIYGEGTKIERSFSFFFKIFPAKSYLFYYAGDLDAAGYGIMTRLLDKYPECCIQPALKIYRKMLDCMEQRNEQKSGQLQNLKYREAFFKWFTEEEQEHLLQLWQENKRIPQEVLTIETWRRWM

SEQ ID NO: 41062 - protein, 521 aa, Kutzneria sp. 744
MSEPWPVGRAVFDASFSDRVRVLLRTRPVADAADNATRQAWSDQGYDVVALSLTAIDTVIARQGFDHEVTYDEAITGLASLAANTNPTRPHDEHRAVAGYVVDALLNRREREAPFSYSVSAFTREQDGSVRHRRTAVEFRLLTEHEDHGRGVNVLRASTDAINALVGGLEFDVEDEQSAIELMLTRQLQRGAFGQAEKAAERSRLLSVRYADELRTILADTSRDIRTVFNQWAEQVPAQLDRNRVHLEERLAGESRLLDHVRGALDAPDVEPDVAAAAARIAGLLEECRQRHTELHGRLVTARTTFLDEQTRQSFRPVGGLRNPDINDGVFLPLLTMPTKGAIEPAETFSILLAGTQPPKIVRFADLVDDLLAPRREAAPEEPLEPDEELGDPDPPAVPPEVLAAAAAVVDGVELPARLSDLLLAAREASLPAGVDRRHVERLVVLAVLWNYAPETTQDVSTAVDAAAYVLGPTAAVDADGVRITMPGWSGDDLIVAQDEDALARWAERHSAATPRDREAS

SEQ ID NO: 41063 - protein, 1475 aa, Kutzneria sp. 744
MTYQLSRLRLASVGDRAARFTDVTLDMSSSGVDGPGDPVDSILWLRNGGGKSSLLSLFFALLLPLRKDFMGKTVKRYLEDYVASGDTSHTIAEWVARSDNSLLPSAAPRLITGAVYEWVDRRRPLDPDRDRDKLKGWYYTFFAVSGELDLDRLPVHDTGRLRPMTEFVRLLREIAATRPQQFSFAVTDQRNLWMDTLTARGLDPALFSYQKEMNHSEGGVAELFNFPSTDRFVDFLIDLTVDSAQPDLVATNLRKIIDILARKPDLLADRDFCVEVTGRLDLLAERHEVAKNAETEANAARQAAARLAGAFAVAARERGTDAEWFTNEEGRLREEALRLDRERKGVNDVANELHRVAATHRLATAVATHEQAASDHVEARDEELAWQAVVPLAEQMEAEHDAESVRKQMAEEQRQTAPLRVERDRAATALKARYTALAEEEAAAEETETSLADTAETKAAEEDSRALANRDLATQEETRAKGLRGKLIEISDAIADSVRQGDLPGPDAVPDVILAEARTSKREKKDDLDTVRRRRAKRPATRKSLSSRRQALARERATKVTERDHLAAERRKLAERVDELATHPRLAELVQLDDGGRLDLWREAADLRAALTHAIALAESTIVDTRVDAADDDRALEGLRGDAFLPTTRDAQRAAEAIHAATGKAARPGWELLRDLVPEPDRARVLENPVVAELAAGVVVADVAANDVRDAVRSRDWRSVAHVTVCTASQLQHALTGARPEWLVVPNDPALFDPGAAENARAERELRREVQDRRMAELRDQAAADRVLLDRVDTVLHDCPEGHLRALEANIEEYRQAIEDIDGTDRNLLDQSDELERQDAEDADTETALGDELASLEGKIQRLALLRDKVADLPGISQAVEQLDRDARTHRRIEAEATERANEHRHEERGARDGARRHHSNKERYEQADRKISLLEPDHKADVDDAGDPLSLLERQFDGADERWRTVASQSVLAERLRSALARAGQAADALARFTQSARLRSAALLKTGDGQDPARRATARERARNRADELQVALTRAETEVKTAENELSARTPRDRARHTQLDAEPATEEQARAQAEEHSARAAEMSGKVTSFNREADEAGTAAREADTAAQVFAQRAHRLADAAVPVTAPQDVPAYDGDSARAESDTEHLLERLTGANTVASSTGQDRDEAVQQVRKLASDNRFAAIPAAIRDRFTGDDSAVLAARAAGRAEEMRVRRRTIEDQLGDIDRDQGLVVVEIAALVQSVLANLDSAHRHSKLPGTLGGWGNEHFLRIRFTRPTGDEDLRARINAVVDRIVAEKSKPEGLALLKRCVHEAVAPRGFTVKVLKPNSDLAVEPVDVTRLGKFSGGEKLTVCVALYCTLARLRAINRGQGRSALGGTLVLDNPLGTASHVALLRLQRDVAAAHGVQLLYTTGVEDLGAVGQFPNVLRMRNAPGALRTRRYVVVEERFGTTVDGITSVRVARDEAVEEPSS

SEQ ID NO: 41064 - protein, 351 aa, Kutzneria sp. 744
MTLSSLARYLAAHVADAPRQKIEVGALYAAAVEFDRSLATAPAARGEIRHALDELVAAGLVMFPRSLRDFDTRDEPHLPRWVRRPARERVVREKAPVRVWPAALEAAGRIAHRDEELALLDTVTAFLRDSGATRPNVPMRERSLELFGDEKRLDRLLSTRLFTSGALTLNLLRCHTVPIPFVSQWVPGIDDPKGTALLIAENHHTYTSLLEVTRHRAASGGPGRHVGYGTGGQFPSAVLSVPLLSPMPERIAYFGDVDLKGLQIPLAAHAAGSLAGLPGVVPAVPLYGLLFEMGLARPAKQVPTAVATEAAAWLGSFAAQARDALVNGVRFPQEAVGYELLMDRGERLDQV

SEQ ID NO: 41065 - protein, 490 aa, Micromonospora sp. M42
MGEYGDSDVVPDDGLIRRLKALACTAPLNDLDSRKSHLEWVDGSIYQMAEIGLHVIDQVTIAMDFDAGADAEQIIARTVPLVAMQGPARTNEEHGRVARWVLDSLINVGTVDRGFQRVYGEVDDVGVYVRRRFDFKLLVELSGAGGEIYLRATDEAINVLVGALDTDIESAQVAAEVKLDNLIRRGRLADAKLAAEQARYRTVQLGETLRTMLEATRRDVRAVDWDEAAPALLDSALDHVQDRFTNENVILRHIADARDEATDPRHKRQAADLVAIVEDCMRRHSQLLMRLQRARALFRAEQDRQLFADPPRREAADLHGQLLRPIMDLPAADALDPLESYFRSSAGLARPPVVTLSSLVDLLLRVPPEPGDLGRELPEPELVPVTSTDRFSDEHWQMAGLLLDLQENTRPLSELLVEAAELDEDLPALVSLLATHAYAPELGSAMRRGQLHVLLALPAGGPLPPAGVGGVNGDDLLLSTVALLDDEASR

SEQ ID NO: 41066 - protein, 1461 aa, Micromonospora sp. M42
MYELSRVRLYSVGPEPARYQDVTLDFSDIGRPVRFQADTLLEPHQPHRRPSPASVLFLENGGGKSVLLKLIFSVMLPKRRQIVGTTSTRVLENFVLAGDVAHVVLEWMHAETGRLLLTGKVSEWRNNTVSGDPENLATFWYCLRPTEAVRLDTLPFAADRRLVSRVAFRQRLAEKFASDPRLEFFASRQPGEWTRQLDQLGLDPELFRYQREMNADEGEAAGTFTFATDEAFVEFLLRAVVAEEDPGEIADLVAQHSRDLAQRDGLLLECEFVAGALDRLVPLADAHKAARATEVTAVGAQAAIDRFAQSVAARSRAEQELLAVREQYARETAEALAAARTDAEHRQAAVKELKRLALVLQLSTARATEAVAKQDHEDADALAESWRETEKAAELRAADAAAAETAALVEDAEESARPILDAKKAAAAQLARGLLQVANKAADAAKEAGRLATDCTAGAAAAEDALVRETQEAARLDAGAAVAAKRIGEIDMMLSDAAASGLLPAGPSAAAAAALATEAATEVGRRLTAAEEKAAEFDEERVAAVRVENDAATAVVQANEARLRAMEAYEAAAARAAELAGRPRLAELIDSEEVRLATDAEPLAERLAAAVAQAESARARLQAEATADERIRTALEADGLLPPPAEVTAACEALNDAGIVAWSGWDHLTQIDNLERRRELLRGAPQLVSGVVLNDPAQLADAGAVLASREIYPVFFVGIGTTEALHQAEPAGAEAFVPLNPALYDQEAAEAARAAVERRDEERREQLATIARSLVVDQELIRDLRDWRRDFPPGRLTEMEEHCADLTAGLEQAESAHILAAEATRDVTDRRTAVRDSLPGLRAELLAAEQRDRDLQALARHEAERRTLDESRRQALADAATHARLATAARELAQTRREEATGHQRHADGQSDVAVRARRELAQVPGGGDVSPDAPVPAEPVEVLRARFIAASDAYTRGEVGAELRVRLDQAEREQARARSRFEELTPAVRQRALELLDTPEGADFGSRSAARRRSTDRVVRASENLRTAVAATAAINARLSELTEQRALPADFIAPADEDNAAALLNAAERAAARADRRHAELGEVAEKAGAELEAARGIARGFADLAEDLDVSAGESASAFSDDLDTARARKRSLRTALNAANDSAATERARLTRTTEALRRHAVDSRFRLLQSTIRQQMSALDSASLAGHADEWITALRPRLRSLTDELTSIDRHRDMINVRLHGMVGAAFRTLRNAQRLSRLPEGLDGWSGQEFLRVAYQPLEEAALLEAIGEVVDEVVDGGGVDGMTLLLRCVRRAVPRGFRVDVLKPDSALRPERQRVSEIKDVFSGGQQLTAAIILYCTMAALRANNRGRIGNRHSGVLFLDNPIGRASAGYLLELQRSVAATLGVQLIYTTGLFDANALSAFPLIIRLRNDSDLRAGRKYLAVDHVFRKRLDELGPEDAGGELTAIRTFVRAEH

SEQ ID NO: 41067 - protein, 318 aa, Micromonospora sp. M42
MLLELEDSGRIRLLRADDREKVALPAAIWLLPTRSATARPAPMPPWHPEVRGLATHWPVATPKQRAAYTAVNRWLMTNPDRSPVPIRERSLEIFGRHGSAADFPMPEKVLDTLRSGPLFSDRDELLRLIGAFMVHPPLLAERFTEAIGDGYYQRVGAGRMLLVIENATTWWSVVNSLPERHDLGYVAWGLGNTFTASVNTIRARHAVAEIRYFGDLDLSGLRIPLSASATAVHNGLPQVRPAMHLYRALLQLGLPIAAKEKAAAPADAARLAGWLGENMGQVAALLTRGERLAQEWVGFRHLRTDASWHADVRIAAWA

SEQ ID NO: 41068 - protein, 503 aa, Paenibacillus pini JCM 16418
MAIYEEIFERYHERKKTLNPCFQFGTGIQIPTEYSKVYKDILFLMLLEIFYRELRDNPERTDRALKEIAEEIMIKVGVQANTDFIERLAIALLSTGTGQYREAFISSYYNESTSSFEEERFLYLTEDTEAMLRSKSDAQIWKLSESGQKLVFLSLEMADEFGIEIQQLYTLSFIRKGNFQKALGNLDHVKAAVRAKATQERDYAKRMRRDPRSIFSKEREHIERRKSLQEQFQEQKKLFYEMDNILHEKLKEMTDPKVIRDIEYLKEKVDECVGEHSKLTELVVQNYSQEIALQREIERLLNYNRSFVKDIWEKHIYSEGFIFEDGFECILEPFFSPKQEFIYPLSWVWDEHHVGEIDSEVAASAEEPNDIPEIKNAKRVPIDWDSIANLWTPVFKAALEDPQKTCALRECHIGEWTLDALEMWMKFRDGDFELKSSLSPSRKYDDDRAVLLQEVVKRDPGMIEMTNQYKIRVSTDGGEQIQNELVSITPFTLTLIPKEYNGG

SEQ ID NO: 41069 - protein, 250 aa, Paenibacillus pini JCM 16418
MYDISQIHEAHSIFLHLLQHKVVKKGDTAIENYFHDMNIQQLVKRFADTSSTQVLVGNMNVHLVTKPKGSFFATNFTQMKDQMKERKSDGRVETRLELYMIHLVIMVYLSEVDGESTKGSHIDLYGGIRYLELTTRVTEVLEFWNKLLENDPEFGKRQKIAMTQLFNLWDTTKLQPDEDEQLRPNVKTKFGIVHMAMRLLEQEKLVKITDQRVTSLEALHERVELLYHSEQRYQEWKRLIDAATERGDRE

SEQ ID NO: 41070 - protein, 1300 aa, Paenibacillus pini JCM 16418
MSAINAFRATNVKYNKQQFVMDNLYLSFANDTDLVHALATMPNGYGKGVILQSIFQIFKPLKDWQKGKGRVSQFFHSTSGFNPYTLYSALEWKLDVAEGRFLITGIAISARRVKEDDSGPKTDVYYKLFTIKCDSSSDHRLANLPYWDEETGESWPLSKWEDYAKEFPQQIRLYNKDELRKYRSYLQENGIFADEWDEMYEINQNEAGTTIYFEKLGADHNDGLFRKVIIPSIESNLRRQVSKEGRDLKELFIEVAKIAHNLNTLLSRKSAMTGILGMLEDVDAVYLKLQEAEKELNNHAQRGSYLKSGLLERIEEAERDLDTLEKERQEADDAEIDARFNLKNLTYIEDQYKISEQGKMIREMKAILETETSNASEIKRLMDEADPAIIRKEYEEASRNLDITLSQIKSLMMREQLTDVKAQQEELEKNIENEWPSLLQDLSQTVNHAVGYQSVLNTNIQMAESELTELHKEISDLSKEIGTTEERIRVFQTKLNETYTRHNLTDHFTFSQLIKMTGEDYQKFIESIEQEEEVHQLLSQQCADLEREKVKLETKVEHEEAYIHLLNDRYNKQLNLEVDAAIKLQPFSGSSLPWQQEKYVVWLQEQLPELTAEASRREQILRREEEDIRRLESEHMITEGGFWVPNSTILQLRDVIKSHGYTCLLGTEFIQERSEVEQESLRQNAKLLPYGLIILENEREQVLHLTDFKNRILFYPVPLFSVEIIDNMSAPTFITVPNRSEEIAFNPAVLESYLAESEEEVVRRREKLGLAITEIKNLKSALKLTEKALDSDKSAEQLGEECQALEDACERKKKQINDYKSDIEDLQSKIAIVRNTLQKSQKELKEIETKMNALEDLNISWVEHQLNEKKMNELNGSEELAKAKIQKISSNKQATQQELEEQKKLYSDWKNSIQQELNRYREAIPSLSVFDFQLNEPSFFPPSSWPTIPLSLEDNFNNWSICQKTLEQASSEMTRLETFKAIYAKQQEEKRRELIELDEKWANKVPPTESLDVLKQRRKQFAEEFETADLKRQQYVVKLTDLQSTERAMITYAEKLKVDIEKEFKQREVDFRSGIDVDYQRKEFNYKLSQANEKLKNARNSISDTYKKKLIWEQSSEALQHLSESKHRVPREVYFEVGTDAKSTVRDWVTRASILDKELRYVNTRCSDAVKDVQKRIKEAKWDDEMKQHGEDFFDSLLDIGEAIHVRLKISEAKYIYEGIIEREEENLNQAQEAELRWVQTATEHSRQIINHIHEMVKGMSIRNRYNISFPLMKLKEESMPRIEDVEGRMKDLFRQTLRF

SEQ ID NO: 41071 - protein, 351 aa, Paenibacillus pini JCM 16418
MIRDTIINILVETKNKFTINELEDKVMQKFSSLDKYDRAGGYLGFYQIVQSLHEEGEIIPLKANEESSKVPSLPLKWKKRTNEVSQSWSDLQFVRAEAGNLNVAFYKRHPEMQTELEWGRIETVLQFLPTRDSRIYISKEERSYELFGQEKWLDKKEDGDRFLKRIGITLEDFRAKSYGEPFVFWQNPLSNSSKQALIVENLSAFHTIKRALITFNHIYNLQVDVLIYGEGYHIMRSFPFIDEVGAPEKIYYAGDLDPHGLSILIDLCKNYPEYPLLPAENLYRAMIRNHSQTTPANGEFLTTVLQDFLSRLKTDEETTRAIKDLWDCKRRIPQEAVNFETISKECNDGYI

SEQ ID NO: 41072 - protein, 470 aa, Lysinibacillus varians
MEQMGVKEPISIFTSDYQTAEFMKSMRDLASLAGVLKELSTEKMYDSPIETIRFLNVIQLINEASLGIKDAIDNEEVLYYRYQSTYPQDNEPPTLAQITRMLTILERNNWIVKQSRQIKMRDRGKNLMDGLIRMGNDALAYYLQDDIGRSLFQARRDAEISAAYDDQGISGGNKIASMIYNVEEAIKQLEERQLELLADRNALPQLEKINQLMLELETKLNERLQQFGTVEESTKMSDLMRRGTAAISKGTSLSLSLLTKYIRFVNMQLTPTANTISPEKVRQFILAMHSPEANTNIPTAHDILSFMEQNQYDEEGMDGLWVPVKFAAPIGPQDITDAVHYLQTYEPKLEKPMTHQLEHTYEETEMDIRPIKDALQDASWKMTQSLIDTERIEHYLSEHGETEMEELIVESSSNKWHDAILSLLAVSALTSNKKVEQQPIDYTKDYEKQWEWIDDDDKRFTVRQYPYDDE

SEQ ID NO: 41073 - protein, 223 aa, Lysinibacillus varians
MTTNDLPFDNTLMMMNSLKGYLTTDEELTFMQLLFSSSASIKGANYGLAKKDLEKLLGIKNGDDDAFHSFINRLNAVLSRYFRVIYDDRRDRVIVMMHVTAKHAKSTLSSEALAIMLYLFYHQEVLGHEFTLLHQILVDFGHESLNANRKLKNNIDQLKKIGAVTDYESVSEEAYMLTAIGVHMFSESFLRRTTEFAQETQLSKEEVMKFFNRYNLHIEEENE

SEQ ID NO: 41074 - protein, 1065 aa, Lysinibacillus varians
MIPYQLKIHGVRDYSSRSIHLGEPDEHILITGPNGVGKSTLTFCLGAVLHSSRVELEGLRSTNLKVNDPWYARITLVFLNEGKSKIDGPKFIAFQLTVNQDTKNSPIQREYEVLHGQDKEHLTSHARYTSGGTAGRTFKAYREDLRVRYKIEPDIYYLIWYQQEVNQFAAMYPEERFRKFSDMFEISEMQKEWEASLLKIKEVRTEIEYLKGFQKVAELNLNAAQTDLNKYLDNKKRIFTSGQKYYTLLHRMIGYYSTSIDKTSEQKAHDQVEKEKRIVAQQKLKQNISELEQQKTQVSQNMEVLSAQLKHITNQLQQQQDEDTQQQNLQQQLEQQLEKIDEKRKYLRFDADTTQRKLEQTKKQYATITKQLAELNNQHTQLRKQERELDQETARLKFTSSQLKDEITKAEKHKAIYGSSAQIEQQINTLSLQNEQDFEQIQRLKINLQMMEQNITQYELKKVVSTRQQQGLLHLKQQQLEAYTLRELIELMPSAPVQLEKQLEAIKYSIFYVGKNYKPVNDLYYVSLPQLVPTESISKLPEFGLQIRNDLTEQQRNYANKALWWVKQFFLESPKIEQGLLYDTRGVRGAQEAAQYILSDGAIEKLLQEVQQNYSKTKNEQQRLKQQYKENQQQLKQLQGHLYTMQLAESTLLKQADYASYLQQLALVEQKLSALYDEQTALEIQLDELKSEQIEAKHNQDFYEQQWTIHEELGAFAGQQMQLQQIVQARKYLQQNIRALTTEQEIKDREINQQKREQSQLGEQQQQFKSKLNIVESQITGYELTIQKAMDKLELDETMKSRCQLDLIELEQILPPEAQQLDEQLATNMSLTMLQAESVQAQAQLRNARLEKINENAQQNYDQQKADFDKKNAELAKSEQLLESNTIRANEQEDRLETTITMHLIKINTLFQKYMDLFQFEGQVEKERIEEKSGRVTFRLYIKARKIGHQGALEDVSMKARSGKVGLGVSGGEESLSSLLFALALLQNLTTSPGYIVLDEFDSALDDERKNKVFNLYAQELQRKLIIVSPKGHDETYYNCFSKVFIVEHDATIPKSTIRGIQNKK

SEQ ID NO: 41075 - protein, 393 aa, Lysinibacillus varians
MHEAFIESYFLKKDETIEKVEQQEQLFVMTIVRKTARTFRKVAHLKITMKTEFTSPFPKKLAIYKFTPKAKRTLHETNDTIQQWLQQGWIVREIRYHTDGISVKEDYYRIGPAYIETQHKSEQQQIIKQQQQMQALQQKAEQLALPELFQQAIEWNVLPEQWTMKKRMKYIEFCLAFYALSLQKELFDFKEIGATLHDTIGGSKVFDQEREAFLTQLEQSGIDPTLYGLVSIGKIVPIYFTGHVQNSVATYAIGAVHATTDNAVLTSHFITTNTTLWLVENRAILTRMAVETEFLRHTNSCIVCLDGQIRSAHKQFIEQLLQSSIKQTIIWTDTDSAGITIAKYAAALVKGTVKIVGRDYELYHSIESYATQVQEAHEQEQQLGGVEQWSKWV

SEQ ID NO: 41076 - protein, 483 aa, Paenibacillus sabinae T27
MDGNLISIFGADAPDHLRKESLRDLVKLAGVLAELREHFEEPLKVLETLKMLNLIQREALGLDEPLADGDALFYRFRNKYGYEPGIRLDRLLNVLQKYNWISRGKRRLTMLDAGKRMTDTLIRLANDSLAYYMQDDVARSLFQARRDADLGEAYDDKGISGGDRMASMIRNTADAVDELKERQLELLADRNALPQIQIIADLMQELNDRMNERLSPFEGVEEADSLPPLLQQGREIMREGMEISLGTLNKFLHFARLQQTEIRTEISPQAIRRYIIQSFDKATDSEQPRGHEILSFLEQDRVPGERLDGMWVPVQFASPVSNLQLADTVRYLEGYVPKAEPILERLEPDYPKAEEWTEDEIGLHLARMEWQLTKERIRTDEVERILQKREAVGLEKLVLEAGSENWSDALNALLAVSALVGGQQAAIEREEGGAEHAQAPETRTEWQLMNKGGEKNVVRRTGGQLQQSAAGSDGAPDGGAQSR

SEQ ID NO: 41077 - protein, 226 aa, Paenibacillus sabinae T27
MSSEELEGSYSNLPLAAMERLTAVLSPDEEYAFVQIMFSSSAAVRSDSFGLSRREVMKILKLSPDDGQGFVSFLKRVNQAVSRYYRLVYDERRDRAVVLIHVPARQARELLPSESLALLMFIFYHQEVLRNDFTLFTQLLEAFGHESLDVRRKILANLDTLIKLGAVSRYEHPSGEEAYALTAIGARLFSDSYLKRFTEFSHSQQLNMDDVLKFFKRYNLEAGEGM

SEQ ID NO: 41078 - protein, 1077 aa, Paenibacillus sabinae T27
MNPWALEFSGIRDFTDTRLEWGGPEDHVLIGGPNGSGKSTITFCLGAVLASSKVDLEGLRSRNLSPDRVWRAAIQLVFANTGDSPVDAGAYIGFRLNLEQQPGEPLRKEYYICEGEEAWKWDTETRYTPGDSVNDLHEYRQQLKHKYKVAPDAFYLIWYQQDVNQFAVMRPEERFRIFSEMTGIDRMQHNWEKVKEERKDALSTLQTAESNQHSHKLNLGNWQQERDRLLGRNERRRLGLHTALTASAALERLYGRESDALRERIGGLEERLGAEKERLMGLEEEHRSCQGELEDKTRRKNELDGLLAELEGRTDEERTLRERLSDEYRQLEDILRELDKQMRAIPYSRAQVEERLAQDRARLRETEAKERETEEKCREAQTHLDRLIGEVGRLKYAQEEDFRRLGDAKKMLAQYGGSAGLEREVESLESRRSALLDSGRELEQGIRSMKEEVFTLMKGGGMLSLRQAKSIGRLRGQGLTVYTLPDLLEMDEHVPLEREERLDAIKYTLFVDARGFAAPTDVCHVELPAVVPERTMDELPPLGLRVKQDIDDKTYAAAQKALWWIGTLISGAASSKAWLGNGQLVDALGRRGAQEDRQWILHPRGIKLRMKHAGEELDKLELQLDSERRELEECEERLSLIRSVLQMIKEAETIVGDVAERDLRKRELERKTDELRKWTEIRDESAGEARQLNRTAAELAVRIEALEGYRQVYDRADRESSAIERFGQLGRELEISAERVQKLERELQDREEEADRLTRSLESARRRVREQLQYIEESNKTLEALTREKNDGLELLEVAEESWTAERRFYSDWTVRLDSVYATLLEESPDFPPAADWNPAQAKARKEDALVQLNQAIIETVDENAVENYEKVRLEFERGEQEVQNARMLLRQLEESLAELEAKLISTTDYEIKQINSRFTRYMDLFSFDGEVSWELQEMKQGNVKYYLNIRARKQGHRGPLEEIGIKGRGGRVGKGVSGGEESLSSLLFALALLKTIEAEPGFIVLDEFDSALDEGRKSKVFELYEQELSRKMIILSPKSHESDYLWHFNEAFVVYHDARVPQSAVIRIKKKAVVKV

SEQ ID NO: 41079 - protein, 488 aa, Enterobacter aerogenes MGH 61
MSLGFLEQARNESMARRELTIQSHALLVVRTLDSIYSALQRNPFDGFKLDVLAAIMYLFDAMLYYADRERQPGMTRKEAELCLVGHLNEAYPGQEASDYAQVASKIFAAIKDPFRLSYYDFSQRTHSEEQIVRLVRYDQLSGSDDILWSLTDEGMLFYTLRLDETPIERAAILAWRTLKTIRRGEIDKAVHQIQSTQRQLEQYLIGMRMKVRAAQSGDLSASYAHDIRPVLNDSFDKTREVLEHIQNSMSAITEMLVEGSSKLNPDKLNKLRKAQEIFAEVCAFTQRYQDCLLDVNKDFERARLKLIIPRDNTLFRETLEKGVLKPLLSHSPETVEKEIDGLTARLLAPRRQDDDRHILFDPEALLNLYLDRFEQALPHEIQDPTEQPVAIETNLRNIPESVIKKCSDWVSDRLKNWGHVSFRDVFDAYECEELSEQEQQVCLLHIGSLAANSDPAIEVEIDDAIETTLWRADNIKLLKVAPLHPFEE

SEQ ID NO: 41080 - protein, 1478 aa, Enterobacter aerogenes MGH 61
MWLIKRVYMDGAGHEEAFYKDLTLDYIGLSQAVGSPVVEGLRSPVRNAKVVTSTYQQLVNGGGKSTYIALLLSIFEPSVSDFTQYLANHRQSEYHYRNYFYKELSVVLVEMVNESGQTLLLGHAHQRNGDDVDRTLFICDAPDSLMGAPFDEVPSYSRAERNSELRPYANSLRSFDSWLSLKASSEGGMHWRKTTRQNEWRAFLLEQQINVDLIKTMVTFNSEEGGLTRFIEYKTEHDFLGAFFACTMSKDAAERLRELVAHEVERQGELEGIRRNESFLKDVLANWLAFLEPAKQLESIQAQQQLLDDGFREAMRDLAAFVGDAQVEQTQLEDNMESLQTHIGQAMSLREQLGKRRALLEYDFVQYQFDKQKAIVDALQDEADTNQRQIEITQAAIDYKAYAKALNEYRQADEDLKVFQSETERPLQVIFERTAGEALGTLEWAIDRHRQQEATLEEELGQMNRESNTLKQSYDELQKMLGGLEADRERYKRDKRQGESQRGQLCEAGLIQKDETPVAAQYRLELTLRNAQQSEELAHTILHQKEQALEAQLNVVREASIEKSEAQQKLILAEQKHQSAVDSALVLAKTYQKLPTSMQHDLDIEDTSWHSELCGLQLDKVLNANSHTLNGMKERLLQARHELDELRMTGHELVAKQVNEALEAFYAAGIARDKLWTFPHYLASVYNDDAQKIAAVIDQNPGRYLSLVALDNVTFEQVHKISEILPWKKAPIAIYLLDEAQDLRRETSELVQVVLSNHDKHGYSQAAYEARQQDLENIVASQEVSVKAAKSTLDVLESFRNDWRLHYEQYGKHWAGLLDQREQALLILENADASLKQAEHDEQTLRDEKTDAQVRLNNAQQQKIRAEKAHDKLSLFVETEWAKRETAIMKLEQLAAQIHRNKDTICTQKERLERLNEIEKNKLSEKTLLNIQMGNWSNLCNEPFYSEITATEGMAGRSPEDAHEIAAQAHKKLLEAANGDQVTALKQQLKDAEQAQRSASERLTAHPTYNTYPDEVKAAAINELTVINHRIVRLNEQQKQFTQNLINAQVTLQNFSQSCEKASKALDEEFVWEEKPIDIETIQTSLTEIVNSLHEIEYQLKLHLEQKKLQLQKIENVKERLQNAKTAQAMIQHITPTSAAGLPGRIQSITEYADNLATQCQMYAGLNETLKQQNIRVSTVWGKFRKRIEEELAKDPDAQASQEYLRQLDSIATYHEVLGDLDRVGTGITQVFEAVQDSLEQFQRSIDLTVTHLTAHLEGAIKLLKRAMSVKIPEDCPVLPGRPIIKMTDRLNDVAADLRGFASSRLQQWIAKGQIPRAPNRDALTADLVQSVFGEGELEVRLLKTNASRPQWTPVTRLEGSGGQRLTSAFLLFVTVGKVREYDTGISSAGFLLADNPLGKSNADDLMRIQTQMAKAYKIQLIYLTGISDENAQSMFDNHLFLNKVQKLRRRDLVTVDKERHALWAASLAAKPLFDPVI

SEQ ID NO: 41081 - protein, 347 aa, Enterobacter aerogenes MGH 61
MIWLSRLESTATKHRLAVGKAARTVKANAVLDEVLRAHNQEALSQEAPDLLSQAVTLLLEGDWRAQPKHKASWQRYWRGMSLPSTFVYEGAIVPTKTTSEIAWHPWLARRITGQLTQPIKVRLQQLNTYLFRQTEGDKSLFPGLLGHRERSLLIFGDEKALDSLPPDGWKHVALTLADMGAFRRAPPLPYESSCCHDLPAIIVENSDVYYRLCQLNRVQTRWSLVIYGAGNKVSGQAECVSQLLEVEQVKQLLYFGDLDVAGLKIAHQLRCKLLSDYGISLHLDEWLYNELILNGLMTPEGNANNERFDFELQCRWMPQFVLREMKTLLAIHRRLPQEGVASLGLVI

SEQ ID NO: 41082 - protein, 488 aa, Escherichia coli UCI 57
MSLGFLEQARNESMARRELSIQSHALLVVRTLDSIYSALQRNPFDGVELDALAAIMYLFDAMLYYADRERRPGMTRKEAELCLVGHLNEAYPGQEEPDYAQVASKIFAAIKDPFRLRYYDFSQRTHSEEQIVRLVRYDQLSGSDDILWSLTDEGMLFYTLRLDETPIERAAILAWRTLKTIRRGEIDKAVHQIQSTQRQLEQYLIGMRMKVRAAQSGDLSASYAHDIRPVLNDSFDKTREVLEHIQNSMSAITEMLVEGSSKINPDKLNKLRRAQEIFAEVCAFTQRYQDCLLDVNKDFERARLKLIIPRDNTLFRETLEKGALKPLLSHSPDTVEKEIDDLTARLLAPRRQDDDRHILFDLEALLNLYLDRFEQALPHEIQDLTDQPVAIETNLRGIPESVIKKCSDWVSDRLKNWGHVSFRDVFDAYEGEELSEQEQQVCLLHIGSLAANSDPAIEVEIDDAIETTLWRANNIKLLTVAPLYPFEE

SEQ ID NO: 41083 - protein, 1478 aa, Escherichia coli UCI 57
MWLIKRVYMDGAGHEEAFYKDLTLDYIGLSQAVSSPVVEGLRSPVRNAKVVTSTYQQLVNGGGKSTYIALLLSIFEPSVSDFTQYLANHRQSEYHYRNYFYKELSVVLVEMVNESGQTLLLGHAHQRNGDDVDRTLFICDAPDSLMGAPFDEVPSYSRAERNSELRPYANSLRSFDSWLNLKAGSEGGMHWRKTTRQNEWRAFLLEQQINVDLIKTMVTFNSEEGGLTRFIEYKTEHDFLGAFFACTMSKDAAERLRELVAHEVERQGELEGIRRNESFLKDVLANWLAFLDPAKQLESIQAQQQLLDDGFREAMRDLAAFVGDAQVEQTQLEDNMDSLQTHIGQAMSLREQLGKRRALLEYDLVQHQFDKQKAIVDALQDEADTNQHQIEITHAAIDYKAYAKALNEYRQADEDLKVFQSETERPLQVIFERTAGEALGTLEWAIDRHRQQEATLEEELGQMDRESHVLRQSYDKLQKTLGGLETERDGYKRDKFQGESQRNELCEAGLIQKDETPVAAQYRLELTLRDAKQSEELANTILHQKEQALEAQLNVVREASIEKSEAQQKLILAKQKHQSAVDSALLLAKTYQKLPSSTRHDLDIEDTSWNSELCGLQLDKVLNANAQTLNGMKERLLQARHELDELRVTGHELVAKQVNEALEAFYVAGIARDKLWTFPHYLASAHNDDAQKIAAVIDQNPGRYLSLVALDNVTFEQVHKISEILPWKKAPIAIYLLDEAQDLRRETSELVQVVLSNPDKHGYSQAAYETRLQDLENTVASQEVSVKAAESALKVLESFRNDWSRHYEQYGKHWAGLLDQRELALLILENADAALKQAEHDEQTLRDEKRDVQVRLNNAQQQKIQAEKAHDKVSLFVEKEWAKRETAIMKLEQLAAQIQRSKNTLYTQRERLERLSELEKNKRSEKTLLIIQIGSWSNLCNEPFYSEITATEGMEGRSPEYAHEMAAQAHKKLLEAANGDQVTVLKQQLKDAEQAQRYASDRLTAQPTYNTYPDEVKAAAINELTVINNSIVRLKEQQKQFTQNLISSQVTLQKFSQSCEEASKALDEDFVWEEKPIEIEAIQTSLAEIVNNLYAIEHQIKFLLEQKTLLLRKIENVKERLQNAKTAQAMIQPITPSSAAGLPGRILSITEYADDLAAQCQMYAGLSETLKQQNMRVSTVWGKFRKRIEEELAKDPDARASQEYLRQLDSIATYHEVLGDLERVGTGISQVFEAVQDSLEQFQRSIDLTVTHLTAHLEGAIKLLRRAMSVKIPEDCPVLPGRPIIKMTDRLNDVAADLRGFASSRLQQWIARGQIPRAPNRDALTADLVQSVFGEGELEVRLLKTNASRPQWTPVTRLEGSGGQRLTSAFLLFVTVGKVREYDTGISSAGFLLADNPLGKSNANDLMRIQTQMAKAYKIQLIYLTGISDENAQSMFDNHLFLNKVQKLRRRDLVTVDKERHALWAASLAAKPQFDPVI

SEQ ID NO: 41084 - protein, 347 aa, Escherichia coli UCI 57; identical to SEQ ID NO: 40773

SEQ ID NO: 41085 - protein, 488 aa, Escherichia coli UCI 58; identical to SEQ ID NO: 41082

SEQ ID NO: 41086 - protein, 1478 aa, Escherichia coli UCI 58; identical to SEQ ID NO: 41083

SEQ ID NO: 41087 - protein, 347 aa, Escherichia coli UCI 58; identical to SEQ ID NO: 40773

SEQ ID NO: 41088 - protein, 493 aa, Amycolatopsis rifamycinica
MRDDETGGPGLADEGLTRRLKALACTAPLHDLDARKAKLDWADATIYQMAEIALHTIDQVTIAMDFDTGAGHDEVIDRLLPFIAQQAPSRMPEEHVRVAKWVLDNLINVGTTDRGFRRVYGSIGPGGYQRRQFDFKLLVELAAPDGEVYLRATDEAINVLVGALDTDVESAQIAAEVKLENLIARGRLADAKLAAEQARYRTVQYGETLRAKLDATRRDVRSVDWEREVPELLDSALGHIEARFRAENAILKNITTARDETEDLDRKRRAAELVDIVGDCIRRHTRLQSRLADAGAVFRAEQDRQQFSGPPQRATLDLFGQLLVPTLGLPLADAVTPVEHFFHAAAGITAPVVPSLSSLVSLLLRPAPERDQLVGEIPEPELMPAEVTDKFGDDVWRAADELLDLPEVPRRLSGLLDEARRSRQPGLAALVALRAVHAYSPGIGAARRQGDRQVLLAVDDGTLLDDPEFGGADLLLSTAAVERADEEENEEVA

SEQ ID NO: 41089 - protein, 1489 aa, Amycolatopsis rifamycinica
MYELSRVRLHSVGPAGARYQDVVLDFSGVGAKITAPKQDALFSAGIHATGPAELRRPSPASVLFLENGGGKSVLIKLIFSVMLPGRRQVVGTTSTKVLEKFVAAKDVSHVVLEWLHVESGHRIITGKVSEWRGHVVSADSENLVDSWYCFRPTAALGLDSLPMTQDGRLLTMSGFHDKLTAAQLAEPELELSWTRRHHEWTGRLDSLGLDTELFRYQRAMNAGEGEAADAFAFGTDDAFVEFLLRAVISEEEPKDLAEVVAVYAHNLAQRGDLLAERDFVAGALELLGPLAAEEGVAAESRKIAESAKADMAELAGRVVARNELENARLSGLEDHVTEVKSAEKLAEGDHRRLTAAVTELRRLVAVLRLDEAQEARKRVDAELAAAKTEAEAWRETATVLNAVNAARKAKDLRELVGSREEKARPALQARNDAAAALARGLHALAQDAQRQADKAEAHAGALRAEAEKAQTERDEAANLAAARRAEARGLTARITELREEVQAAVRAGLLPAGADVAEAARAARAAAEQAGADLVRRDQELDRVGADLQAAQRAVNEAHQLAGTTQDRLERATEDLDRAHRRTDALAAESRLVELLGADDVNLESDLPVLLERLREASAAVEKEQTALRMEESADERALAALGSGGLLPPPEDVQAALDALEEAGITAWSGWRYLSKLDASRRAEVLESLPQLVSGVLLNDAAHAGRAREVLTKRRLLPSAIIAVGTTEALQAEVPAAPGVEFLVPPNPAMYDEEAADAEREAVARRHSERQRRLEALSAKLSADGALTWKLTTWREDYPPGAIATLAEQAQAARTARETARTALAQADAEFARLSEKAVSLRERVPELRAAAAEAEEKARRLGELGVRSARIAQWTEEAERATEIAERADLQASDAAGKAARLREQAGEEQRTADGHRRTATTARAELAEVPGAAGAADGPVPSEPVDALRRTYASASEAYAKVEVGSDLRSELEQAESAEAAAGSAVEAMEEAVRSRAAELLETPDGSDASARAAALARARRVVDGLEDERTEAIGLVSTRRAELDALPLQNGVTGEKPRDIEHGLELIDAAGLEASAAARKWEELQERRAAAEATLASARTSASGFALLAESLAHLVTDTDAAPYDGDVDTARAQHARLNATLGQAQEAADAGDRRVRAAADQLAQYATEKRFEKLSTPVRQQVISVKRDQLPAHAAEWAEALRPRLRSLTDDLAQIDRHRGGIITRLQGMVDGALRTLRSAQRVSRLPDGLGDWSGQEFLRIRFTELEDNALTEKLGEVVDEAAVGRTADGRDVKRDGLSLVLRGVRAAAPRGFRVDMLKPDSVLRTERQRVSEIRDVFSGGQQLTAAIILYCTLAALRANNRGKARNRHSGVLFLDNPIGRASAGYLLELQRAVAEALGVQLIYTTGLFDAGALSEFPLIVRLRNDADLRAGRKYLSVDSTIRRHLDELGEPDGVGRLSATRLFSRDTNIEQGEPDKDVEPAGS

SEQ ID NO: 41090 - protein, 348 aa, Amycolatopsis rifamycinica
MLSQRAADLLAALKERAGRKKGLPLPALLDAYRQIDPEGDESHLRRPLLRRYLEELQEANLVRLPRARAGFDRLGRDESQWLPAKVWLVVEEEPKSREPGMVLHPGLSWVDNSGLRGGTALMGVISQINDWLFKHRAGPIVPLRERSLEIFNDEKKLDEYLYGPLFAQERKMLEVLRARVVAPPLHTEQVGNGDLLLVVENSTTFRCILDCLPGDHRLARVAWGAGASFRAAIRSVSPDWALREIRYFGDLDVAGLEIPRHASIIAERLGLPEVRPATSLYAALLDVGRPADAKRTPRPQTVESAVRWLDDAQRASASAVLMRGQRIAQEWVGMRALPASDRWHSSVR

SEQ ID NO: 41091 - protein, 475 aa, Bacillus azotoformans MEV2011
MEKVDSVVSIFQANESAPEVLQSMLDVASLSGVLGELSSQNSFQSPVEILRFLRIIQLINEEALGLDDPIENSETVYYRYRNRYRDPEPPTKKRVDQVINILVKYNWISKQSRRLKMRDAGKRMMDALIRMANDSLAYYMHDDIGRSLFQARRDAELSEAYDDRGISGGNKIASMIRNVENAVQLLKERELEMLADRSALPQLELIHKLMQELDGKLQERIKMFQTVEDSLVISDLIQKGTAVLAEGTNLSLGMINKYLKFTHMQKTPFSLTIQPEKVREFIIKMYNPPLESDVPNVYQLFSFMEQGQYEDEGLDGLWIPVKFAAPISPLAIDEALDYIEFYEPIVVPLDETEEEVLYSSEEISEDQLEELMGEANWMLTKSMIRTEEIEAFFKTHDEAPMEQVVIEATSEQWGDAINALTAISALVGNKDITVLESAKRVEVPKYERDWEWMNRDDGSNIIRKRRNKQEHNREG

SEQ ID NO: 41092 - protein, 239 aa, Bacillus azotoformans MEV2011
MDPTLSEKEGTNKSTIEKDDGMNVNPLHVMQSLRGILTEEEELAFMNILYSSSATIRSSNFGLPRKEVEKILGIQGDDEKFFSFLTRINQVISRYIKVIYDERRDQVITMMRVPAKSARTTLSKESLALLLYMFYQQEVLQHEFTLFDGLLEAFGHETTKANQRILINLDALKKIGAIEEYEGHSQEKAYVLTAIGVHMFSDSFLRRTAEFSQSNQLNKEEVLKFFKRYNLYQKGESEE

SEQ ID NO: 41093 - protein, 1072 aa, Bacillus azotoformans MEV2011
MIPWRLKYSGIRDYPPTQLDLSGANEHVLITGPNGSGKSTITFCMGAVLYSAKVDVEGLKSRNLAPDHTWKATISLLFKNEGKMKIDAQDFLEFTLKIVQEPGQPMKKEFHISKGDRIDEWEETVRYTSGDRVLNFSAYKKDLQYKYKVDPDLFYLIWYQQEVNQFAVMHPEERFRIFSEMHGIDKVQRDWEESMERVKETEETVRAAETNVKFMKQELQMKKVALDHYLDNQKRLNSGGKLYLASLFQLENHYKKEIDRLEDVLQQLSEDIQEAQDDMNLKKSLQEKENDQLLQYKANYDELEAKITIQGKVVQKTSGELKLIEQNIRDLDKELESIVAKKNQIVKTEEEVKLELEKLQTEQKKTCEQIKENEQLLTNLNKTWQEKVETIAALKHQVKEDARLEKEHRERLSQYVSSHAIQEKIDLFDKRIKENKDQLYYQKNVQEKLTAEQKMLLEGKNTSTRQMESLQYFRSKGINAYTLQELIELTDDAQLKDEQRFNSIKYTVFFDGKFVTPPNDLYHVPLMTIVPDRSVTKLPELHLKVKERLFENELPYAIKALWWVEQFFKEGAFSIKNGVLIDPIGLRGQQEKERYILSFKALKLRREEIEQQLNGLAESISELTTTISEDTKTIQELNSIIHGVRESEAFMISEHERVIRKRKLENEIKLQAENEEERKRLQEKERTLIGRQIRQEHSKKILDEEAEVYRELGKLKDKYEERTLLQKKQDLEKSALLNHKALLDGYHDELEEVDKKISKTDRTIRKIKESIEDAERNIKQIEKQQTNHSDDLDAAKNELVQIIKELEDLKQLVPTLYTETAEAVSFEGLPSVSQLKQNCENGKITFDGARTEKEIDPAAPENYETVKKEFERLDSEYHRFTILLDQDKERMANLQDQLETTINMRVLELQRRFKMYMSQFQFEGDITWDSYEDKKKRTHFSLYIKARKEGHRGTLEDVSTKARGGKVGKGVSGGEESLSSLLFALALLQNLQTTPGFIVLDEFDSALDEVRKVKVFDLYEQELKRKLIILTPKSHEDEYLGRFNKAFIVRHNPTIPESKVVGIVKKKQEHQV

SEQ ID NO: 41094 - protein, 439 aa, Bacillus azotoformans MEV2011
MLEKDELDYIATFMLKTGERLELESTNDDHATIVDVKIIKQTERTYRVAGIINIAAGFVDDIPETIDQELMKLKLTPKKKVILDDHHPNTIKWFDCGWIMKEIRFKKDGKTPDSIHYHMGYRLYKYLNEQSRQKEEELAQEFTRWKAKVKMVKEAKTIDFSPQRKRGISHCKKNLHELCLLELSELKTVPYIPNTWPMTKIFKYLDFLLAFLQIDLEKKEFDWKEIGASYYKEIGGSKGFDQYKDEFIEQLESIAHCPAALLGMTSLGKITPVYFSGQLSGNFSTYQYGPVHALTDLAVSEENYETSADIFWLVENRAVLTRMAAEKNFLKETNSFVLCVDGHLRSAHKQFIGQVLASSSIKQIIIWSDYDSAGLQIAREIYDTVSEHYPSMIKWISADQTVIMNWAEYEQHMDHFLKNNRMEQEQVLGGAVDWKRWIQ

SEQ ID NO: 41095 - protein, 522 aa, Tumebacillus flagellatus
MEVLYVRDALAGFRDRMKNIAAFWPLFRLRELRKYQEFDLMALGLGVLLLILEHMLIGRVECDHADVARFLREGIREVYGQEITEEESRDLASYMLAQLRNDGRAFEFVYRNIETREEEKHVFHLIENGTYHVASGQIRFKLSDAGLDLLFKTREMYKELRISISQMLLRQQIEKGVFEDALRTVETLGLDVRQLREEIERMKMGIKRDVSQFSLTKYEAMLSLIKEQFDKERQMFEELNNLIRETRDNFERKQSGEREEMAINRLVEVSQRLNQVQNLHNKLLVDKLDLQELVLESLEEGIVSGFRSKVNFEREFLDPLMQNHVSLENVRRLIEPLMSLNIRKRFNVHKAFAPQPVQKIVEEKTSDAPDVPTDEWQPVVEDPKVKLKNIRDARYRDYLRMIFEPLMFDQSLSLHDILGALDAEKLYDVVNARDFYPFLVQLHQMSPINFRLDSETRAKILDSDETNLPYLLVQLLNEEPEFEVLGTVLVEVEQQGERHLRLADEETWTVSNFRFYKEGLYV

SEQ ID NO: 41096 - protein, 246 aa, Tumebacillus flagellatus
MYSKESVERAIQLFILLLEKGETDEKDRDLVFAYKEDPVAQEIVSQMIEKQAGIKILHVGDKLYVTPALDNKVFGYSNEELRVKMGLRNDNVSMGLKLYLAYFIILATLAMFYNSDDLNTKVRQYVPIEELEQYVTEKLHMLGTGDYGQYLSAEYEFNFSQVAEYWHSMPAYDETLTNQRMGHKSRVSYLLKVWGFLEEEGLAKVAVDSEIHPTDKLDHMVRKYYAHQKRKDELLALIQQKEIFYA

SEQ ID NO: 41097 - protein, 1495 aa, Tumebacillus flagellatus
MPSINRIRLVNIQYDKGGKQYADELFKLHGKNTLINLANGGGKTLWLQLVMQTQLPGGNMGSRRMVDLLAHERYTGHILVEWKLDSAGGEREFLLTGFCFTKAADEEGELKYFTYAHPYRIGDELSIAKMPLVADGKVIGYGDYYNFLRKESGVQTFSQHDRRKYIQHLAQYHIYEKEWLSIRTTNGSEGGMDGFFARSKTEQSLLENLLIPTVDQALFQDDNEAQDLANSFLKYKDKLLRIPQIEKNLEEFQEIESAGRSVVDKVAAYSDAQKVRTTLEGQLVFVKSRLQEMVGEREEEAAALTEVVQALKEQIREEEFKQASLDVNALQAEYRAAERKLGDLAVRLQELEEQETTAEKNVRLHRAIPKFLQIKELEKRLARDRETLAGLDMQNEDLLLEAASYRGQFLTLWQEKLDSLQAELKAKQAERESWKQAEADAEKEHDRIAGLLNELSKSGGELENWFKQFEKQKAAVRDALGDEIAEAPAAERDQLKWQELEGNKVVRETEAQVEAWDAEIESAQKQIESEREELRKAVRDQDKLEGKIELFEAERSKLAARLELVDLAREDLHASRADLELKLTEKREAYASEYNKLAAKKGALEEKKALLSNADYYVPSQELLRFQSVLSDWGIEALLGSQWLQAQDPTAREHHVRSNPMLPYALLLTEADMRKLRDPRLDWEGVYLESLIPLLMIPEGSKSISSNGNHEQEMIPQGEVSSRGDRAEGTGALVSLGTDTAYVSLHGGYSPFLSQEALDRRRTALETEMASLFETMDVVEKSRRHIEGVADDLLRFFETYKKNPMPDWQTKRDALHRKITDKNTTIETLTTRVTDLRTQITDAKKTVKDTQETLASLRDKLRVLDLLANLAGELPDREASRKTQQEQEAMLQADLKEQSRIRHDARDQENRLIPAVYALETEEASLQKAREQYLGRDADTPAPLPPEEGLTYDAVCGKLESLDGLLAQKSVGRDELLRLIQNHEESIKLNQAYIDEQEITPNELAAHTTLPPASELTFWETKLKESRAEQKDLETERTDLQADQKKIEGKIETEEKKVKKDFDRAPHLFDETADLAALRDSLKQLLSDLWNQRKINEQALDEIQTNREEAKSLLQKTETLLSAYSIERDPLDLAEDRAAKLESEPTAIVNELDKGLQRTSKQTEERRREMEDEFFRFERSIDKYESKIVQKFIRSVIDSKAEGDMADIEQVRPVFEKCFEMMKLYVEKAHLERQELEEAKVELVHRCLQHAERVYDNLKSIAQYTKIDYRGKKVQAIDIQLKDKWEPGVGLKLMSQYLHALTEELQQKSAKGEDEDDIEKWLTVKLSSKHLLNVVAPISEARIKVFKPQQVPGEKVRYDHWSEIMKWSGGEQYTGCFAMFIAVLSYLRAKMSGLDNASKVLLADNPFGVVSSPHLLQVIFQLARVNRVQMICLSDHNKQSIYDLFEVVYSLKLVAAMGRSVIQSSERRPESVMEAGFYEIDFDQELETEQKTLLL

SEQ ID NO: 41098 - protein, 541 aa, Clostridium pasteurianum DSM 525 = ATCC 6013; identical to SEQ ID NO: 40756

SEQ ID NO: 41099 - protein, 235 aa, Clostridium pasteurianum DSM 525 = ATCC 6013; identical to SEQ ID NO: 40757

SEQ ID NO: 41100 - protein, 1461 aa, Clostridium pasteurianum DSM 525 = ATCC 6013; identical to SEQ ID NO: 40758

SEQ ID NO: 41101 - protein, 335 aa, Clostridium pasteurianum DSM 525 = ATCC 6013; identical to SEQ ID NO: 40759

SEQ ID NO: 41102 - protein, 489 aa, Xenorhabdus bovienii str. Jollieti; identical to SEQ ID NO: 40508

SEQ ID NO: 41103 - protein, 1478 aa, Xenorhabdus bovienii str. Jollieti; identical to SEQ ID NO: 40509

SEQ ID NO: 41104 - protein, 347 aa, Xenorhabdus bovienii str. Jollieti
MIWLSRLESTANKHRFAAGKAVRTVKANAILDEILETHSQEALRQDVPSLLSQAVTQLLEGDWRAQPKHKASWHRYWRGMSLPNTFVYEGAIVPTKTASEIAWHPWLAERITGQLPLPIKARLQQLNTYLFRQTKGDKPLFPGLLGHRERSLLIFGDEKALDSMPPDGWKHVTLTLADMGAFRRAPPLPYESSGCRDLPAIIVENSDVYYRLCQLNRVQTHWSLVIYGAGNKVSGQAECVSQLLKVEQVKQLLYFGDLDVAGLKIAHQLYCKLLSDYDISLQLDRWLYDELILNCWVTPEGNANSERFDFESLCGWMPRFVLRQMKMLLATHQRLPQEGVASLGLVI

SEQ ID NO: 41105 - protein, 473 aa, Bacillus subtilis
MEKVDQSLISIFDVTDDKPELLQSMRDIAQLSGVLTELSDKEYFQSPIHVLRFLRVLNIINQEALGIAEPIESEETLFYRYRNVYGYDEAITPGYMKHLVFVLGKFNWVAKTAKRIKMRDVGKRMMDVLIRLANDSLAYYLNDDVARSLFQAKRDAELSEAYDDKGISGGNKLASMIKNVEEAVLLLHERELEYLADRNALTQVEVIHHLMTELEGKMAERMVKFETIDQELVFSDIKQRGTAAISDGTKISLGTINKILKFAHLQETDFNHRIQPEEFRTFIIKSFDPPLGSEIPNAHQILSFMEQGQYEDEKIDGLWAPVKFASPLSPRAIDEGINYIENYEPITEEIEETLEEEFPGTEEIMEDQLDEIMGDSKWQMTKKMIHTERIEAYLEEVEEAGLDELIIRSGSSKWSDVLNGLIGVSALVANKKADIDEHAKKKLSDNKDQRDWRWSEDEQGTYGIRKRGRNHER

SEQ ID NO: 41106 - protein, 230 aa, Bacillus subtilis
MELENEEEITNVNPLATLQSIKGFLTTEEELAFMQILFSSSATIRSGNFGLSRKEVEKIIGITVDDQAFFSFLKRVNQAVSRYMKVIYDERRNQVVALMRVPAKQAKTLLNKESLAILMFIFYHQEVLQNEYTLFSQLINSFGHESLQVTRKIQANLDPLKKIGAIEVYDSNSEEEAYQLTSIGANLFSNSFLRRYTEFSQSNQLHMDDILRFFKRYNMNGGTSNDSMET

SEQ ID NO: 41107 - protein, 1070 aa, Bacillus subtilis
MIPWRLKFLGIRDYTPTVMDFSDKDHHILISGPNGAGKSTVTFCMGGVLYSSKVDLEGLKSNNLSTDQTWRAKIELLFKNDGQIKVDAPQFVQFRLDIEQKPGDPVKREFYIQEGEVIDKWERETKYSSGDRNFNFTEYKNQILYKYAVDPDEFYLIWYQKEVNQFAVMHPEERFRIFSEMNGIDRIQKNWEESKELVKETEQTLQEAESKQGLNKLQLTQKKTELDRYYDRNERLEDGFKQYLSALKWLEKHHLNQMNTLKGQIETLKADKEEKNTDKQQDLILQADQREEHEKFQSAITQMESREIGLADELNHLQKEITSYNDKVKAISNEIEEITKRVERMGMTEEEVNEALVNAEEKYVSIDASMEEKQQLLKRNKQKLDDLTPHIAELKVKIDQDSAREQDVRKLIDAYKSSQAVQEEMEFNEQRLENAKNEKGKLIIKKDNLEKELENLRMNRVYSSRQEVSIQYFKKRNIEVYPLRELVELDETAKPNDEDLFDTIKYTLFVNQKDFHAPNDLYHVPLPNIVPEKTITQLPDKHLQIKNKLSNNLYPLAVKALWWVKSFFENEKPQIQNGVLLDARGIRGPQEEKRIILSEKVLKKYQLQVKDELDRVGNDISILSNEIDELTRRNSTLFRRQESLKDAEAFLIKENEREWRKSKHYNLSNEKLELEENRDEIQEEWNRLNEERADWKQKVETFKNYQEIFIQYEKEKGKITEVRQLKQYLIELDEEKKNKNAQLEQIGSLLDEKRREEKKLNRDIEDLKESLLYKDREIESIERQIKHRSEEYLTNEENYSTIKHDIQRLLDSVKQELKDSLELTELPNVTKSEAEDMRESGKIKYSHAANETGIDEAAPENYQKMKEEYDRSATEVKASKLLLEEYTERMERLKEDLESTINSKVIGVSQKFVHYMSLFGFQGEIDWDMRTDRRHQIHYALYIKARKEGHRGKLEDVSVKARGGKVGKGVSGGEESLSSLLFALALLQTIQATPGYIVLDEFDSALDEGRKDKVFELYEQELQRKMIILTPKSHEEEYLYRFSKAYVVHHNPNIPQSKIFKVKRSEEVLK

SEQ ID NO: 41108 - protein, 440 aa, Bacillus subtilis
MVSVELQDYLQYHIVLKNESLHVSDASEENGIIHIPVIKRTARTRRTVARLMVGINTDLQGIDKIPTKLTNSFKSPNTKKQVDLSDETYEWIRFGWIIREIRLEKDERTVKTERYRMGFILYQLSLKAEAEAEKESRNWILDWNKQWEVARRSDVPGFEQDQRADVVSLLAKHLDEIASETDRVLAGEAKLIKSIPPSWRLRKQVVFLHFLIALYQLACTEKHFDWKQIGATYYRIIGGSKQFDAYKKEFIEETENLLHRPIQLLGLASMGTITPLFFTGPMQGDYVDYSYGTVHATTDLAVFSETFNTKADVLWLVENRGVLTRMAYEEEFLRGTKSFVLGVDGQVRSAHRLLISQVVTCVSQVIIWTDVDEAGYLIAEQLYKLTQDEHVLTKWIVPPLTVVTEWETFVNKYQQSIQMRKEEQEQEIGGVELWKKWINH

SEQ ID NO: 41109 - protein, 499 aa, Geobacillus stearothermophilus
MDNLNILDVTNGYRERMRRLALFDPLFELDRKREVDQHNQPIDMKGLGLLTLLFFLEQKLMRQYKTGVKQLASFLKKLTENEYVLDEASYERLARTIIQTFRPTTGRKRSYSFYDWEERTESTIEYSILKANNFDVKTNTQYYTLDEDGLELLFATKEFYSEFHLSINQLMLRKQLEKGEFNGALRQINEMRIDVETLEERIVKLKHEIQRSIISEETFERYKQLLEDIYNRLAREDEEFKELREFVKETKERLYSRDIHQKEKKTYELILKITQELESVHYAHSSLLDKALSLKNTTLVSAQESLYYTGLHSFNFDQDLVSYIVSTPLPLEAMKGVLHPFLKVEENQFWSPLAVLEEQNITEERGERVEQGFIEVEEGSSDDPYRRWLMFKYRELMHLFLEAYKHNRGHTLSQFMDYLDEIGQSHIYEQRYFYDFWIIMHQRSPIQNGEMQEEEGNTLLGDALALLGTNILDVQEGQGVIQKYERFSIQEMIITVSEQ

SEQ ID NO: 41110 - protein, 247 aa, Geobacillus stearothermophilus
MNYPEQKIIQAFQLYTKLARDGVVGQQAVQLYKADDDVRGLLDMFSREVDCVIVITSEQMFLVPRTKLSPFHVSNDWIKRNYLRSGATNGDIYLLYFATIILFGSFYDTYQSEKPTRTFLRLDEWVHLVQERIDQLKEHDLEKLKQFEKEFSYNWSLIIEKWDAMDDIKETAKKQSGNTISRLSFIDTVRRFLIDQGLIVDIGNDEVTLTEKAKTIIQRFFMEVEYNKGIFEFIYGFERKEEDAIDQ

SEQ ID NO: 41111 - protein, 1470 aa, Geobacillus stearothermophilus
MPSISKIRLTNVVYEEGLKRYNDEIFRFGGHNGAILLENGGGKTVFIQTVLQAILPHVDVADRKIKSTLQLENAPAHIAIEWIMNDEPRRYVVTAVSLFMTNNGLDSLRYVYEYSANDPNGIEGIPFVREGKDGKRPAERGEMQDYYSHMKEKSFLARTFNTIKEYKAFIEEQYHIISSEWESIVKINSSEGGVEAFFDECKSTNQLFDRLLIPTVESSIVGHDENLFADMFEKQHTSFKHYKKLKETIEENKLIQQELEKYVQTYEQLHQSELVYLKAKQRAKGAWLEILKQKQSCEDERTAIWKKLEEWKNSYDTHKQKSASYEILVEETLWNEFDQQYKMALARRDEKEEELIQQEKDYYSLKLAELKEKRKEHEERLAYIEDEMKKLDQADELVSYADELEIAKRTLLGCFMEQLDAIEKEEQGLRYELNPVELRLEQLTKEKEDLERKERHARDHLSGIKSRIDSRTKDIDHLKQQLLANPSQEQVEEEMEKWVQRHQWLDDEIICLQQEVKQLIQEEKEAEARKEVYQHDLSSTKIEQENTAYQLKEIQQEEKALIKKLASLRPQWATLESVHINEATIKMRMIEQIEKRTKERNTLLVRERMAYRFVDDYSEQDTFFSDAFLEQQLKSWKNQFDYLVTGVEYLQSLDEKERVKKKDFQLWPITLITTGKSKERLVEKIKQVNDRLQFPIIVISTEEAVTIHDEHFPYYWIEPRHWNEVIDSEAFHAWKENIKTGAKETTKLREEKEDEIKAWQDVYRDFQKFLQSHPYEKVENLHKTHVQLVRQIEQLTMTIKNERARIDELRTKIAHYQSQTHLYREEMQGIEGKIEKGKQYLQYKKEVEEEQKKQKQWEETIVSLEKEIKRVNMRIHDVMEQKAAIEERIHSLQRDIYRIKENHEYKSLRSLRPIYSGESEHVIREKIRELDYKIHQIRTTYGEWKVKQDFEKRELERLTKEIDELKQEHTDLDEARPFPSDGHHLLQMLKARMVSLKVEVKNLNDEVQKKLAQEKEQKGKWKSKLEQFQKDYLNQEIFRFTKSLDEIKEELQKEKEDLDKRKAFLDQEKDRIEKTIKNIEEAERSLDRFVEGHHFNAPQIAALPLSEEENLEFTYHRLRFIKSITDNLQSCKNAVEVMKNNVERAKRLFRDFCNHSIKDVKMRQMALDGIEHKETYEDIIDFKKNMIRSVENATNYANEHIRQKDAELQAFINHIHSHLRTVVEELKQIPKKTRVKVGDDWKQIFTFSIPEWEEEVGKTRIRDYIEWILQQLESERFLNEHGKQDDGKVRKEIEMWLQSKQLLQVVMNNETMKVSCRKVTNDNKVTARSYSWEQSNVWSGGEKWSKNMTLFLGILNYVAEKKQHIQPNMKRHRTVILDNPFGKASSDHVLSPVFFVAEQLGFQIIALTAHAEGKFLKDYFPIIYSCRLRPSSDANKKVMTKEKWLHYAYFQDHEPKTLDRLGEVEQLELF

SEQ ID NO: 41112 - protein, 338 aa, Geobacillus stearothermophilus
MEQIKRLLATFPKKTISLGELEELIKPRIHTYDEFSKTILQLEDERILEMVKSKGRTTRTPSLAFHYRIDKSLLMGDFHKELLHYRNMLHPSIKIDWYYRKDPSIWKNDLPMIMKIDNYLKRHSFPTKPVPAPERSVELVGDEKWITDGGGKELLERIGIFNSFHIIPVSEPLMFAVNPTKVNETTQFHLIVENKTTYQGLLPVLKETSFSTLIYGSGKKVISSIEQFSMQYPVDAHHYFYYFGDIDREGISIWHSLTTKTPVMLALPFYRACLQKDAVAGKEYQKEQAEALKAFLRFFTTEEQSRLKSLFANGMYYPQEILKTHELQQIWRESNWTT

SEQ ID NO: 41113 - protein, 499 aa, Geobacillus stearothermophilus; identical to SEQ ID NO: 41109

SEQ ID NO: 41114 - protein, 247 aa, Geobacillus stearothermophilus; identical to SEQ ID NO: 41110

SEQ ID NO: 41115 - protein, 1470 aa, Geobacillus stearothermophilus; identical to SEQ ID NO: 41111

SEQ ID NO: 41116 - protein, 338 aa, Geobacillus stearothermophilus; identical to SEQ ID NO: 41112

SEQ ID NO: 41117 - protein, 500 aa, Geobacillus icigianus
MAVDKLELAGVTDGYRERMRRLALFSPLLDLERMRSADLGGQPIDMKGLGLLTLLFFFEQKLMRQYKAGVKQLAAFLKQLTENVYALDDEACEHLARTIIQTFRPTSGKKRSYPFYDWERREESAIEYSLLKAHGFDAKTNTQYYTLDEDGLELVFATKEFYSEFQLSINQLMLRKQLEKGEFAAALKQINEMRIDVETLEDRMTRLKHEIQRSIISEETFERYKQLLDDIYSRLAREDEEFKELREFVNDTRERLYARDIHQKEGKTYELVLKIARELESVHYAHSALLDKALSLKNTTLVTAQESLYYTGLHSFNFDQDIVSRIVSAPLPLEAMKGVLHPFLKVEENKVWSPMAIFAEQNITEERKEKAGPRFLEAEEAEGGDRYRAWLIAKYRELMQLFLKAHEQERAGTLAAFFDYLDDIGQSHLYEQRSFYDFWILMHQRSPVEQGMEGEEGSALLGEALALLGGRVLEVQEADRIIRRCERFSIQDMIITVRER

SEQ ID NO: 41118 - protein, 248 aa, Geobacillus icigianus
MRNYPEQKVMQAFQLYTALARQGVAGAQAVQLYKSDDEIRALLDAFSREVDCVIVLTSERLFLVPRTKLSPFHVSNDWIKRHYLRAGATNGDLYLLYFAVLVLFGSFYDTYQSPEPTRNFLAMDEWVRLVQERIDQLKRHDPDELKQFEQEFSYNWSLIIEKWEAMDDVKETAKRQSGATISRLSFLDVARRFLIDQELVVDIGNDEVALTEKAKTIIQRFFMEVEYNRGIFEFIYGLERERDDASDQ

SEQ ID NO: 41119 - protein, 1470 aa, Geobacillus icigianus
MPAISKIRLTNVVYEEGRKRYNDEMFRFDGHNGAILLENGGGKTVLIQTVLQAILPHVDLADRKIKQTLQLENAPAHIAIEWLLNDKPRRYVVTAVSLFMTNNGLDSLRYVYEYNANDPHGIEGIPFVREGKGGKRPAERGEMQDYYHDMKAKSMFARTFATIKEYKAFLEEQYHIIESEWESVVKINSTEGGVEAFFDECKSTNQLFDRLLIPIVESAIVGHDAKLFADMFEKQLASFKHYKTLKETIEENKLIQQELERYVETYEEFHHQELAYTKAKQRAKGVWLETLQQKQAGENELNNNAAQWEEWRQTEAAHRQKRATYDVLVEEACLRELEREYEWALAQEKEKEEELWRLERDYDSLRLAGYKEARKRHEEALAYIEAEMAKRKDDETLARCEEELEMARRALLGYFMEQLEKIGQEERSVRYELNPIQTQIEQWTKDIETLKRTAQEAREKRAGIQSVIDAREKDMESIKQRLLANPSQQSVEEEMGKWIEREQWLDEEIVRLRQEMKQSKQAERAAEANKEALQKQWAKQQAASEALAQRLETLENEEQALIQTLASLRPQWAALDSVYIQEETIRMRLQEEIEKRMKEREALLVQERIVSRLHDAYGEQDVFFADPFLAEQLASWKNQFDFVATGVEYLQSLTEDERANKQAFPLWPAALMTTAKAKERLVQKVRQMNDRLQLPIVVLSTDEAARVEETGMPHEWIAPRYWEEASDPVLFGAWKERIRESARDMTQRRQEKEAELRLWQDAQQAWRAFLAAHPYEAVESLRAEHAERLRSIEQLTLAIDKENARIDECRAHLERAGSLIGQYEEEWRGWRDKIKDAGQYMQYKKEVQEARKQAQALDEQLAALAKDIARLGSRLEEARAQKTELKERLRSLEAQRRAVEQNYDYRSLRSLAPIYSRESEEVIRAKIDQWKLRIQGIETTYSEWQTKREFRQNEIDRLTNEINKLKQKRPDLDETRTFPSDGAQRLERLEEQIASVQETLKRLKQRTQEALKRKERQSGVVQTKEQQFREKFPNEARWPFAAPLADIAAQLEAEQEALAKRKAFLEQERERLAKEMKSIEQAARQLEVAKEVHHFNAPTIAALSLSAEEATAFSYDRRGFIEGVTESLKAGKQAVEAAKERVERAKRSFREFCRTSIQDMKMQQMAINGIEHKETYEDIISFKKHMMKSVESATNYANEHIRQKDAELQAFINHIHTHLRTLVEELRQIPNKTRVKVGDEWKRIFTFTIPEWEEEVGKARIRNHIEWMLHQLESERFLNEHGQQDEAKVRKEIEMWLQSKQLLQIVMNNEGMKVNCRKVTNDNKVTTRSYSWEQSNVWSGGEKWSKNMTLFLGILNYVAEKKQRLQPTMKRHRTVILDNPFGKASSDHVLNPVFFIAEQLGFQIIALTAHAEGKFLRDYFPIIYSCRLRPSSDPNKQIMTQEKWIHHAYFQDHAPKSLERLGETEQLELF

SEQ ID NO: 41120 - protein, 338 aa, Geobacillus icigianus
MEQIEKRLAAFPKRTISLVELEKLIEPFARTYEEFAEIVLGLEADGTLEMIKARGRTTRTPSLAFQYRIHKHRLMEDYYRELQRWQNRLHPAIQLDAYYGKDPSVWERDKPFIVQIDDYLNTHSLPHEAVAAPERSMELVGDEKWITEGGGREVLERIGLFDRLRIIPVSDPLMFAVHPGNMAQAVQLHLIVENKTTYQALLPALLDTVFSTLIYGKGKTVISSIAQFSLQYPVKADHRFYYFGDIDREGVAIWHSLFQKKPALPALPFYRACLQKEPARGKEYQIERTEALASFLSYFAPDERERLCELLASGLYYPQETLKTRELQHIWREWQWTS

SEQ ID NO: 41121 - protein, 506 aa, Bacillus thermoamylovorans
MESLDLKEITTGYMERMRRLALFDPLYDLERKREVDLEGKNIDMKGLGLLALLFFFENKLIRESKTGVKQLAAFLKEMTHQVYILRDEKYEEYARTIIQTFRPTHGKKRSYEYFDWEKKETGVIEYSILKANNFDVQTNAQYYTLDDDGLELIFATKEFYSEFQLSINQLILRKQLEKGEFKGALRQINEMRIDVETLEDRMEKLKHEIQRSIVSEETFERYKQLLDDIYGRLEREDEEFKELRNFVKETRERLYAQDVHKKERNAYNYILKINRELEEVHYEHSHLLDQTFHLKNTTLMTAQESLYYAGMQSFNFDQDLVSRVVSAPLPMDAMKGLLHPFLKVEENRTWSPLTVLAEQNLVEEREEKVEYHFLDVNDDNTNDPYRLWLTKKYGELMELFLQSYENNGVRTLSGFFAYLENQGMEEIYQQRYFYDFWLILHQRSPVHNGNEDETSGKTVLGEALSSLNGRVLIVTERNIIIQKVDRYSIQDMTFELEGTDDGLFRE

SEQ ID NO: 41122 - protein, 247 aa, Bacillus thermoamylovorans
MDYSESKVIQAFQLYTKLARDGVLGVDSVQLYNADDDIRALLDLFSYEVDCVIIKTSEQLFFVPKTRLSPFHVSNDWIKKNYLRSGATNGDIYLLYFCTLILFGSFYDSYQSHEPTRQFLSLEDWVHSIQDRIDQLKSHDIDELKELEKEFSYNWTVIIEKWDDMDDIKETAKRQSGNTISRLSFIDTVRRFLKDQDLIQDIGNNEVTLTEKAMTIIQRFFMEVEFNKGIFEFIYGFEKENEDAGYQ

SEQ ID NO: 41123 - protein, 1473 aa, Bacillus thermoamylovorans
MPAISKIRLTNVVYEEGKKRYNDELFFFDGYNGAILLENGGGKTVFIQTVLQAIIPHTDLAERKIKNTLVLENAPAHIAIEWLINERPRRYVVTAVTLFTTKDGLDSLRYVYEYGAGDAHSIEEMPFVREGKNGKRPAEKGEMQDYYSGMRDRNFLARTFSTIKEYRKFIEEQYHIIAEEWDSIVKINSSEGGVEAFFDDCKSTNQLFDRLLIPTVENSIAGHDPKMFADMFEKRHESLKQYKKLKETIEENKRIQAELEKYVATFEKLHIAKLAYDKTKQRAKGIWEEIQMQKSNMNEEHHGMMQTLAEWQSAYDHYQVKKASYQIAIEKSKFTALEKEYEEVYANFSQREEELANVNRDYYSLKLAKLKLELKNYQDELTMIEKEIEKLDQTEELEDLEIQLEEAKRSLLGYFVETMDEIKKEISQVQYELNPIQEQIEVIQKQLDEAGKLESEKQKETAAIENQIRTRQTDLAKLEQLLLANPKQQKVESEYKLWQDRYQFLDEEVIRLTGELKQLEHEQKEISKIIDELKTEREQVQNSLNLIENDRERIDYEQRILIEKLSLLRPGWSSLESIYDLEKSIFSRLEESIDILSKEKKELLYKERIAYRLVDDYGKQQLFFSDSYIDSHIKSWKNQFDYLLTGVEYLQTLDEHEYEKKCSYPLWSLTLITTNKSKPALQEKLQMSAEQLHFPIQVMTLEEAATVDIMTDDVHTWVIPLHWQKGMNEEAFDHWKTEIKERAKVATDTREAKEQELKKWETGLRDFQQFITMYPFEKVQLLDESRSEHTGKIDEMSRKIKNEEEKSAICQEKGKQITETISEYKEEMQGLERNLERAMEYFQYVREIEEAKKKEKQLLDELENIQRKMTRWNRQLTDYQMQEKSLVERKRDLESSLRFYENLDEYRAVRSYSPIFTGESKLAIQEKMNTIQLKLQKISKSYGEWKARRENAIQNINRVQLDMDELRKEQSQLNEEQVFPSDGEQLMENTRRLMVQLAKEVKRLDKMKTEKLAAKEGQKGKWQLTIDQFQRNYPDVEIVEFTEATLDEEKDRLAQEKRDLDEKKQFIDTQLSRIQKEIQSINEAEREMDRFIEKHHFDAPNIEATPLNADERMAFTYHRKPSVQSIIRELESARENVDGENKNVGNGKQTFRQFCQTISDFKMRKMAENGVDFKDTYDELLEFQRNMVKRIEIAINYANESIRKEDAALQAFINQIHTHLTTIVEELREIPRKTKVKVGDDWKTIYSFSIPEWEEEEGKKRIRDYIEWILTQLESERYVKPDGSQDDMKIRKDIEMWLQSKQLLQNVMKNEAMKVSCRKVTNENKVTTRSYSWEQSNVWSGGEKWSKNMTLFLGILNYVAEKKKQNRPNTKLHRAVILDNPFGKASSDHVLSPVFFVAEQLGFQIITLTAHAEGKFLQDYFPIIYSCRLRESNDNNKQVMTKEQWLHRAYFQDHDPVVIERLGQTEQLSLFDM

SEQ ID NO: 41124 - protein, 340 aa, Bacillus thermoamylovorans
MEELKRILSVYPKRMIDLTRLEELTKSFVHTYEEFADVILQLEKDQILEMVKSKGRTARTPSLAYQYRIQKSVLASSHHQELQIYRNKLHPAILLDEYFRIDPVVWKQDLPFIEKIDHYLKAFGFPNEPVPAPERSFELVHDEKWIVEKGGKEVLERIGLYERLQIIPVSEPLMFAVNPGQIHRENQFHLIVENKTTYQGLLPALVDTEFSTLIYGSGKVIIKSIEQFPAQYPVEANHEFFYFGDLDREGVSIWYSLTKRQSVKLALPFYIACLAQEPVKGKGYQLENREALQAFLTNFSKLHQDKIQKLLRLGTYYPQEILKSKQLQAIWRESDWKALI

SEQ ID NO: 41125 - protein, 226 aa, Paenibacillus durus
MSLEEPESLHSNLPLGAMERLTAVLSPDEEYAFVQIMFSSSAAVRSGSFGLSRREVMKILKLEPGDEQGFASFVKRVNQSVARYYRLIYDERRDRAVVLIHVPARQARELMSSESLALLMFIFYHQEVLQNDYTLFTQLLEAFGHESLDVRRKILANLDTLIKLGAVSRYENPSNEEAYALTAIGARLFSDSYLKRFAEFSHSQQLNMDDVLKFFKRYNLEAGEGY

SEQ ID NO: 41126 - protein, 1077 aa, Paenibacillus durus
MNPWALEFSGIRDFSDTRLEWGGPEDHVLIGGPNGSGKSTISFCLGAVLASAKVDLEGLRSRNLPPDRVWRATIQLVFANIGASPVDAAAYIGFRLNLEQKPGDPLRKEYFICEGNEPWKWNKETRYTPGDSTNHLHEYRHQLQHKYKVDPDAFYLIWYQQDVNQFAVMRPEERFRIFSEMTGIERMQHNWEKVKEERKDAQSALQTAESNQHSHRLNLGNWQQERDRLISRNERRRLGLASVLTASAALERLYGREQELLKEQTDELEERHADELDRQVKLEEEHQAYLKELEERTRRMEELTRQLEEVEGEAAKERALREQLNDEYRQLEDILRELDKQMRAIPYSRAEVEERLAQDRAKMRETEAKGRETEEAYKEAQTHLDWLANEIGKLEYALEEDFRRLGDAKKMLAQYGGSAALEREAESLESKRSSLRDSGRELELSIRSLEDELEALTKGTGMYSLRQEASIRRLRGKGVTVYALRDLLEMDEHIPLEREDQLEAIKYTLFVDARGFAAPTDVYHVELPAVVPERAADELVSLGLRVKKDLDDQTYAAAQKALWWIGELVSGSDSSRPRLKNGQLVDSMGRRGPQEDKRWILNPRGIKLRVKRAGEELEKLELQLEAARRNLAECEERLNLIRSVLQLVKEAETVVGAVAERDLRARELERKTAEQKKWTDIRNRSADERQRLNLGAAELAVRLEALEGYRQIYDRADQESSKIERFGQLGKELEATGERLQGLERELQDLLTESDQLDRSLDSTKRRIREKHQHIEESKKALEALDREKRELLERLEVIQENRAAERQFYSDWTVRLPMVYAGLLEAAPDFPIVPDWNPAQAKSYKEGALVQLNLALGETVDENALENYEKVKAEFERGEQEVQDARMLLRQLEESLAELEEKLVSTTNYEIKRVGSRFVRYMDQFSFDGEVSWDMQEMKQGNIKYYLNIKARKQGHRGPLEEVGMKGRGGRVGKGVSGGEESLSSLLFALALLKTIQAEPGYIVLDEFDSALDEGRKSKVFTLYEQELSRKMIILSPKSHESDYLRHFNEAFVVYHDARIPKSAVIRIKKKADSKV

SEQ ID NO: 41127 - protein, 472 aa, Paenibacillus durus
MRGCKSLLNTEIVDFICSHYLSKGSELEPATLSESGRGFEIDIFRAGSRTRRRIGKITGGHADNVLSHENRVPEVLERLFHSPRVRKSERDLLRDTRDASLCNGGLAEGWIMRIDRYESDGKTVARTEYVMGYALYIHLERKRRRAQEREKQTIATWHARLGTVLEERNKVPDGLSGKENRHLLWNFIEDMAAKLEHCSVYKEVFEVIWNKEQPWQGRKLEYYVDFIIALAEIAAARAHFDWKEIGARYYREIGGSKRFDPYKVDFLEAAEEQIGCPLPLLGLCSGGTVTPIYFAGELSGRGGFAYPQGFLHAVTDVTVWKTEFRTGCHTMWLTENRAVLTRMSAEPDFLLNSGSLIIGLDGQLRSGHRKLIKDVLTGSKSIGQVIVWCDGDKSGLDIARNVQALLQPAHPAGVKWILPPAVDQKGDDPRSCLFRTWEAYEAAALAGLDRNQADEQEAEMGDTDIWNMWMDL

SEQ ID NO: 41128 - protein, 502 aa, Paenibacillus sp. FSL H7-0357
MNWSDFGERNKRLNPLWTLGAGMNLGELQPYKEMIALSVLLQVYYLELESNERRAKEDIIELAWSSLERFNIARFGTIESVERLVDGLLWSGGGGDFEAFYYDDQTRQMTLQKYKYFTVDEDATRTSWEESGKTVYRLSEYAMELIFMSHEIIEEFQISIKLLEIQMHIKHGRVTRAMQDVGELISRVRKMTQQQQEYRNALRRNPKHMFSEYGVMRHQRVEEIHQQFDEERKHFDNIHRSLARLANDEKDVIDFNELRLLSERVELSRKVHDELAEVVLSIFEAETNLRLNFPELFWGAAGFNFRTNVWEEWVKAEGLPSGDSLETLISGLFTPSQDFIYPLAWAWEEQDVGFLPEEYLDEPDEEGEEQLATYTPKSIPWTEVAELWKPIFTELAGKGRFTFKADAFSPEEQSRWARLPDAIDLWVQFFHTEVVVQEYNEDNPGGSDECQKLIQRLLTDCPELEMLRGKVLRTTILEPDQGTSVSWPGLEMSPYTITIVER

SEQ ID NO: 41129 - protein, 252 aa, Paenibacillus sp. FSL H7-0357
MSYSLEQLQQASRLFFDLLRRKVISLDDPAAVECLQDTGAYDALQYMAKEGGCRIMNSGHRLHLLVNPLGSGFASNFTQLRNKYSRIERKTHLHIINVIILVFLAEMDQDEQHFKPGQDSMSYIQISDQVSSLLQAWIELDEEGSFSKQWRLDIQAMHKVWASLYMQTKSQEEGDSLSRGSGSRIGLIHEGMKLLEEEHLVFISENEKRIFPREELYERMRYLYHDVDRYKELKALIGRTLTEKEGEGYAAH

SEQ ID NO: 41130 - protein, 1494 aa, Paenibacillus sp. FSL H7-0357
MPRIERIRIAGLKYEKMLKKYDDMILDLCNEEGPANTLITLMNGGGKGVLLQSIFQLLLPKAAWGKDNENQVEAFFHNHKKQLKPYTFHVAIEWRLDNSERNEYMTTGIAMTAHSSIDQLEIKVDYLLYALMDYEEQAELTLSTLPLYDHAEGGPVSFETIQQFVRERRNEIVAFGSHSSDLKKYYSFLAERDIHIGEWRNMKRINGEEGGIKGYFQKNEAFTNHNLFEKLIIPEIGSSLNEGVKEEDGSLQRMFIDTATIAQRLPMLEQREKAFAEFTTLAAPLYELVEQGTEAERSFRETELLGRQMSTVIHEELKNAEAERSKTADALVQHHQEARQLRFEGDNLKYLRSKEEQDLKQDEFTRISDNQTRAKLRLDESKLKEKKLEVAYYLAKRSAQLRQIEQWQKEIEAIEGSLEMKERQEVIQGAKEELRLQWDKVFQLWQGQLSSFVTRQHSLTAEENGLRKERESLLLELGGLDNRINELTGAIRQYTEELGVFASRHGHEAAGAPGAALQRTLIAAKTIADNISGFNEQRKTAEERKLSLHQSQTELKVKLNAGQSQSDELQNLLESQMNRESQLWSQLVVLLEMYEEHHQLGVTALFEAKPAIQERFIRRLDEAEQQTKRLRRDYYNQLIDVELQQESFWLPNADILRVKDTLDSLKISSMIGSSYLNDLPYLSREEEMERHPLLPYGIIVTQREAAKLQPDTLKEVLLKSAVPVFIREEMAEAASGPFLLPANQGPQMVLQPDHFQEWKRGISSSLKHQEEELKDAEAYLSKLKSARQEFERLFQSEHTLALKAKLNTLELLQNELNLKLGDLNTEISRNEDSLAVIQRELAQSEADRTEHEERAQALRQWDERTKKQEQDYKDKQKAVERKKELSKEIASKDQGLVQVKAELGSTAQQREKWIGDTRYSLFPRLQNWFPEIAFPGEYPVAPALEEEPVLDPAAQDTLMQLLSTVESLQQSLTQNELEIRTRAGNIKRAGEQLAEIEAAVVQVDQDWRNAPLPTDTAEVILTARARQKNETVYLDEDYQLVHDSFIRAQTILENLQKDLRKSEKVIKEKHERAVEIWHDPLDQKEEEISRRFRENEQLLNSCKQALSVMDQWIQTLVSQSKIMDTHVEGRVQMRDVPEELQQRVKENCEPLVADWLLRSKESRSERSEISRKVKEEKTSLSSKLAKSGWNAELETKIQERLNTVHWDDFSIARQVLDSMLQSSRDQIESIRSDKEGMELSRKLWVGRAAKRVVQIVDILKRMERRMIILNENGHAFPLVRLNYKNITVPKTSDDIEPLVSDYFNRCISGLLEKYAKIEQVPAAAVKEMINDGKIVYAAMQNRFPVLQVYKPVTENYFLYAAPEEYHYSDWEVINRGALDEAVGSGGQRQSVQLLVAMMIMTHKRVNRENKGWTVFLYDNPFGEMVSNNVLDPVFEISKALKFQWLIVTPPELVKNDVSIRFGVYWQLYFGGDKGEMLESTLIKGGRKLIPASLF

SEQ ID NO: 41131 - protein, 501 aa, Paenibacillus sp. FSL H7-0737
MNWSDFGERNKRLNPLWNLGAGMNLGEIQPYKEMVSLSILLQVYYLELESNERRSKEDIIALAWTALERFNIANLGTTESVERLVDGLLWSGNGGDFESYYYDDTARQMSVQKYKYFMVDEDATRSSWEESGRTIYRLSEYAMELIFMSHEIIEEFQISIKLLEIQMHIKHGRVTRALQDVNELISRVRKMTHEQQEYRNALRRNPKHIFSEFGVARHQRLEEIHQQFDEERKHFDNIHRSLARLANDEKDVIDFNEIRILSERVELSRRVHDELAEIVLNIFEVETNLRLNFPELFWGAAGFNFRTHVWEEWVKEEGLPSGDSFELLLGGLFAPNQDFVYPLPWAWEEQEVGFIPDIVIDELEDELYAENAQYIPKGIPWAEVVELWKPVFSALAERGSFTFTTEAFTEEELTRWARTPDAVDLWVQFFHSEITVQEQAPENSNGSDECQLLIRYVLADDPQLESLRGKLLRTSIAQESGLRVRWSCLDMSPYTITIVER

SEQ ID NO: 41132 - protein, 252 aa, Paenibacillus sp. FSL H7-0737
MSYTLEQVQQASRLFFELLRKKVIPLDDPAAAECLQDAGTYDALQYVAKEAGCRVMNSGHRLHLLVNPLGSVFATNFTQLKNKYSRIERKTHLHIINIIILVFLAEMDQDETHFKSGQDSMSYIQISDQVSSLFQAWMQMDDEGRFSQQWRLDIQAMSKVWTNLYMQTKSQEESDLLTRGAGSRIGLIHEGMKLLEEEKLVFISESEKRIFPREELYERMRYLYHDVDRYQELKKLIGRTLAEKDGAINAAD

SEQ ID NO: 41133 - protein, 1493 aa, Paenibacillus sp. FSL H7-0737
MPRIERIRITGLKYEKMLKKYDDMILDLCNEEGPSNTLITLMNGGGKGVLLQSIFQLLMPKTPWGKDSENQVEAFFHNHKKQLKPYTFHVAIEWHLDNNERNEYMTTGIAMTAHNSLDQQDIKVDYLLYALTDYGDASELTLSTLPLFDEETAEPTSFETIQQFIRDRRGEIVPFGSHSSDLKRYYDFLATRDIHIAEWRNMRRINGEEGGIKGYFKKNDAFTNHNLFEKLIIPEIGSSLNEGPKEEDNTLQRMFIDTATVAQRLPMLEQREQVYTEFLGMAAPLYELVKLGVEAESVVQETELRGRQIFTVIHEEQRNAEEERSKVGNELAGRYQDAKQLRFETDNLKYLRSKEEMELKQDEFKKLSDDQRRARGRLDDSKAQEKKLEVAHFLAKRMLHTRQIEQWQKEIQAIEGSLEMKERQEVIQTAKEKLRKQWDVVSSLWQQTIRGFGNAERALATEEKGLRKERESFLLELAGLDIQINELTLSIRQYTEELGTFAAQHGQDAAHAPVAALQRAISAAKTIILDMEVLEEQHKEAENRKLALHKNHAELSEKHRSYEREADELGALLDSQTYKESQLWSQIVVLLEMFDEHNRLGATGLFEEQDTIQLRFIRKMDEVEQQTKRSRREYYNQLMDVELQNQSYWLPNSDILAVKDTLDSLKIQSTPGSSYLNDRPYLEREEELERYPLLPYSLIVTRREADKIKPDLLKDTLLKSAVPIFIREEMVASDPVSFKLLANQGPQMVLEPDRFLNFKSGIQAKLKEQEQVLQDAEAYLSKLKSVRQEYERLYQTENTVTITAKRNTLMKLQSELQQSIISLSNEINENESTLARIGRELIENKALSAEHEQRAAALQGWIERSKKHEQDQKEKKKYTDRKSLVSKELASKDQQLEHLEAQMVSLGGEREKWMGDAKYALFPRLQHWFPEIVFPTYHQLSDDMDPTPIDPVEQNLLLQQLSTVESLQQSLTENELEIRTRAAQIKAASENLTELEASLNQVDENWRKVTEPAESTESIMAARNRQKSETASLEEDYQMVHDSFIRCQTELENLQKELRKVEKGIKEKHERAVEIWNEPLEQKEADIQERFQENELMLNQCKRSLERMDTLIQTLSNQIKIMNAHIEDRVNLRTVPEELMLSVREGCESLVADWLLRIKDSRVRRDEVSRKVKEEKNSLTGKLAKNERNSELETKILDRLNTVHWDNFAIAQQVLDSMLRSSRDQIESIQSDKEDMDLSRKMWVARASYRVVQIIDIMKRMERRMIIHNENNYAFPLVRLNYKNINIPRSSDEVEPMVSDYFNRCINELLSKYPKIEQVPALVIKEVINDGRIVYAALQNRFPILQVYKPVTENYFLYAAPEDYHYSDWEIINRGALDEAVGSGGQRQSVQLLVAMMIMTHKRVNRENKGWTVFLYDNPFGEMVSNNVLDPVFEISKALKFQWLIVTPPELVKNDVSVRFGVYWQLYFGGVKGDMLESTLVKGGRKLIPVSLF

SEQ ID NO: 41134 - protein, 479 aa, Paenibacillus sp. FSL R5-0345
MNLGEIQPYKEMVSLSILLQVYYLELESNERRSKEDIIALAWTALERFNIANLGTTESVERLVDGLLWSGNGGDFESYYYDDAARQMAVQKYKYFMVDEDATRSSWEENGRTIYRLSEYAMELIFMSHEIIEEFQISIKLLEIQMHIKHGRVTRALQDVNELISRVRKMIHEQQEYRNALRRNPKHIFSEFGVARHQRLEEIHQQFEEERKHFDNIHRSLARLANDEKDVIDFNEIRILSERVELSRRVHDELAEIVLNIFEVETNLRLNFPELFWGAAGFNFRTHIWEEWVKEEGLPSGDSLELLLGGLFAPNQDFVYPLPWAWEEQEVGFIPEFVMDELDDEIDAETVQYIPKGIPWTEVVELWKPVFNALAECGSFTFTEEAFTSEELTRWARTPDAIDLWVQFFHSEITVQEQAPENSNGSDECQLLIRYVLEDDPQLESLRGKLLRTSIAPEPYPRVHWSGLDMSPYIIKIVER

SEQ ID NO: 41135 - protein, 252 aa, Paenibacillus sp. FSL R5-0345
MSYTLEQVQQASRLFFELLRKKVIPLDDPAAAECLQDAGTYDALQYVAKEAGCRVMNSGQRLHLLVNPLGSVFATNFTQLKNKYSRIERKTHLHIINIIILVFLAEMDQDETHFKSGQDSMSYIQISDQVSSLFQAWIQMDDEGQFSQQWRLDIQAMSKVWTNLYMQTKSQEESDLLTRGAGSRIGLIHEGMKLLEEEKLVFISESEKRIFPREELYERMRYLYHDVDRYQELKKLIGRTLAEKDGATNAAD

SEQ ID NO: 41136 - protein, 1493 aa, Paenibacillus sp. FSL R5-0345
MPRIERIRITGLKYEKMLKKYDDMILDLCNEEGPANTLITLMNGGGKGVLLQSIFQLLMPKTPWGKDSENQVEAFFHNHKKQLKPYTFHVAIEWHLDNSERNEYMTTGIAMTAHNSLDQQDIKVDYLLYALTDYGEASELTLSTLPLFDEESAEPTSFETIQQFIRDRRGEIVPFGSHSSDLKRYYDFLATRDIHIAEWRNMRRINGEEGGIKGYFKKNDAFTNHNLFEKLIIPEIGSSLNEGPKEEDNTLQRMFIDTATVAQRLPMLEQREQVYTEFLGMAAPLYELVKLGVEAESAVQETELRGRQIYTVIYEEQKNAEEERSKVANELAGRYQEAKQLRFETDNLKYLRSKEELELKQEEFKKFSDDQGRARGRLDNSKAQEKKLEVAHFLAKRMLHTRQIEQWQKEIQAIEGSLEMKERQEVILAAKEKLRKQWDVVFNLWQQTIRGFGTAERALTSEEKGLRKERESFLLELAGLDIQINELTLSIRQYTEELGTFAAQHGQEAAHTPVAALQRTISAAKTILLDMEALEEQHKEAENRKLVLHKNHAELSEKHRSYEREIDELGVQLDSQTYKESQLWSQIVVLLEMFDEHNRLGATGLFEEKDTIQLRFIRKIDEVEQQTKRSRRDYYNQLMDVELQNQSYWLPNSDILAVKDTLDSLKIQSTPGSSYLNDRPYLEREEELERHPLLPYSLIVTRREADKIKPDLLKDTLLKSAVPIFIREEMTALDQVSFKLLANQGPQMVLEPDRFLNFKSGIQAKLKEQEQVLQDAEAYLSKLKSVRQEYERLYQTENTVTITVKRNALLKLQSELQQRIISLSNEMDENEGTLTRIGREISEYKSLSAEHEQRAIALQAWIERTKKHEQAQKEKKNYTDRKGLVSKEMANKDQQLEHLEAQMVSLGGEREKWMGDAKYALFPRLQHWFPEIVFPAYHQLSDDIETTPIDPVEQNLLLQQLSTVESLQQSLTENELEIRTRAAQIKAASENLTELEVSLNQVDVDWRKVAEPAESTESIMAARNRQKSETSSLEEDYQMVHDSFIRCQTELDNLQKELRKVEKGIKEKHERAVEIWNEPLEQKETDIQERFQENEHMLNQCKRSLERMDAFIQTLSNQIKIMNAHIEERVNLRTVPEELMLSVRESCESLVADWLLRIKDSRVRRDEVSRKVKEEKNSLTGKLAKNERNSELETKILDRLNTVHWDNFAIAQQVLDSMLRSSRDQIESIQNDKEDMDHSRKMWVARASYRVVQIIDIMKRMERRMIIHNENNYAFPLVRLNYKNINVPRASDEVEPMVSDYFNRCIQELLAKYPKIEQVPAVVIKEVINDGRIVYAALQNRFPILQVYKPVTENYFLYAAPEDYHYSDWEIINRGALDEAVGSGGQRQSVQLLVAMMIMTHKRVNRENKGWTVFLYDNPFGEMVSNNVLDPVFEISKALKFQWLIVTPPELVKNDVSVRFGVYWQLYFGGVKGDMLESTLVKGGRKLIPVSLF

SEQ ID NO: 41137 - protein, 501 aa, Paenibacillus sp. FSL R5-0912
MNWNDFGERNKRLNPLWSLGAGMNLGELQPYKEMIALSVLLQIYYLELESNEQRSREDLVQLTWSSLERFGIAKLGSPESVERLVDGLLWSGGGGDFEANYYDDQSRQMAVQKYKYFSVDEDATRTSWEENGTTIYRLSEYAMELIFMSHEIIDEFQISIKLLEIQMHIKHGRVTRAMQDVNELISRVRKMTQQQQEYRNALRRNPKHIFSEYGAQRHQRLEEIHQQFDEERKHFDNIHRSLARLANDEKDVIDFNELRLLSERVELSRRVHDELAEVVLSIFEAETNLRLNFPELFWGAAGFNFRTHVWEEWVKPEGLPDGDSMETLISGLFSPSQDFIYPLAWAWEEQDVGFLPDELPEDPDEAGEEEELHYVPKSIPWTEVSELWLPVFAGLAEQGSFTFSAEAFSEDEQRRWADTPNAVDLWVQFFHTEIKVQEQEVEGYGGADECQKLIGRLIADHPELETLRGKVLQTRIANGQQGSIRWPGLEISPYTITIVEK

SEQ ID NO: 41138 - protein, 252 aa, Paenibacillus sp. FSL R5-0912
MSYSLEQVQQASRLFFDLLRRKVISLDDPAAAECLQDTVAYDALQYVAKEAGCRIMNSGHRLHLLVSPMGSGFASNFTQLRNKYSRIERKTHLHIINVIILVFLAEMDQDEQHFKPGQDSMSYIQLSDQVSVLFQTWMDMDEDGSFSKQWRLDIQAMHKVWSSLYMQTKSQEEGDSLTRGAGSRIGLIHEGMKLLEEEHLVFISENEKRIFPREELYERMRYLYHDVDRYKELKALIGRTLSEKEEEAHAAH

SEQ ID NO: 41139 - protein, 1496 aa, Paenibacillus sp. FSL R5-0912
MPRIERIRISGLKYEKMLKKYEDMILDLCNEEGPSNTLITLMNGGGKGVLLQSIFQLLMPKAAWGKDNENQVEAFFHNHKKQLKPYTFHVAIEWRLDEPERTEYITTGIAMTAQNSMDLLEIKVDYLLYALLNYDENAELTLSTLPLYDHELNTPASFEAIQQFVRERRNEIVAFGSHSSDLKKYYAFLADRDIHIDEWRNMRRINGEEGGIKGYFQKNDAFTNHNLFEKLIIPEIGSSLNGSMREDEGSLQRMFIDSATVAQRLPMLEQRERAFAEFTSLAAPLYEAVKQGTEADRSFQETELFGRQLYTVIYDELKNAEDKRRKTADELAGHYQEAKQLKFETDNLKYLKLKEERDRKQDDFKAVSDNQARAKQRLEESKIKEKDLEVAHYLARRRLQIRQMEQWQKEIEAIEGSLAMKERQEVIQAAKQELRLQWDEVYRLWQARILFFSGRQQALGAEEGVLRKGREAFLLELGGLEGKIHELTALIRQYTEDLGVFASRHGQEAAHSPAAALQRTMIAARSMTENIVALNEQRKSAEEEKLALHTRHTRLTEKLLGAASQAEELTDRIEAQMGKESQLWSQLVVLLEMYEEHQQLGTTALFEAKSLIQERFIRRLDDAEQQTKRLRREYYNQLLDVELQQEAYWLPNNDILTVKDALDALKISSMIGSAYLNDQSYLVREEELERHPLLPYGLIVTKRESAKLQPELLQELLLKSPVPVFVREEMADATGASFLLLTHQGPQMVLQPERFLDWKQGIASRLKEREEELQDAEGYLAKLKSARQEYDRLLQGEHTVSLRARQQVLETRQQELGKSLNELNAEMSLNEETISGIARDLAVSEAEKTEHEARAAALREWAERSRKQEQDYKDKQKSVELKTALSKEIAVKEQQLALLKADIDSLALQREKWLGEAKYSLFPRLQNWFPEIHFPSEHGGAAQDTVQEEAVPDEALQDKLLQLLSTVESLQQSLSQNELEIRTRAAQIKAAGQQLVELEAAVHQVDDGWQSAPEPDESPEVIQSARTRQKSDTAILDEDYQHIRDSYIRCMAELDNLQKELGKAEKAIKEKHERAVELWHEPLVQKEEELSARFRENEYLLNTSKQALASMDIWLQTLSNQSKVMDTHVESRMPLRDVPEDVQLDVRENCEQLVADWLLRSKESRSQRAEISRKVKEEKTTLSGRLAKSGWNVELETKIQDRLNTVHWDDFSIALQVLDSMLQSSRDQIESIRSDKEDMELSRKLWVGRAAKRVVQITDILKRMERRMIIHNENGHAFPLVRLNYKNITVPRTTDDIEPLVSEYFNRCISSLLEKFPKIEQVPASAVRELINDGRMVYAALQNRFPVLQVYKPVTENYFLYAAPEEYHYSDWEVINRGALDEAVGSGGQRQSVQLLVAMMIMTHKRVNRENKGWTVFLYDNPFGEMVSNNVLDPVFEISKALKFQWLIVTPPELVKNDVSIRFGVYWQLYFGGDKGDALDSTLIKGGRKLVPASLF

SEQ ID NO: 41140 - protein, 502 aa, Paenibacillus sp. FSL R7-0273
MNWSDFGERNKRLNPLWSLGAGMNLGELQPYKEMIALSVLLQVYYLELESNEQRSKEDIVGLAWSSLERFKITGLGTAESVERLVDGLLWSGNGGDFEAVYYDDHTQQMTMQKYKYFTVDEDATRSSWEESGTTIYRLSEHAMELIFMSHEIIEEFQISIKLLEIQMHIKHGRVTRALQDVNELISRVRKMTQQQQEYRNALRRNPKHMFSEYGVMRHQRLEEIHQQFDEERRHFDSIHRSLARLANDEKDLIDFNELRLLSERVELSRKVHDELAEVVLGIFEAETNLRLNFPELFWGAVGFNFRTNVWEEWVKSDGLPSGDSLELLVGGLFAPQQDFIYPLAWAWEEQETGFLPEEWLEEPEDAGEEPEETYIPKTIPWPEIAGLWHPVFAGLAAEGRFTFTVEAFTEEEKLGWTNNPNAVDLWAQFFHAEVKVQESGAESPAGTDECQRLIQYLLDSHPELEVLRGKVLRTKITGTGQQPAVRWPGLEMSPYTIIIEER

SEQ ID NO: 41141 - protein, 252 aa, Paenibacillus sp. FSL R7-0273
MSYTLEQLQQASRLFFDLLRRKVISLDDPAAAECLQDTGAYDALQYLAKEGGCRIMNTGHRLHLLVNPLGSGFASNFTQLKSKYSRIERKTHLHIINVIILVFLAEMDQDEQHFKPGQDSMSYIQLADQVSAVLKAWYEMDEEGRFSKQWRLDIQAMYKVWASLYMQTKSQEDTDTLSRGSNSRIGLIHEGMKLLEDEHLVFISENEKRIFPREELYERMRYLYHDVERYKELKALIGSTLAEKEGDAHAAH

SEQ ID NO: 41142 - protein, 1493 aa, Paenibacillus sp. FSL R7-0273
MPRIERIRIAGLKYEKMLKKYDDMVLDLCNEEGPANTLITLMNGGGKGVLLQSIFQLLIPKTSWGKDNENQVEAFFHNHKKQLKPYTFHVAIEWKLDSGNRDEYITTGIAMTAHSSADQLEIKVDYLLYTLTEYDEHADITLSTLPLYNAEEGGPASFEAIQQFVRERRNEIIYYGSSQAELKKYYAFLAGRDIHIGEWRNMKKINGEEGGIKGYFQKNDAFTNHNLFEKLIIPEIGSSLNDGAREEDGSLQRMFTDTATVAQRLPMLEQREKAFAEFTALAAPLHELVKQGAEAERSFQETELLGRQIYTVIYDELRSAEDNRGRQADELVRLQSEARQLRFEADNLSYLRGKEEHDQKQEEFKAISDNQGRARSRLDESKEQEKRLEVAQYLAKRQVHKREVAQWQKEIEAIEGSLEMKERQEVIQSAKEELRLQWDQVYRLWQQQLSGFAGRQQGLSAEEAGLRKERESYVLELGGLESRINELTGSIRQFTEEAGVFASRHGQEAASAPGPALQRTLLAANTITDSIAERTALRSQGEARKLSLRTNLAELQAKLAAERRQTGGLHNQLEAQMGRESQLWSQLVVLLELYEEHQVLGATALFEAKALIQERFIRRLDDTEQQTKRLRREYYHQQLDVELQQEPYWLPNADVLTVKDRLDGLKISSMSGSSYLNDLSYLQREEELGRHPLLPYGLIVTQREADKIPEDALKNVILKSAVPVFIREEMGGAAAVEPFLLLANQGPQMVLQPEQFNDWKRGIASRLKEQEEELQDAENYLSKLKTARQEFERLFQGEHTVSLKAKLLELELVVKELDTAVAGLKTEISDNEELLASIQKELNEYEQEKTGLEQRAQALRLWEERTRKQEQDYKDKQRAVDRRQALVKEISVKDQGLVQLKTEMENAALLREQWIGDTRYSLFPRLQSWFPELVFPNDRQIEILEEEELNPDAQNTMLQLLSTVESLQQSLTHNELEIRTRQGNIKRAGEQLRELEAAVYQVDRDWQKAPEPQDTPEAITAARARQKNETVYLEEDYQSVRESYIRCQTILENLQKDLRKTEKSIKEKHERPVELWTDVLSVKEQEITEDARENERQLSLCKQRLTAVDQRLQMLGNQRQILDTHVEGRVQLRDIPEEVQLQVRESCEHMVADWLLQSKESRAQRAELTRKVKEEKNNLSGKLAKCGWSNELETKIQERLNTVHWEDFFIAGQVLDSMLQSSRDQIESIRSDKESMELSRKLWVGRAAKRVVQITDILKRMERRMIIHNENGHAFPLVKLNYKHITVPKTTDDIEPLVSDYFNRCISSLLEKYPKIEQVPAAAVKELINDGKLVYAAMQNRFPVLQVYKPVTENYFLYAAPEEFHYSDWEVINRGALDEAVGSGGQRQSVQLLVAMMIMTHKRVNRENKGWTVFLYDNPFGEMVSNNVLDPVFEISKALRFQWLIVTPPELVKNDVSVRFGVYWQLYFGGDKGEMLESTLIKGGRKMIPASLF

SEQ ID NO: 41143 - protein, 502 aa, Paenibacillus sp. FSL R7-0331
MNWSDFGERNKRLNPLWSLGAGMNLGELQPYKEMIALSVLLQVYYLELESNEQRSKEDIVGLAWSSLERFKITGLGTAESVERLVDGLLWSGNGGDFEAVYYDDHTRQMTMQKYKYFTVDEDATRSSWEESGTTIYRLSEHAMELIFMSHEIIEEFQISIKLLEIQMHIKHGRVTRALQDVNELISRVRKMTQQQQEYRNALRRNPKHMFSEYGVMRHQRLEEIHQQFDEERRHFDSIHRSLARLVNDEKDLIDFNELRLLSERVELSRKVHDELAEVVLGIFEAETNLRLNFPELFWGAAGFNFRINVWEEWVKSDGLPSGDSLELLVGGLFAPQQDFIYPLAWAWEEQETGFLPEEWLEEPEDTGEEPEESYIPKTIPWPEIAGLWLPVFAGLAAEGRFTFAAEAFTEEEKLGWTNNPNAVDLWAQFFHAEVKVQEAGEENTAGTDECQRLIQYLLDKHPELEVLRGKVLRTKISGTGQQPAVKWPGLEMSPYTITIEER

SEQ ID NO: 41144 - protein, 252 aa, Paenibacillus sp. FSL R7-0331
MSYTLEQLQQASRLFFDLLRRKVISLDDPAAAECLQDTGAYDALQYLAKEGGCRIMNSGHRLHLLVNPLGSGFATNFTQLRNKYSRIERKTHLHIINVIILVFLAEMDQDEQHFKPGQDSMSYIQLADQVSAVLKAWYEMDEEGRFSKQWRLDIQAMYKVWASLYMQTKSQEDADTLSRGSGSRIGLIHEGMKLLEDEHLVFISENEKRIFPREELYERMRYLYHDVERYKELKALIGSTLAEKEGDAHAAH

SEQ ID NO: 41145 - protein, 1493 aa, Paenibacillus sp. FSL R7-0331
MPRIERIRIAGLKYEKMLKKYDDMVLDLCNEEGPANTLITLMNGGGKGVLLQSIFQLLIPKTSWGKDNENQVEAFFHNHKKQLKPYTFHVAIEWKLDSGDRNEYITTGIAMTAHSSADQLEIKVDYLLYTLTDYDEHADLTLSTLPLYNAEEGGPASFEAIQQFVRERRSEIIYYGSSQAELKKYYAFLAGRDIHIGEWRNMKKINGEEGGIKGYFQKNDAFTNHNLFEKLIIPEIGSSLNDGSREEDGSLQRMFTDTATVAQRLPMLEQREKAFAEFTALAAPLHELVKQGAEAERSFQETELLGRQIYTVIYDELRSAEDNRGRQADELVRLQSEARQLRFEADNLSYLRGKEEHDQKQEEFKSISDNQGRARSRLDESKEQEKRLEVAQYLAKRQVHQREIGQWQKEIEAIEGSLEMKERQEVIQSAKVELRSQWDQVFRLWQQELAGFAGRQQTLSAEEAGLRKERESYVLELGGLESRINELTGSIRQFTEEAGVFGSRHGQEAASAPGPALQRTLLAANSIADSIADRACLRSQGEARRLSLRTNLAELQAKLAAERRQKGELNNQLEAQIGRESQLWSQLVVLLELYEEHQILGATALFEAKALIQERFIRRLDDTEQQTKRLRREYYHQQLDVELQQEAYWLPNADVLAVKDRLDALKISSMPGSSYLNDLSYLQREEELGRHPLLPYGLIVTQREADKIPPDALKNVILKSAVPVFIREEMGATAVEPFLLLANQGPQMVLQPEQFHDWKRGIASRLKEQEEELQDAENYMSKLKTARQEFERLFQTEHTVILKAKSRELELVVNELDGAVAGLKTEISENEELLASIQKELNEYEQEKTGLEQRAQALRLWEERTRKQEQDYKDKQRAVDRRQALVKEISVKDQGLVQLKSEMESAAQLREQWIGDTRYSLFPRLQSWFPELLFPNDRQSEIGAAEEELNLDAQNKMLQLLSTVESLQQSLTHNELEIRTRQGNIKRAGEQLRELEAAVYQVDRDWHGAPEPQDSPEAITAARARQKNETVYLEEDYQSVRESYIRCQTILENLQKDLRKTEKSIKEKHERPVELWTDALSVKEQEISEDTRENERQLSLCKQRLTAVDQWLQTLGNQRQILDTHVEGRVQLRDVPEEVQQQVRESCERTVSDWLLQSKESRAQRTELTRKVKEEKNDLSAKLAKCGWSSELETKIQERLNTVHWEDFSIAGQVLDSMLQSSRDQIESIRSDKESMELSRKLWVGRAAKRVVQITDILKRMERRMIIHNENGHAFPLVKLNYKHITVPKTTDDIEPLVSDYFNRCISSLLEKYPKIEQVPAAAVKDLINDGKLVYAAMQNRFPVLQVYKPVTENYFLYAAPEEFHYSDWEVINRGALDEAVGSGGQRQSVQLLVAMMIMTHKRVNRENKGWTVFLYDNPFGEMVSNNVLDPVFEISKALRFQWLIVTPPELVKNDVSVRFGVYWQLYFGGDKGEMLESTLVKGGRKMIPASLF

SEQ ID NO: 41146 - protein, 501 aa, Paenibacillus borealis
MNWNDFGERNKRLNPLWSLGAGMNLGELQPYKEMIALSVLLQVYYLELESNEQRSREDLVELTWSSLERFGIAKLGSPESVERLVDGLLWSGNGGDFEANYYDDHSRQMAVQKYKYFTVDEDATRTSWEENGTTIYRLSEYAMELIFMSHEIIDEFQISIKLLEIQMHIKHGRVTRAMQDVNELISRVRKMTQQQQEYRNALRRNPKHIFSEYGTQRHQRLEEIHQQFDEERKHFDNIHRSLARLANDEKDVIDFNELRLLSERVELSRRVHDELAEVVLSIFEAETNLRLNFPELFWGAAGFNFRTHVWEEWVKPEGLPDGDSMETLISGLFSPSQDFIYPLAWAWEEQDVGFLPDELPDDPDEAGDEEEVHYVPKGIPWAGVCDLWLPVLTGVAEQGSFTFSAEAFSAEEQRRWAETPDAVDLWVQFFHTEITVQEQEAEGQGGADECQKLIQQLISGHPELEVLRGKLLRTRIANRQQGSIRWPGLEISPYTITIVEK

SEQ ID NO: 41147 - protein, 252 aa, Paenibacillus borealis
MSYSLEQVQQASRLFFDLLRRKVISLDDPAAAECLQDTVAYDALQYVAKEAGCRIMNSGHRLHLLVSPMGSGFASNFTQLRNKYSRIERKTHLHIINVIILVFLAEMDQDEQHFKPGQDSMSYIQLSDQVSALFQTWMDMDEDCSFSKQWRLDIQAMHKVWSSLYMQTKSQEEGDSLTRGAGSRIGLIHEGMKLLEEEHLVFISENEKRIFPREELYERMRYLYHDVDRYKELKALIGRTLSEKEDEAHAAH

SEQ ID NO: 41148 - protein, 1496 aa, Paenibacillus borealis
MPRIERIRIAGLKYEKMLKKYEDMILDLCNEEGPANTLITLMNGGGKGVLLQSIFQLLMPKAAWGKDNENQVEAFFHNHKKQLKPYTFHVAIEWRLDAPERTEYITTGIAMTAQNSIDQLEIKVDYLLYALLNYDENAELTLSTLPLYDHGLNSPASFEAIQQFVRERRNEIVAYGSHSSDLKKYYAFLADRDIHIDEWRNMRRINGEEGGIKGYFQKNDAFTNHNLFEKLIIPEIGSSLNGSMREDEGSLQRMFIDSATVAQRLPMLEQRERAFAEFTSLAAPLYESVKQGTEADRSFQETELLGRQLYTVIYDELKHAEDKRRKTADELAGHYQEAKQLKFETDNLKYLKLKEERDRKQDDFKAVSDNQARAKQRLEESKMKEKDLEVAHYLARRRLQIRQMEQWQKEIEAIEGSLAMKERQEVIQAAKQELRVQWDEVYRLWQARIQFFSGRQQALGAEEAILRKGREAFLLELGGLEGKIHELTALIRQYTEDLGVFASRHGQEAAHSPAAALQRTLIAARSIAENIIALNGQRKSAEEEKLALHTRHTRLTEKLLGTASQAEELTDRIEVQMGKESQLWSQLVVLLEMYEEHQLLGTTALFEAKALLQERFIRRMDDAEQQTKRLRREYYNQLLDVELQQEAYWLPNNDILTVKDALDALKISSMIGSAYLNDQSYLVREEELERHPLLPYGLIVTKRESAKLQPELLQELLLKSPVPIFVREEMADATGASFLLLSHQGPRMVLQPERFLDWKQGIASRLKEQEEELQDAEGYLAKLKSARLEYDRLLQGEHTVSLRARQKVLETQQQELGKSLNELNAEMSLNEETLSGISRDLAVSEAEKTEHETRAAALREWVERSRKQEQDYKDKQKSVELKTTLSKEIAVKEQQLAHLKADMDSLALQREKWLGEAKYSLFPRLQNWFPEIHFPSEHGGAAQDTVQEETVPDEAVQDKLLQLLSTVESQQQSLSQNELEIRTRAAQIKAAGQQLVELEAAVQQVDDGWQSAPEPNDSPEVIQSARTRQKSDTGILDEDYQNIRDSYIRCMAELDNLQKELGKSEKAIKEKHERAVELWHEPLGQKEEEISARFRENEHLLNTCKQALASMDMWLQTLSNQSKVMDTHVESRVQLRDVPEEVQLDVRENCEQLVADWLLRSKESRSQRAEISRKVKEEKTALSGRLAKSGWNVELETKIQDRLNTVHWDDFSIALQVLDSMLQSSRDQIESIRSDKEDMELSRKLWVGRASKRVVQITDILKRMERRMIIHNENGHAFPLVRLNYKNITVPRTTDDIEPLVSEYFNRCISSLLEKFPKIEQVPASAVRELINDGRMVYAALQNRFPVLQVYKPVTENYFLYAAPEEYHYSDWEVINRGALDEAVGSGGQRQSVQLLVAMMIMTHKRVNRENKGWTVFLYDNPFGEMVSNNVLDPVFEISKALKFQWLIVTPPELVKNDVSIRFGVYWQLYFGGDKGDALDSTLIKGGRKLVPASLF

SEQ ID NO: 41149 - protein, 504 aa, Paenibacillus stellifer
MDRMELEGTVSGFQERMSKVALFDPLFELRRKKQTDASGQPIDMMELGLLALLFFFEQKLLRNSRVGVKELAIYLLRLMEGKLQVDEAQGEELARDIIQVFRPASGKKREFAFYNWEACQPQQVHTSILRANAFDAKTGTQYYALDEDGLELVFATKEFYSEFQLSIHQLVLRKQLEKGEFQGALRQINEMRVDVESLQERMMKLEHEIKRSIVSEETLKRYSELLEDIYARLQRENDEFEELRQFVKETRARLYADNRPENRVRAYEYIVKIAGELEKVHAEHSGLLQQSMELKNQALYSAKESLYYTGLSSFNFEQDVAGLIFGLPLPLESMRGIVSPFMALQQSRNWSPLTLLAEQNISGIGEQEPREEGFLEAEDDGRELQYAARRSAFYMEIMGLLLQELERTPELELREFLNRLSEYGRQDWLDRRSFYDFWLILHQRSPVRAVGMDQRDDKTGLEEVFGLLGRKVLLVWEAVGLVETGTRYQIQNMKLTQEDESIGL

SEQ ID NO: 41150 - protein, 1481 aa, Paenibacillus stellifer
MPSISKIRFTHVMYEGGNKRYNDETFLFDGHNGAIVLENGGGKTVFIQTALQAMSPHTDLAGRKIKDTLLLENGPAHIAVEWILNDKPRRRYAVACISLFLSAIGVDSYRYVYEYSEHDDHGLDHIPFVKEHMGKTRPSDKGEIQDYYSSMAQRYPLTARTFGTIKEYRSYLEEHYHIIASEWEAIAKINSTEGGIENFFDECKSTSQLFDRLLIPTVEEAMEGFQPGGFAALFESHREEFKRYKELKEQIAENKLILQELSRYVLVYEGLHEAQQRYDEARGEAKAYRELSLRQHEETKAEQTGLAARLQEWMQRSEALQLELKSLEIAEAEQEQSALSKCMRQLQEEADRQLQRLKQGERSFYSLKYAEQRVSRETAGARLQQLELQLARLEQSEDEQRLQQRWETCGGKLRAVFARDEREVSAKLDAYRSELGSLKQEQAETEKAVLKLRQEIRTWELQLREKETQAQAKKEQQEQIARAVLANPSLEKVEEQMPIWSEQQQQLEERRIDHMRALKEINAEQNAVRSRQKTIEEDIRRTEREQAKLEQQREQLQEQHNVLACDLAALRPNWQRLTSLYDKAASISEQLLEGIQKRQDQKSDCLHKERLAYRYVDDYHEQDMFFADPVIEGFVHSWSRQFSLLQTGIQYIRSLNLDEEGRSRAKDALWPVTLVTTGAEKKLLMQKLAAAGEEFAFPVRVLGAGEAAEIVRGSEGGVTEEQWAVPDHWRSNEDEAVFRQWKAGLLHRAGQIRKDREEKEEELVLWQRMEQRFRQFLNQYPLAAVQTLEQQLQVARKELISCKQQHERHEQRLNQLEEAVDKYRTELAEMQDLIHQLGVWLKDGQRYQALGFEREKLEKELVPVKQQLAGLERQLQMNQYRLQRLQEEQTAVERSCNDTNIRLQVLRSDELYGKVQPFAHVNSSRPLAELKEEYRVLERERAGIMKERNQLETEQEYEREKITFADKAMHELLREHPDLNERMILLVEAETQKEALWQQIEGDRAELERVSDRLQVQQAKLQKSEGRLENLRVQFSGQFPKKHPVSFGEALEQVRQRLRQENVRLQQEKKEWQQRSDAVELRLGELEQVLRLWDKHALVHRLDDSRLRTAALDECRLMDFAYARMDFSERSVAGLQSCQEKMEEERIQVARGRDSFKNYCVSRVQDVKLRQMAIQGIELKDSYAEVMEFRQTMETRIQKAIHIAEETIQTHDRDLQEFIQRVHMHLKQIMQELKELPRKTRIKTADGWREIYSFMIPEWEDQDGKDRIRSHVEWILEQLERIERERPSDEQSKLPQGEVRRRLEKWLDSRQLLQVVLKNEAMKVSCRKVMNDHQVTKASYSWEQSNRWSGGEKWSKNMTLFLGLLNYVAERRQYIETNMKIHRTVILDNPFGKASSDHVLSPVFFIAEQLGFQIIALTAHAEGKFLHDYFPIVYSCRLRSTSDVAKQIIEPTKRVQSAYFRDHAPETLERIDSRMDQVKLF

SEQ ID NO: 41151 - protein, 349 aa, Paenibacillus stellifer
MQIKQTIEQHISLMKKTTIPLEELESLFKGAEVGPRAFAEAVLELENSGVLESVKAAGRTLKQPSLAYRYRVNKQEMTGHHIRLLQQVRLSLHPAIQLDGYFALSAEQFQQDQPWIEQINQYLKIYGFPSSAVPAPERSFQLTGNEKWITDLGGHALLKRLGLWERLLIHPVSDPLMFAVNPALSHPASSRCLNLIVENKTTFQALLPVLTSSLFSTLIYGCGNKITGNLDMFPLQYPVPGRDHRFYYFGDLDYEGIRIWHEASKQHPLLPALPFYEACLAKPYVLGKSNQRRNEEALGAFLSYFSGDAQDQLIRCLGCGGYIPQETLTSEELQQIWRSQEWKQWIAWN

SEQ ID NO: 41152 - protein, 480 aa, Paenibacillus graminis
MNLGELQPYKEMIALSVLLQVYYLELESNEQRAREDIVELAWSSLERFNITKLGTAESVERLVDGLLWSGSGGDFEAYYYDDLSRQMAVQKYKYFTVDEDATRTSWEESGRTVYRLSEYAMELIFMSHEIIEEFQISIKLLEIQMHIKHGRVTRAMQDVGELISRVRKMTQQQQEYRNALRRNPKHMFSEYGVLRHRRLEEIHLQFDEERRHFDNIHRSLARLANDEKDVIDFNELRQLSERVELSRRVHDELAEVVLSIFEAETNLRLNFPELFWGAGGFNFRTHIWEEWVKSEGLPDADSLELLIGGLFTPSQDFIYPLAWAWEEQEAGFLPEDVLDEPDEAGEEESIPYTPKSIPWAKVSELWLPVFKGLAEEGSFTFGAEAFTEEEQRKWSGTPDAVDLWAQFFHTEITVQAQDADSQSGAADECQTLIRHLLAANPELTVLCGKVLRTTIQGSHRRNVSWPGLEMSPYTITIVER

SEQ ID NO: 41153 - protein, 252 aa, Paenibacillus graminis
MNYSLEQLQQASRLFFDLLRRKVISLDDPAAAECLQDNGAYDALQYMAKEGGCRIMNSGHRLHLLVNPLGSGFASNFTQLRNKYSRIERKTHLHIINIIILVFLAEMDQDEHHFKPGQDSMSYIQISDQVSSLFQAWIEMDSEGGFSRQWRLDIQAMHKVWTSLYMQTKSQEEADSLSRGASSRIGLIHEGMKLLEEEHLVFISENEKRIFPREELYERMRYLYHDVDRYKELKALIGRTLTEKEGEAHAAH

SEQ ID NO: 41154 - protein, 1498 aa, Paenibacillus graminis
MPRIERIRIAGLKYEKMLKKYDDMVLDLSNEEGPANTLITLMNGGGKGVLLQSIFQLLIPKAAWGKDNENQVEAFFHNHKKQLKPYTFHVAIEWRLDNNDRNEYMTTGIAMTAHSSVDQLEIKVDYLLYALLDYEEHAELTLSTLPLYDIDAGGPVSFESIQQFVRDHRGEMASFGSHSSDLKKYYNFLAERDIHIGEWRNMRRINGEEGGIKGYFQKNDAFTNQNLFEKLIIPEIGTSLNEGLPEQEGSLQKMFMDAATVAQRLPMLEQREKAFAEFTVLAAPLHELVKQGTEADLRYRETELLGRQMYTVIHDELKTAEEGRRKKADELVQLHQEARQLRFEADNLNYLRSKEEADRKQEDFNKISDNQSRARQRLEDSKAKEKELEVAHYLARRKLQLRQMEQWQKEIEAIEGSLEMKERQEVVQAAKEELRQQWEQVSRLWEGQISAFSRRQQSLSAEEAARRKERESCLLELGGLDSRIHELTASIRQYTEALGAFASRHGQEAAHSPAASLQRAIAAARGFAENIVTLNERRKAADEEHFKLHTKHTQASGKLLAHEQQERELQEQLDNQLNRESQLWSQLVVLLELYNEHNELGATGLFEAKAAVQERFIRRLDEAELQTKRLRRDYYHQLLDVELQHETYWLPNSDLLKVQDRLDALKISSMLGSAFLNDQPYLIREEELDRHPLLPYGLIVTEKEAAKLQPGMLKDLLLKSAVPVFIREQMAQPAEQPFLLLGGQGPQMVLQPDLFLEWKQGISARLKEQEAELQDAEGYLAKLKSARQEYERLFQNEHSVSLKGKLKALNSLQNELRTSLGELNTEINENAAAIGVIVREISECEAGKAEQDEKAAALREWNERTQKQEQDYKDKQKAVDRKSELNKEITGKEQQLAQLKAELDSTSLEREKWVGDTRYSLFPRLQVWFPELVFPAGLQASSTGHAEDQPEFPLDASIQDKLLQTLSTLESLQHSLSRNELEIRTRAAQIKATAEQLAELEAAVQQIEANWRNVREPGDTPDSIMAARTRQKSDTGMLDEDYQLVRDSFVRCQTELDNLQKQLAKAEKSIKEKHERAVELWNEPLDPKEEEIRERSRENEYALNGCKQTLASLDQWLQTLASQSKVMETHVEGRLQLRDIPEEVQLRTREACEQAVAEWLLRSKESRSERSEISRKVKEEKTSLSGRIAKSGWNTELETKIQERLNTVHWEDFSIALQVLDSMLQSSQDQIESIRSDKEGMELSRKMWVGRAAKRVVQIVDILKRMERRMMIHNENGHAFPLVRLNYKNINVPKTTEDIEPLVSDYFNRCISSLLEKFPKIEQAPAAAVRDLISDGKIVYAALQNRFPVLQVYKPVTENYFLYAAPEEYHYSDWEVINRGALDEAVGSGGQRQSVQLLVAMMIMTHKRVNRENKGWTVFLYDNPFGEMVSNNVLDPVFEISKALRFQWLIVTPPELVKNDVSVRFGVYWQLYFGGEKGDMLESTLIKGGRKLIPASLF

SEQ ID NO: 41155 - protein, 356 aa, Paenibacillus graminis
MKELIMQVIECKYGAVRRTRTKLKLEKLEQEIIGTYEYRSDYVDAGGFSKFQEGMKVLLAEGYLTPLIRPKKYKSSALDEVYWLAETASTTEGWNRASMLRVLAAHPLKINYYMNHPAEQTAQIWEYIERIYTFLQSAGEREIITREERSLELFGDEKFLSGKEGMQLLTRLGITLENLKAVTVREHFEYYPEPLQSVRSILISENHSFYDSAKRLIKAGKSVCGLQPDMLIYGEGWKIASSLMFLEELDVDPVGASIFYVGDLDKAGWDIYGNLKLSYPHFKLNLALTVYEYMVDVAKQTYPYANEQKCTASHLELVLQELSAVPRLKLCIEKLLEVNNRIPQEVLNYEVMARLA

SEQ ID NO: 41156 - protein, 480 aa, Paenibacillus odorifer
MNLGEIQPYKEMVSLSVLLQVYYLELESNERRSKEDIIELTWTALERFNIANLGTTESVERLVDGLLWSGNGGDFESLFYDDVTRQMSVQKYKYFTVDEDATRSSWEENGRTIYRLSEYAMELIFMSHEIIDEFQISIKLLEIQMHIKHGRVTRALQDVNELISRVRKMTQQQQEYRNALRRNPKHIFSEFGVARHQRLEEIHHQFEEERKHFDSIHRSLARLANDEKDVIDFNEIRILSERVELSRRVHDELAEVVLNIFEMETNLRLNFPELFWGAAGFNFRTHVWEEWVKEEGLPSGDSLELLLSGLFAPNQDFVYPLPWAWEEQEVGFIPDLVMDDFEDEVDAEPVQYIPKGIPWAKVVDLWKPVFTALAEQGSFTFTADAFSAEELTGWANTPDAVDLWVQFFHTDFLVQEQAPEGGSGVSDECQQLIQYVLAEDLLLESLRGKTLRTSIAPEPASRVRCPGLDMSPYMITIVER

SEQ ID NO: 41157 - protein, 252 aa, Paenibacillus odorifer; identical to SEQ ID NO: 41026

SEQ ID NO: 41158 - protein, 1493 aa, Paenibacillus odorifer; identical to SEQ ID NO: 41027

SEQ ID NO: 41159 - protein, 516 aa, Actinopolyspora erythraea
MRSDEGTDAVPLARDVAIPTDDESITRRRRALAPIQVLTDIERTKTSLDGEFWEHYDLFTLSLAVVDQVALAMGISAGRTWDEIVEYAAKQAARQHPDGGVSEWDTVAERVVVSLVTTEVETVPYLSHTLDGPRWLAQRFRLLYMQASGTEGTEHLRASEQAINIFLEALDLDIEAAQIANEAQLSALIERGAVESAVQIAQHERYRSVQLLERIRRIVADTLLDPDTHDWIEDVPALLGRSLDHVKARLDAEAELLEAVTDRRAELDDPHRLDAANQLVEVLRECRHRHDQLHRHLINARSKLREAVDDRLSRSTRAVSRSEIGKDLLSPYMRNSVREAAASCERMMAAVGGVGSRWMPAMSTLIEELCAPPRPPQQGEEYLAPEFDDADQPEWWEPYEDTVEAMFEAIEEPVTLSALLERAAGTHVTDVDGTALDTGFLQAALVHAAHRVWATWLAGRSAGDRMLVAVPTGERLVSERVDCSELLLVPAVITADIDARYDVETGVSTEERETTE

SEQ ID NO: 41160 - protein, 1483 aa, Actinopolyspora erythraea
MSEDLPTPPLRLRRIHLHGVGPDRARFDPLDLDFATSDGAASRVLLSLTNTGGKSTLITLVTSLIVPSSRAQVGGRQLGDYVLTGDTSHVVCEWEDETTGVRMVTGTVMEWKDGRRQPGPQQRSTTNMYRRWYLFRTRPDFPGIDDLPFLTEGRRTTFDQYLTMVKELLDPYPAAQAVFAKTQQEWVETLERQTNIDPVLVGYQMRMNDSEAGAEKLLESFDSPDHVVRFFVSALNDEQHLTDFTSKLRDYAELAVDRPRLEALAAFCEQAGARVERVARGGEALADAEREEKQARISGGEHATALSNRIEQDRQRCEELALRKQRTQEKAAELRRKFSQVSDIRMQLHLESARVELAAAESEEEQARKAEEEHGFEARAWEAVQLVLDISEARARVRTAQRAYDTAEQGMEPLRRRADQAAAALAARLDTLATEAERKAEDADTRASEATEEQRRAQERLQEATRRVDAVRRRIDTLETTVHESEAAYEAAVSAGWIADGEPVRDCVTRWTERRDTARQEEAEAERVAEEAEADFDRAEADIEELENELVSLREKAYEHRSRLEAFDGEVAGLADDEVLLSVLGAPPADVASVRRAADLTERAAHESEERAAGHQQRATEAQKEVAHLDEAGTAPAGPDTLAVLRVITEANIGAVTGLRWIEKNVPDPEARAAYIAAHPELAGGVVVSDPGRFDEVTALLAENAPRTRTTVTVTVAADEHGTTTGDAERFHYVVVPHRATWDAEWAARTRENLHRTAVHEGEQAALAREAARRNRACSAACVSFANRWEETSREKLVARAEEADSTLRARDEQRTQRMNERQRHRQEAATARQNRDRARDRASEAEQWLVKAEELRAQVEAAERARSEKSAGEAELAQANSEVDSARRAEREYQVVRDSCVAEAAEQRANRDPWLKERAQLGTAPAAVDPGGSLEAVRAEWETARNQRDAAERGMPEALELDHAKQLLSQWEVRRERHGTREWKRAEELSETSAASSAASLNGALTRAKEAARSAESKRLEAQSAVERARGHLEEVRPTDRQNHVDLSRTPEWEPATPQEIPSVLERLDTYGAEVRRERDEAENEVDEVAELHDQLLKDIEVFGDIVEIWTADRSPTTHVFQGTKESARTRMLELRHDHVSKNRALNTAQDELREAVHHARAVASDVRWKDLGEPVVVRIRSLSEPDLVGESSTLAERIRALGESATGDLEDLDTHRTILRDDLIVLCREQRRLLREVVRSSQLPVGLGELSTQPAIRIRFADAPDDEAAARLSDRIDTWARELAENPKRATSSDARARWLADAVRDTVVNRTRAGAWSIDILKPSIDGQVFYCTPERIPYEFSGGQELTLAVLVYCALSRVRAAHRVGGPRPPGTLILDNPFGSASAETLIAMQHRLAAHTGLQIICATGLHDTGVDAAFTGPGSVIVKLRNDGDQRRNLSFLRLRANVVDGVDVAGAMTGGRDPSASTNWVDALRYEVGR

SEQ ID NO: 41161 - protein, 351 aa, Actinopolyspora erythraea
MSRVLIQPSEVEALRTRLHDAGTVRVTLEELWRFWVEAAPRLVGSPEQTPGLSAALAELGSRQEIELPRQAWDRSTTPPLPRSVRVPKARTASRKRQWVSYPWCRDLGWVSSLTTLTDTQFDNLVAVNAWLTRRPANVVPVPMRYRSAEIFGDEKRLEALARTTLFGPGRLSLELLACVRRAPPLPAVSVGTGPDVLVVENSDPYWAAVDVLSYRDNHPVGAVIWGAGNSFPAQVGTLAVDVAGRGPVTGEIWYWGDFDPPGLAIATNAAAAAAELDMGHLKPAHLLWEEMAGRPTQNPGHCAWTGEVAESWLGPPLWERFSRVRAEQGRIAQEAVPPYTIAEWAVTLLKE

SEQ ID NO: 41162 - protein, 501 aa, Bacillus niacini
MNESWEGFAQRIQRLNPLFELGRGMEVGELKPHIQTILMQVLLTIFYRELNDDDHRRKSDIKYMVEDSIKQMKLLADEKQIERITSGLLYQGKEEYSKPFEALYYDEIKQSWETQTFRYVTMDELYTNLEMGGSIVYKLTDVAQEMIFMSREMAEEFSITIEQLYSMQLIKNGNFRKATRNLDHLISRVNRLMAKEFSFQKEMINNPKILLIEDEWQRADNRVEIEKQFEEEKNHFRTITSMIDKTKRRNEEDDFIQKELILLQEKIGHTRQLHDRFAKLVIQNISYEMKLKAENPSLFWENSLVSFREHFYENWLMKEGVQRFTVIEKLLSPLFSPKNEFILPLDWIWGEQELNEKQVTDTIIEEEQEEGITRLRVTNWDSVIKAWSYVFQFLQTNGEFSLTDLKELPLEVQDLWFEESETIDLWMMFDKKPLKVQVLHRKEETLSDEREILLYKLMKEYPQFEMFEGLKIYTMFDHQAEPFLWYQTKMTPFKICVEENK

SEQ ID NO: 41163 - protein, 248 aa, Bacillus niacini
MNAETIKKASAVYFTLLKEKVIDENSEHFQTYFDPEVRQTVLLLADESGTYIIEAPKRIHLVVQPTGSVFATNFTHLKDKHKQVETKKHFHLISIIIMSFLAAIDRNQAAKIRTKREGISFYALERQVNDLIMKWESLLKNQPTFGEEERIDMKEVVITWKYMEVDSDDFGLKKGNRRTRIGLIAGAMRLLESEGLIVILDRDDIAKVIPKQELFERIEYLYHDYDRYELFKKLMTSEEDEHAENPSN

SEQ ID NO: 41164 - protein, 1487 aa, Bacillus niacini
MPKIHRIRIVGLKYDGMQKQYKDTTFNFHNEETSTNGLIAMMNGGGKGVFLQTIFQILKPGTSWGKQNNRYYQQFFFNNKEQFIPYTFHVLIQWELDGADHRHLITGGMFSAEQRISMSEENENKTLEQEAKILPNITFYTREFERKEEASIEHIPLYENGEVAETEGLKDYLKWNGYDVYRDTKKHYRILDTYGINRKDWDIMKDINKDEGGVGKYFEGAEDDHSLFQKRIIPTVSQVLHRTEHQKNDLVEIFKSQASIAKDLPVLLKREQAHKEFLEDIVPFEEHLAKGVEHKEIVQASIQTGRQLLGALEHLKQTEEEGLLTLQKDIEKLIIKQADLRYQKDNLEFAKAHRDVMDWEKKLVQEKEKHVSLQSVVKEKQERKEQLAFQALLKEWNENEQSIVSLSQQIATLEQNSGLEQVNQRMDEIKKEAREQWNHSFLSIQEGIKQYLGYQKFLTKKAKELSQQEKQKTTEIAQLSSEIDFLYTQMHNFDSKEAALIKEFGDRLTYDLKGLTDSFLKQIDEKNARLVELHTKDKESSEKQNKLATSHGTHVQSIQYSEEKYEELSLANEKQKEREAKLVDRLHGLLDDVTAPLTHSLLSKYSLQIEEILSNNRQQAEQMKKELWETQLDYSLNDEPFWIANKDVKELKEWIDEKTGIDVFYGTQFLQSLSPEELANTLINDPLLPYGLVVSGQQWQKINQQVLSGRMFKSPVPIFLREEMNNEQQQPTFVIINGKEKELLTDKNQFTSWKINITKQIEDKKDTLFEIEKTETSLRRVLKEIDRFSSSELSSDIEKAMIQEQNTLLSLKTKLQEIKTQEEKEKESQLALREQLEKTKGKIEKFSKNVETLEGFDQEKTLHLENKRVKLEKEKQKEALTLQQQEIGKEHQQTVELQNQWNQTYLEWKLTTEQNIKEIAFFIEEAVFPAEQKAEQSEEVPKLSPHLLQEINGSIGELRQLQKSKEEQARELLVLQARKETEQKQQKKLEKKLHTHDEEWNKAAEPEEPISILENMLQNAQKEAKAAEKEEREQGTAVTVAETSLKHATEQRDKLGKKIEKHEKQPETWEDLDLEVKEVEIKDQTKVTKEEVKKAEKVQKETETNIAGYEGDLLTLSVILKEEAAVFTNNDVEKIKSQGKACILSWCEEHQAVQEEGQEKHAKIDQSLRNLKLTIEGKDWEVRFKNEVLTTLDHLDTRHYTHIQTIVKNMKRFSQSGLEQLERDKERAEKAQNFWASRASMKVMSISEAIRSMVAKMKLKNERGSFPLVQLKEDILPKKPEDIEPLLKQHFVSAINKITKQFVMIDDHNRALDEEIKQLISDEQILFVSLRNRYPELLVYNMRTDNAFMYGKPQREHYSTWQTINQGSKTKSDGSGGQKLSARMVMMMMLLSVKSETDHSWVPLVCDNPFGQAASAHVLDPIFAVAEKLKFQFIVVTPPELVKTEISQRFDAYYKLDFIREKGKEIVSDTIVPAFRIYQGEEVSQVR

SEQ ID NO: 41165 - protein, 356 aa, Bacillus niacini
MVIDIIETRVRGFIADIQHPKQKKKININDLEIQLRRLLDDYFEMDGYALFHRAIEALQAEGILIPIQNNQYNGRTPGLPLYYWVNIKVQSAKWDRLGMMKLSDQFDFSFYERHPQWQTKDEWDRIHHLYSFLQSSQERDIVSVEERSLELFGHEKFLLDGDSFPEGKGFLARIGVSEERLKMVNYGEPFVFWMKQGKEINDIQRVLIVENLSFFHTSIKLLEANQLDYEPELIIYGEGTKIERSFSFFFRMFPAKNYLFYYAGDLDVAGYGILIRLIEKYSDCCIQPALKIYRKMLKCIDQRNEQKQGQTQNLKYRDAFFQWFTEEEQNLLMQLWQENKRIPQEVLNIETWRRWL

SEQ ID NO: 41166 - protein, 472 aa, Desulfosporosinus sp. Tol-M
  MOD_RES (401)..(406): Any amino acid
MSQEFEFLEGFEKRMRIVAAIDSIVNRGNRKMELERLFSFGQLDNLIFSVLVFIMERTLSEDEECTMGSIADFVRRILPAYGLELTPEIIHQLTEYIIKDILQNGGEARFYPIMTYGQGMTETRIRLIEDKLREDDRSYLITYQLTDQGYDLLFRTKEVEQEISFTIEELKLRELIKRKNYKKAIGQSSNLIQMVRQKKNELRQLMEKIRGNIYDVDIREYERLTGSTYALLEEEYGMMNEILGMITLSEERLRVEEQTQGTLDEAMKKARAEIIKIRRNIHTTINEQKELILDRHHLSAIYKETLEDSFFLAQSKKFDFEQEILARLEQCDERHIPMLWQLFNPLFKPNPVRTLNVLSLYEAQSRLRQEEQETVNIEIEELGEDKERLKAEKINTANIEXXXXXXATGELDLDYCLNCIEYDHPELFGIESLRVVKLSDKILEEEIVFRQGEEYFSKTISINDFFFEVKIK

SEQ ID NO: 41167 - protein, 235 aa, Desulfosporosinus sp. Tol-M
MSNLNIALRIFKRLLDKGQLDRETESDLFLEFRNPEVRQALTEMEEELEFRIVEASGTLYFVPAGDNSLLGFTGKDFREWVASDARLADAYLLSYIAMFIFFLFYGGKNQNPKQREFLRISKLLEELDRRFAAAALNEEQTLAIEEKYSLNFMRIAELWESKQGFEENRRKTKAGTILNTCRLLERENLIRIPDNEREIRPTRKLDDLMLNYYLNESRVEEIISLFEGAEAIADH

SEQ ID NO: 41168 - protein, 1136 aa, Desulfosporosinus sp. Tol-M
MPTINRIRILNFSYNNNTRHILDESFNFHGGENVLLNLANGGGKSVLVQLFLQPVVPGIKIQGRRISGFFHRQKQPTFILLEWKLDEGGGYLLTGMALIPAEAAGGEEGKGKIRYFTFTCKYNGGNAFDIEHIPLAEKQGNLLHLLSFREARDLMREKQQKDPYLFAYFPEEDGADYGRHLAQYGIVQGEWRNVIAKINDNEGGIEEIFQKYKTSSQLLDEWIIKNIEKSMYREKAELHRLEEMLEKLVQEVTENESYILEKALFSEFLAVYGKQSEELANFLQHLEEQKNLAEKLAALSAYLTAQLEAFQDKKAENELAKDKARREEQRIELEDRSHSYLQKKTKYEAALELLGTVENRLKDTEGSLEQAQMAEKIQQAARLLGEIRRKEAKLSGIEESLAAEKANYDKDQRIGELEYSLKNLLEKELTYLREKELSWQAEKQAGESNLQQVEDDLQANAQKKSSVDSQKGQLTERKNQMEKEAANTLQKLGLSLRRNLLGELNPAEVEQAKSNLAKALAALEQEENLLAAEQAANAQERRELETDIQQCQARQAEEMMQLQNIKRDILEYEQLEAEAKEILTRYDLESALLFQPTRLAAAFKQKIQALAGSVEQAGLRWHDAQENLLSLKNGRLHVPAELVTLFSDLDISYDTGETYLRGLPADLCQKMLQNNPLLPYAFILSRSEIARVAEAMENLTRKENLNQKESLNQKENLIQQENLTLKRVIPFISYEDLNVEMESSGRMVQTNQGITLACFYEGRIFAPDSLEKLIAELEQKSSQALEQREHYREEHRRTVADQATCARFAYAADYRYNLGLKENAAEEKLAELDRQVMEAEIKRSTLLIRQEEISDLLKENQSKQLPAQSRIESFQEFLEKEPAYQLCRRELSGVLDESKALEIRRIKLDEQRNILQKELSTVRYALRDNERQQLDVQRQYELYQKAPQTKLVEGTIEELTERLRVVRDTYTAGIRELETQKQDLQGDIRQKGTELSNLHLQEEAYATVRYEAEKAGRLREEISGLEKLVKELQVDLRTAIAKEASAKAVLDSALDEVKRLGYENPLPPEEISGDFSGRRKLVRIQQKELDKESLALQTQSTLYEKLKSQVAQTMDFQGIKAAKGFVPEQDLEAQTK

SEQ ID NO: 41169 - protein, 350 aa, Desulfosporosinus sp. Tol-M
MPKTDPTISIFDWGKTKTTITVLELQKLFKEPDYEAFYTLTLKMIAEGKLVAITASGQNGRLPSLYNKYRIIRPLKDHTDCLEQIRCLEPSLNIAAYLQKPERYIKHREVLEGLSRYLWYQASLLLQPMSRKERSFSVWGKEKLLDELLPLIREVLRFNGLTEQFLNYYDTPEPFFEYRHERTVPLALLILENKDTWFTLRKLMQETGKNHLAGRTIDALIYGEGNKITKTGALENYAKEMFGAATTANGIFYYFGDFDPEGIRLFYRTQKANPNLRVRPFIELYHQMLLLAMNRELPLSPDSRQMDVSWQDFEQLLGLSAAESKLEFLQQGRYIPQEILNYQVLAEMLE

SEQ ID NO: 41170 - protein, 505 aa, Lysinibacillus manganicus DSM 26584
MDTELSETIVKDSRERLKRVLLFEPLFELDRRTFKDLHEKRVDLRSFGLYVLLYFFEMKLIREKHIGVIEIAQFLKSISKDTYALSDSQLEEIVKIILAVFRPTGGQRKSYSFYNFELQTEDSIDFHYIKTNDFDIQTNRQYYALDDDGLELVFATKEYFQEFQLSIHQLMLRKLLEKGEFVGALRQINEMRMDVETIHERMNKIEHEIKRNVVSIETQNKFMKVIEDRNFRLNRENEEFEELHQFVYETKQNYYNLADETQEARAFEILLKVEKALHQVHHQHQQLLNKSLQLKTQVLQSAEEALYYIGVNSFNFDNEVTSKIVSTPYPLESMKGIMAPFLPLGQFNTWSLLTVFSPQSWSETEDGHTSKTFEKIIDEKQQEQYARIIRTYYKEIFQDMMTAFEPESEWTLKEWIEKLQSSNDHRLLQRRFYDFFILCHQKSPVTSQIEVQSEESLHLLAEVMELLHGRTLICKELPDRIQVNERFEIQNMQFSLVKEVAPIEI

SEQ ID NO: 41171 - protein, 247 aa, Lysinibacillus manganicus DSM 26584
MRFDSQEVEQAFELYRELALKGVISGDKANTYKVNEAIYTLTNQFVDKLDADCITVGHEVHLIPRTKLSPFHISNEYIKRQFLGSKSSNSDIYLMYLCSIVLIGSFYNSYQSTEPTIEFMTYEVWVQQVNDRIESLKRHDQEQLEKLEKEYSYRWSAIIEKWETLDELKESASRQTGRTMSRLSFIDTVRRFLQEYDLVEFIGQNEVSLTEKTKVIVGRYFMEREFNRGILEFLYGFEEQEDTHASY

SEQ ID NO: 41172 - protein, 336 aa, Lysinibacillus manganicus DSM 26584
MRGKISRFKNSFITLDHLEQFAEHNISYEQFALSILALEEEGVLVAGKSTHRNLKVPSLAYKYRINKALLKKDVYQDIEKKRFKLHKLLILDEYFHLPPEVWKNDYPYIEKINTYIETNGLPNNEVPAPERSLALVGDEKWIQEKGGQKILERLNIWDALQITPVSDPVAFIINPKKVTSDKHLHLIVENKTTFDGLSTAILDTQFTTLIYGQGYKITSSIDYFHKQLPLDRVHHKFYYFGDLDWEGIKIWYKLRQIIDIHLAIPFYAECIDKTPTTLKTKQKPSEEAIEKFLSYFDSIQQEKVNITLENKKYWPQEVLSSKELKQVWRESNWTQS

SEQ ID NO: 41173 - protein, 502 aa, Lysinibacillus massiliensis 4400831 = CIP 108448 = CCUG 49529
MDQSFIETIAKDYKERVKRVFLFEPLQELGRKNRTDKKGKEIDMKSLGLFTLLFFFEMKLMREKKSGISELIQFLQKFTNGTYDLDEKQLEEIARIILSTFRPGTGKKKIQSFFNWETQQDDQIDYSYIKATDFDVKNNRQYYTLDDDGLELVFATKEYFQEFQLSIHQLMLRKLLEKGEFVGALRQINEMRMDVETIHERMVKLEHEIKRSIVSIETQKRFMEVIEDRNFRLSLENEEFQELQQFVSETRNNYYYQPNPEKEKEAYELLLQIEKELSIVHSQHRDLLNQSFVLKKHALEAAEESLYYIGVDTFNIDQDIVSKIISTPLPLESMKGVLAPFLTIEKIETWSLLSIFAPQSWSEDDQSSNNAVFDTIDEEEANAKYVNIKRKLYADMMNNMVEIFEGKTEWLLSEWIDQLQTRQHPWLNNRAFYDFIILCHQRSPLFQEKESEEESALHLLSNALELLNNKIVVIEEIQEIIKVNERFEIQNMTFYLKENSHT

SEQ ID NO: 41174 - protein, 244 aa, Lysinibacillus massiliensis 4400831 = CIP 108448 = CCUG 49529
MRYEQDQVLKAFSLYSELAQKGVASGDLARAYKVEEAIRSLTDHFVEMNDAVCLSVGQELYLVPKTKLSPFHVTNEQLKKMHLGTKATNVDLYLLYFCSIVLIGCFYDSYQSIEPTLNFITLDEWLNEVNNRIDSLKEHDVEKLEQLEKEFSYRWTAIIEKWDALDDVKETANKQSGNTLSRLSFLDTVRRFLITYQIVENIGNGEITITEKTKVIVGRYFMEREFNRGILEFLYAFEEEQKSD

SEQ ID NO: 41175 - protein, 343 aa, Lysinibacillus massiliensis 4400831 = CIP 108448 = CCUG 49529
MMELIDHLFTFSKTYITLDELEKMDSTYQTYEQFSLKILELEEQGLLQAVKSSGRNGKTPSLAYKYRIYYSKLKKDSQGEIEKFSLFIHPAIKLDAYLSALPQKWQEDKLYIEKINSYLQKHGFPEDEVPAPERSLALVGDEKWIQENNGQKLLESIKIWDQLRIIPVHDPLSFAINPLHINNSTQYHLIVENKTTFDGLIGKITDTQFTTLIYGQGYKITKSIEHFKKQIPIPTAKHVFYYFGDVDWEGIKIWHLLTQKIDAIPALYFYQSILKKQPIPIKTKQTKNDAANEQFLSYFNEHEKSELLKILTNDTYYPQEMLSSNELKQIWSESDWTSLLSKQ

SEQ ID NO: 41176 - protein, 503 aa, Bacillus ginsengihumi
MITQLKGVTENYRERMQRLALFDPLFRLENKREKDENGQPIDYFGYGLLTLLFFFENMLIRNKKTSIQDLAKYLYELNRGEYSLSLEGYEKVARAVVEAFRPPSGKRNEKTYYNWETREHETVHYSILKADRADVTTNTQYYKLDEQGLELVFATKEYFTEFQLSINQLVLRKQLEKGEFVGALRQIDEMHIDVESLRNRMTVVKHEIQRNIISDETYERYKQMVEDINARLTRENEEFSELHTFVKETKNRLAYDMNSEKDRKAYELILQIDRELGEVHHIHTMLLKESIDLKTTALRAAQEALYYVGISSFNFKQEITAALVSKPLPLVASKLLTEPFLMIEQSESWSPLVIFSEQRIETKDGGEHTNDFDDLSDEALQELENAKVQKLFGDIMNLVLEAMQGRDAISLKEVIDHISEADSDWLKRPIFYQFWYVMHQRSPISFEKNEERNESLFKEVLELVKYQYSSIEVEELHEIMTVTKRFSIQNMMLRLIVGEQDGL

SEQ ID NO: 41177 - protein, 244 aa, Bacillus ginsengihumi
MDYSQDEVLKAFQIYAKISRNGYSEGDELRIYLAEDKVRGLVDQFAKEVDCTIFSVGERLYFVPLALNSPFHISNDTLKKNYFTGKTVNADIYFMYVTIIILIGEFYDSYQTIEPTRDFISMSDWLEQVNDRLETLHEIEEEELKEIEKEYEYNWSAIIGKWADMDDIKETAKVQSGRTISRLSFLYTVKRFLIAQELVQDIGNDELQLTEKAKVIVQRYFMELEYNRGILEFIYSIDRQKEEV

SEQ ID NO: 41178 - protein, 1062 aa, Bacillus ginsengihumi
MPSISKIRFTNVVYEGGAKRYNDDIFLFDSHNGAILLENGGGKTVFIQTAIQAILPNVELAERKMKDTLSLESSSAHIAIEWIINERPRRYGLTAVTLYMAKEGVKSYRYTYEYEEGDKHRIEELPFIRTSIGGKVRPASRDEMNEYYMTMKSSHPLKANTFDTVKSYHQYLEERFKIIASEWKKITVINSSEGGVESFFDGCKTTSQLVDQLLIPTVEEAIAGKGSVDFVQTFEKQREHFKAHKRLRRVIEENKQVEKQIEGYVSCFKQLDQVEKQLEEQKVKAKALYHHTKQEEEEIKTALTNIQASLEDWQSEKDEWERKEKSYEISLLEQKKAEAYEKYKLEKDEFDKIVQDQKEKNNRIAKLRVARVNEEIKKNEELQTHFLEQLSLLEKDEEIIDLEEQFADNTAFLKGYFVGEEEKIQGNIKQIEFQKDRKREEIEQEKKVYDSIVEELNKRLLKETELDTKKTHLENDMAEIAKAILSHPLKERVEDEFPKWESDFQRYEQEILDFNKQLKGLEKSKHELKEAIPNVQSEYEKLQEEARTLKHQIKAIEDQQNEILTELVVRIPQWQHYYSIYEKEETIIGQLEEKVEKLSREREELLFKERQATRIADDYENNISFTADPKLELWKNRWRNQFAYLELGTDFVQQAARSLEGSVEEYHTIYPYWAITFIVTETEVSKLHDKLLSVEMEMSHPVYICTEEEARMLIREQGKLNDQQVFPRIWKENLSIEKFNNWKIEVQKLAIQSKEKRTNKELELQSWRTVLAKVHEFVRNSPFNQYTYLTERFKLASEDEAKQKRVLHELTMQIETKDKEMEVYNNRLAEANNLYNGLMSRLDHGRKYFSKKRECKLCKQELIKVREEINEGKRKQEKSKRLLNNANEIFEELDGQLRLAKDPLYKLRGDSYYKEVAAEEPKYSFKSLELLVNERKSLRSKLENKQQGRGILEEKLAAVKSKLNDLTNERKLLQEQYGNVEALEFPAYGYEEISQLNKTIRNLDGKIASLRPTVDRLWGQWTKASNEFDLRKGDFYEVYQELVNFNVPLKEVKDQLDIEQKI

SEQ ID NO: 41179 - protein, 338 aa, Bacillus ginsengihumi
MKKRIISILELAKKSTITLSELERVANPLDTYDDFAAAVQALLDEGFIKAVKSHGTNWKNLPNSFRIQKGKVMQPLIGEIQEMQFKVHPAIDLRPYFSSSKKRWMEDKPWIVMIDQYIQKNGLPTNYTNSSERSYELMKDEKWIDEKGGKAILEKINLFDKLKIMKTPDPLMFAINPTQLLSNQRVHKHLIVENKATYSGLLDSLSTTNFTTLIYGSGWKIASSLNQLSNQLGLTKKEEQHEVYYFGDLDYEGISIYFHLYEKYNVKLAQCFYEALLRKAFYKGKENQTRNDVAFQHFLHYFGKDDQEIIAALFEENGYYPQEALTKEELYTIWRTML

SEQ ID NO: 41180 - protein, 488 aa, Escherichia coli
MSLGFLEQARNESMARRELSIQSHALLVVRTLDSIYSALQRNPFDGVELDALAAIMYLFDAMLYYADRERQPGMTRKEAELCLVGHLNEAYPGQEEPDYAQVASKIFAAIKDPFRLRYYDFSQRTHSEEQIVRLVRYDQLSGSDDILWSLTDDGMLFYTLRLDETPIERAAILAWRTLKTIRRGEIDKAVHQIQSTQRQLEQYLIGMRMKVRAAQSGDLSASYAHDIRPVLNDSFDKTREVLEHIQNSMSAITEMLVEGSSKLNPDKLNKLRKAQEIFAEVCAFTQRYQDCLLDVNKDFERARLKLIIPRDNTLFRETLEKGALIPLLSHSPDIVEKEIDGLIARLLAPRRQDDDRHILFDPEALLNLYLDRFEQALPHEIQDPTDQPVAIETNLRNIPESVIKKCSDWVSDRLKNWGHVSFRDVFDAYECEEFSEQEQQVCLLHIGSLAANSDPAIEVEIDEAIETTLWRANNVKLLTVAPLDPFEE

SEQ ID NO: 41181 - protein, 1478 aa, Escherichia coli
MWLIKRVYMDGAGHEEAFYKDLTLDYIGLSQAVSSPVVEGLRSPVRNATVVTSTYQQLVNGGGKSTYIALLLSIFEPSVSDFTQYLANHRQSEYHYRNYFYKELSVVLVEMVNESGQTLLLGHAHQRNGDDVDRTLFICDAPDSLMGAPFDEVPSYSRAERNSELRPYANSLRSFDSWLNLKAGSEGGMHWRKTTRQNEWRAFLLEQQINVDLIKTMVTFNSEEGGLTRFIEYKTEHDFLGAFFACTMSKDAAERLRELVAHEVERQGELEGIRRNESFLKDVLANWLAFLDPAKQLESIQAQQQLLEDGFREAMRDLAAFVRDAQVEQTQLEDNMDSLQTHIGQAMSLREQLGKRRALLEYDLVQHQFNKQKAIVDVLQDEADTNRHQIEITHAAIDYKAYAKALNEYRQADEDLKVFQSETERPLQVIFERTASEALGTLEWAIGRHRQREATLEEELGQMGRESHVLRQSYDKLQKTLGGLETERDGYKRDKFQGELQRNELCEAGLIQKDETPVAAQYRLELTLRDAKQSEELANTILHQKEQALEAQLHVVREASIDKSEARQKLILAEQKHQSAVDSALVLAKTYQKLPTSMQHDLDIEDTSWHSELCGLQFDNVLNANSQTLNGMKERLLQARHELDELRMTGHELVAKQVNEALEAFYAAGIARDKLWTFPHYLASAYNDDAQKIAAVIDQNPGRYLSLVALDNVTFEQVHKISEILPWKKAPIAIYLLDEAQDLRRETSELVQVVLSNPDKHGYSQAAYETRLQDLENTVASQEVSVNAAESALKVLESFRNDWSRHYEQYGKHWAGLLDQRELALLMLENADAALKQAEHDEQTLRDEKRDVQVRLNNAQQQKIQAEKAYDKVSLFVEKEWAKRETAIMKLEQLAAQIQRSKNTLCTQRERLERLSELEKNKRSEKTLLNIQIGSWSNLCNEPFYSEITATEGMEGRSPEYAHEMAAQAHKKLLEAANGDQVTVLKQQLKDAEQAQRYASERLTAQPTYNTYPDEVKASAINELTVINNRIVRLKEQQKQFTQNLISSQVTLQKFSQSCEEASKALDEDFVWEEKPIEIEAIQTSLAEIVNNLYAIEHQIKAQLEQKTLLLRKIENVKERLQNAKTAQAMIQPITPSSAAGLPGRILSIIEYADDLAAQCQMYAGLNETLKQQNIRVSTVWGYFRKRIEEELAKDPDARASQEYLRRLDSIATYHEVLGDLERVGTGISQVFEAVQDSLEQFQRSIDLTVTHLTAHLEGAIKLLRRAMSVKIPEDCPVLPGRPIIKMTDRLNDVAADLRGFASSRLQQWIARGQIPRAPNRDALTADLVQSVFGEGELEVRLLKTNASRPQWTPVTRLEGSGGQRLTSAFLLFVTVGKVREYDTGISSAGFLLADNPLGKSNANDLMRIQTQMAKAYKIQLIYLTGISDENAQSMFDNHLFLNKVQKLRRRDLVTVDKERHALWAASLAAKPQFDPVI

SEQ ID NO: 41182 - protein, 347 aa, Escherichia coli
MIWLSRLESTANKHRLAAGKAARTVKANAVLDEVLRAHNQEALSQEVPDLLSQAVTQLLERDWRAQPKHKASWQRYWRGMSLPSTFVYEGAIVPTKTTSEIAWHPWLARRITGQLTQPIKVRLQQLNTYLFRQTGCDKSLFPGLLGHRERSLLIFGDEKALDSLPPDGWKHVTLTLADMGAFRRAPPLPYESSRCHDLPAIIVENSDVYYRLCQLNQIQTRWSLVIYGAGNKVSGQAECVSQLLEAEQVEQLLYFGDLDVAGLKIAHQLRCKLLNDYGISLHLDEWLYNELILNGLMTAEGNANNERFDFELQCGWMPKFVLREMKTLLAIHRRLPQEGVASLGLVI

SEQ ID NO: 41183 - protein, 488 aa, Escherichia coli; identical to SEQ ID NO: 41180

SEQ ID NO: 41184 - protein, 1478 aa, Escherichia coli; identical to SEQ ID NO: 41181

SEQ ID NO: 41185 - protein, 347 aa, Escherichia coli; identical to SEQ ID NO: 41182

SEQ ID NO: 41186 - protein, 537 aa, Desulfosporosinus sp. BICA1-9
MATTKLEFLDGFEQRMKLVAAIDSIINRGNRKMEFERLFEPGQLDNIILSVLVFIMERTLTEDEDCTMESIANFVAQILPDYSLNLTSDIHRKLTEYIIKDILQNGGEARYYPVMKYGQGMEQLRIRLIDDKLIDDQRGYVLNYQLTDQGYDLLFRTKEVEQEISFTIEELKLRELIKRKNYKKAIGQSANLVQMIRQKKNDIRQFVQKVRENIYDVNIEEFERLVSSTYTLLEEEYGMMNEIRGMIVLSEERLKEEENTRGALDEQMTKARSEIAVIRRNINLTIGEQKELILERLSLSRIYKETIADSFALSRARYYDLEQVILKPLEQCEENKVPYLWQLLNPLFKPNPDRTLNLLTLFERQARLKQEEEGSQSIVVEELGEDKELLRISKLNDSNIEFIRSLLEFAHRKRESFRFSEFFQDLETQQNIFKELTIDDLIFKTMLKLYDLQVIDIKKWKTQQEDVVANATGELDVSYCLYRIMQYTQPDLFGIKKLEISKPDEHLFAQEIEAQIGDGKFSRRIAISDFRIEVSFE

SEQ ID NO: 41187 - protein, 233 aa, Desulfosporosinus sp. BICA1-9
MSDIKTALKIYRKLVEKGQLDRETEGDLFLEFRNVEVRAILAEFEEELDFKTIEVAGTLYLLPNSGNGVLGFTTKDIRESVATDARLVDAYLLSYISMFILYLFYGGRNRNPKQREFLRISKLIEELDRRFAMALADREQVKVLEENYALNFTRIAELWDSKQDFEERGRKTKTGTILNTCRLLERENLLRLVDEDRELRPTRKLDDLMLNYYLDDSRVEEIKGFFEGAELDA

SEQ ID NO: 41188 - protein, 425 aa, Desulfosporosinus sp. BICA1-9
MPRINRIRIINFSYNNDSRHIQDETFNFHGGENALLSLANGGGKSVLVQLLFQPIVPEIRIQGRRINAFFRKKRLPAYVLIEWKLDGAGGYLLTGIGMVSAEVSGVEDEKNKVKYFTFTSNYPGSNAFDLAHIELVKQSGNILEIKPFREAWEMMADKEKKDLYHFGCFYDDDGDRYRKRLAEFGIAQDEWRNIIAKINDSEGGLDEIFQKYKNSSQLLNDWIIKTIEKVIFKDRSEAHRLEEMLAGLVREVIENERFILEKQVLDEFLGVYGEQVGALVELLNRLEEQKLIGGKLAALNSYLNTETIVLKGTHEQNKEELVTINQEQLRINLEERSNTYWLRSDEHALAASRLAEAEKNSQENEDKLEAAKRSGKIMQAAGLRAEIRGKEADLSGIDEKLATSRSQCDTDERMRNLEYSLKKLS

SEQ ID NO: 41189 - protein, 351 aa, Desulfosporosinus sp. BICA1-9
MKRLEQVLKNPKKTISDQELQQIFQESDYDLFHTEVERLVERGILSPVKSAKSNGRLPPLFNKYRIIKPQADNTGYLESIRRLNPVLNLSGYLQRPELYKKHLEIIEGISRYLWFAKDLLKMPMSRKERSFSVWGREKMLDEHRALVMEVLKFNRLDENFLNYYDTPEPFFEYIHDRGEPMTILVIENKDTWFTFRKLMQATGKNCITGRVVNVLLYGEGNKITKQRALEDYSATMLGGQGDQAGSSGQAARFLYFGDLDWEGIRLFFRTREANPTLELKPFSPLYRLMLEMGQSLELPKSLDQRGVSAPLSEFLALLGLPEEESLGAWLAEGKYIPQEIINYQVAAKIIK

SEQ ID NO: 41190 - protein, 501 aa, Paenibacillus sp. IHB B 3415
MNWNDFGERNKRLNPLWSLGAGMNLGELQPYKEMIALSVLLQVYYLELESNEQRSREDLVQLTWSSLERFGIARLGSPESVERLVDGLLWSGGGGDFEANYYDDQSRQMAVQKYKYFTVDEDATRTSWEENGTTIYRLSEYAMELIFMSHEIIDEFQISIKLLEIQMHIKHGRVTRAMQDVNELISRVRKMTQQQQEYRNALRRNPKHIFSEYGAQRHQRLEEIHQQFDEERKHFDNIHRSLARLANDEKDVIDFNELRLLSERVELSRRVHDELAEVVLSIFEAETNLRLNFPELFWGAAGFNFRTHVWEEWVKPEGLPDGDSMETLISGLFSPSQDFIYPLAWAWEEQDVGFLPDELPDDPDEAGEEEELHYVPKSIPWTEVSELWLPVFAGLAEQGSFTFSTEAFSEDEQRRWADTPNAVDLWVQFFHTEIKVQEQEAEGHGGADECQKLIGRLIADHPELETLRGKVLRTRILAGQQGSVRWPGLEISPYTITIVEK

SEQ ID NO: 41191 - protein, 252 aa, Paenibacillus sp. IHB B 3415
MSYSLEQVQQASRLFFDLLRRKVISLDDPAAAECLQDTVAYDALEYVAKEAGCRIMNSGHRLHLLVSPMGSGFASNFTQLRNKYSRIERKTHLHIINVIILVFLAEMDQDEQHFKPGQDSMSYIQLSDQVSALFQTWMDMDEDGSFSKQWRLDIQAMHKVWSSLYMQTKSQEEGDSLTRGAGSRIGLIHEGMKLLEEEHLVFISENEKRIFPREELYERMRYLYHDVDRYKELKALIGRTLSEKEEEAHAAH

SEQ ID NO: 41192 - protein, 1496 aa, Paenibacillus sp. IHB B 3415
MPRIERIRIAGLKYEKMLKKYEDMILDLCNEEGPSNTLITLMNGGGKGVLLQSIFQLLMPKAAWGKDNENQVEAFFHNHKKQLKPYTFHVAIEWRLDEPERTEYITTGIAMTAQNSMDQLEIKVDYLLYALLNYDENAELTLSTLPLYDHELNTPASFEAIQQFVRERRNEIVAYGSHSSDLKKYYAFLADRDIHIDEWRNMRRINGEEGGIKGYFQKNDAFTNHNLFEKLIIPEIGSSLNGSMREDEGSLQRMFIDSATVAQRLPMLEQRERAFAEFTSLAAPLYEAVKQGTEADRSFQETELFGRQLYTVIYDELKNAEDKRRNTADELAGHYQEAKQLKFETDNLKYLKLKEERDSKQDDFKAVSDNQARAKQRLEESKIKEKDLEVAHYLARRRLQIRQMEQWQKEIEAIEGSLAMKERQEVIQAAKQELRLQWDEVYRLWQARILFFSGRQQALGAEEAVLRKGREAFLLELGGLEGKIHELTALIRQYTEDLGVFASRHGQEAAHSPAAALQRTLIAARSIAENIVALNEQRKSVEEEKLALHTRHTRLTEKLQGAASQAEELTDRIEAQMGKESQLWSQLVVLLEMYEEHQQLGTTALFEAKSLIQERFIRRLEDAEQQTKRLRREYYNQLLDVELQQEAYWLPNNDILTVKDALDALKISSMIGSAYLNDQSYLVREEELERHPLLPYGLIVTKRESAKLQPELLQELLLKSPVPVFVREEMADATGASFLLLSHQGPQMVLQPERFLDWKQGIASRLKEREEELQDAEGYLSKLKSARQEYDRLLQGEHTVSLRASQKVLETRQQELGKSLNELNAEMSLNEETLSGIARDLAVSKAEKTEHEAREAALREWAERSRKQEQDYKDKQKSVELKTALSKEITVKEQQLAHLKADMDSLSLQREKWLGEAKYSLFPRLQNWFPEIHFPSEHGGAAQDTVQEEAVPDEAVQDKLLQLLSTVESLQQSLSQNELEIRTRAAQIKAAGQQLVELEAAVHQVDDGWQSAPEPDESPEVVQSARTQQKSDTVILDEDYQHIRDSFIRCMAELDNLQKELGKAEKAIKEKHERAVELWHEPLAQKEEELSARFRENEHLLNTCKQALASMDIWLQTLSNQSKVMDTHVESRMQLRDVPEDVQLDVRENCEQLVADWLLRSKESRSQRAEISRKVKEEKTTLSGRLAKSGWNVELETKIQDRLNTVHWDDFSIALQVLDSMLQSSRDQIESIRSDKEDMELSRKLWVGRAAKRVVQITDILKRMERRMIIHNENGHAFPLVRLNYKNITVPRTTDDIEPLVSEYFNRCISSLLEKFPKIEQVPASAVRELINDGRMVYAALQNRFPVLQVYKPVTENYFLYAAPEEYHYSDWEVINRGALDEAVGSGGQRQSVQLLVAMMIMTHKRVNRENKGWTVFLYDNPFGEMVSNNVLDPVFEISKALKFQWLIVTPPELVKNDVSIRFGVYWQLYFGGDKGDALDSTLIKGGRKLIPASLF

SEQ ID NO: 41193 - protein, 484 aa, Paenibacillus sp. IHB B 3415
MEKMDQPLISIFQTNESKPEMHQALRDIALLSGVLNDLNSQNFLQTPIEILRFLRIIQLINEEALGLDEPIENVDTLYFRYRNRYKDLDPPSKKKVEQIVNVLVKYNWISKQTRQLKMRDVGKRMMDTLIRLANDSLAYYMHDDIGRSLFQARRDAELSEAYDDHGISGGNKIASMIRNVENAIQLMKERELEMLADRNALPQLEIIHQLMQELEIKLTERFRQFHTLEDSLVLSHLMQAGTSALADGTNLSMGMINKYLKFTMMKQTMLLSSINPEKVRMFITQMYDPPQESDIPNAHQIMSFMEQNEYEGESMDGLWMPVKFAASLSGVAISEAIQYLEDYEPLVDRMQEDIQDTQYIHEEIDITQLEDMMGDSEWLLTKSMIETDAIELFMQEVEQAPLETVIIEATSAEWGDAINALTALSALVGSKKLTMEEAAENSEFQAPLYDKEWDWMNPEDINQVVKHNKSSMNMQKRSDDELDG

SEQ ID NO: 41194 - protein, 224 aa, Paenibacillus sp. IHB B 3415
MSLTDELNVNPLNVMQAIKGMLTEAEEIVFMNLLFSSSATIRVGNFGLSRREVEKQLKISDDGEQFNSFLIRVNQAVSRYFKVIYDVKRDQVIVMMRVPARSARSTLSKESLAILLFIFYQQEVLQHEFTLFDQLLNALGHETTKANQRLILNIDQLKKIGALEEYDTNSNEKAYTITGIGANMFSDSFLRRTVEFSQSNQLNKEEVLKFFKRYNLYQEGTDEE

SEQ ID NO: 41195 - protein, 1073 aa, Paenibacillus sp. IHB B 3415
MIPWKMWFTGIRDYQPTMMDLSGKESHILITGPNGAGKSTITYCMGVVLYSSKVDIDGLKSRNLLPDDTWKAHIRLLFKNEGSMRIDAPAFIEFSIYILQEPGQPAKKEFIIQSGDDPEQWDETIKYTSGDRQYNFTTYKKDLQYKYKIDPDLFYLIWYQQEVNQFAVMDPQERFRIFAEMHGIDQVQHNWEESMEKLKEVQESLRTADINVANKKQWLGMAKVALERYEDNRKRLVEGGRMYAGALLKLESFYKQEQQHLVAKQEQLLVDQEAAKDSLDLLQEQAERINYELSQVQTENERINEEIIVLQEKLSVVNNEINDTTNVINELNNQLKELNQEKSGITRTEEEVQGQLAAITLQLQALNNDTGKAEADIQGSEAVIEDLMNSSYILHAQIQQDKALEYEHQGRLWQYHSSYDVNKNIAALEQRIGDFKHEQDRKVKLLQELTEEGLQLEHNRLWSDRQRESLALFQANGVRAYTLNELVELDESARPAAEEQFEAIKYTVFFDGMHVQAPNDLYHVPLRSIVPDRSVTDIEELQIHVKKGIRDDVFPHAVKALWWVEQFYQAGEIRVEKGLLIDPRGIRGPQEKKNYILSQKALQKRKEEIQKNIGQLNTVLADIEDSIKSDTQTMQELHAIIQSVRESEAFLTRKHEREGRAAKYTTEVLRLDEQKLQLQELKVVHKKCIEKQVKLEHTRDILQQEADFYVRLGQQKEQYEMLQQKAKHRQSLTAQQDMMKQQSDTLEEQLDQIADNERRLNRKQAKNHDDAEQVTRTLQQVNVQLKDTNEALDASQINLLTAIEEIEDFKGTARFIYDELINELEPEPNNVKKKQSLVKLRQEYESGKVTFNNARYETGLDPAAPDNYKVIEEEVLRLKDEYKRTSLLFEENQERAETLRDQLETTINMRVLEIQQRFKNYMSGFQFEGQIDWKQQEDRKGRVLFHLFIRARKEGHRGTLEDVSVKARGGRVGKGVSGGEESLSSLLFALALLQNLQTAPGFIVMDEFDSALDEQRKLKVFDLYASELKRKLIILSPKSHENSYLDRFSKAYIVHHDPTVPWSKVTGLILKRE

SEQ ID NO: 41196 - protein, 541 aa, Clostridium pasteurianum DSM 525 = ATCC 6013; identical to SEQ ID NO: 40756

SEQ ID NO: 41197 - protein, 235 aa, Clostridium pasteurianum DSM 525 = ATCC 6013; identical to SEQ ID NO: 40757

SEQ ID NO: 41198 - protein, 1461 aa, Clostridium pasteurianum DSM 525 = ATCC 6013; identical to SEQ ID NO: 40758

SEQ ID NO: 41199 - protein, 335 aa, Clostridium pasteurianum DSM 525 = ATCC 6013; identical to SEQ ID NO: 40759

SEQ ID NO: 41200 - protein, 541 aa, Clostridium pasteurianum DSM 525 = ATCC 6013; identical to SEQ ID NO: 40756

SEQ ID NO: 41201 - protein, 235 aa, Clostridium pasteurianum DSM 525 = ATCC 6013; identical to SEQ ID NO: 40757

SEQ ID NO: 41202 - protein, 1461 aa, Clostridium pasteurianum DSM 525 = ATCC 6013; identical to SEQ ID NO: 40758

SEQ ID NO: 41203 - protein, 335 aa, Clostridium pasteurianum DSM 525 = ATCC 6013; identical to SEQ ID NO: 40759

SEQ ID NO: 41204 - protein, 519 aa, Geobacter pickeringii
MRKVNDSEQPLLAFNGLFDPGEENRPDEDEALDRDEFERMEAIALKNRAQTITTLSTLTSIVAQTAAPPFSFIDPHTTGLLALGYAIDSLRLLDIETSDLTVKELEAKVAEDLRLQFTALENENVIPEMPGTKEIEIWAKGVVDKLLCKKEHGSSTERMFDTDSKQFYEFQHSLLEEYARGNAIYVRPTATCLTLYLGTLTQGIGDIQTALTAVIQRQIKRGDYHAAFQAAMEHQRITKQHGEKIRGIKRKLQSNAGKYSWNDVILPDILTAQEDAKDAVNADTMLEELLEERIDELPPAKRPLAQKVLIVIRSCRDAYRELQTLAMGLPRFYSACILNQGPAISLNLPSMRYDVFDPLFYNISDPDKLLSVCDVIDSVFTLPAPPVLHDIIAGTELLLKPRTETEATDMSEEDEFTDEEDMALVIFDTETINRAKSKISEMADVRPTRLSEVTAVFDPEGFTEECIVSAILISSAWARDRNYADRYRVTRLPEAFSCEACAGDDYRIELMEDTDGLHA

SEQ ID NO: 41205 - protein, 1463 aa, Geobacter pickeringii
MAELLSVRFSKIGHSTARLDGLAYDLTGDDGSPENSMIIASNATGKTSQLHLLYSIFLPAKHDLATHLDEDGRSFPYYFQDNEVGFIVTEWTIPGSNRSLLGGMEKTRVVGRFTQYSNRDEEKHETYFFSFIADEEVGIDDLPLTSSIQVGRVEKHCRTISETKKYLNEVFNKPGREFYCKDVIRDWHDNLRKIGFNIDQFKMMMKFTLSEGDSSSFLKKFKDNDLILDFLCGEVIDKKATDQIRRMLSEHRESVRMEPEIRAQLDAFTALLGRLSLIKPVADSYKASMTNHAAANRQLQSVASRLDATKIACETKLKELNEKLENSEIGLADSKAGLEHLTATLYGVQERMAFLSSLAADDNFRACEKDLEQANRTIKALEALLKSGEVDDARATRDQLLNQLDLLDGPVREKSEEVAMASHLLDSYLRQDYATATVELSRRQDLLKDAEKIRKEHEDKQRGQSASHNQMIGEKEGLDKLERERTRSVENLIFSGILKDAHDSVEKALAGSLSAEERLTEEKNRLDSLKAELDSRLSGLGEQLKGQRKELNGLEAEKIKKELDQSNYLTARSIVSSLPGIRSCFEQYDEADLFYPGLSGRLNDRYDMFLREDQRVREKITKLNEKISAIEAHGGLQPPAQDVIRVIETLGKAGIEAFSWWQIFSERNYSVAEAEALIALNPPRYGGVAVKTKKALENAREILGVGCGVLAPVIVSVYTDDSSDAQYNGLAVLPDVALAIDIDLSKGFCDRSRVEIAEYEASLPLIKESQIAANTAKEKLTVFLGTYSEVSETVLLDAILVAKSRVATCQEELATLQAKEQEAIAERDSLKPLIEEKIAELRGVKERLGALSAHQARHEQDREERLLRIAELASDISGLSLLITAGQEAITAAEQKVLQRRDSVTECQGIATGLLQEFTLLNIERKVQPDIAFAQLATSSKSARELRDTKQRALEAASTDKEYITVKANADISKKMYEKVFKEYQDDFGAVPEDDKQSAAAELGERAVSKGDISDAQSNRDLLIERKGQAKTTQESAQKIYNDLKKKHHGMAVVQFIGDDTACVEQESFCNGEIVRLQELITTTNNDITEHRFAIEHCRGELKHISSLADSVSLERATGGEPFACVDEAETELHVSVKQVETFAGELMRLEDALKRQSRDLGKLLDEPLCTSVPIAVSTIKEEKNRREDGILRDGIDELLVYIQQAADPLPHELAKLEQDKQTTVDEVMHVAKKAFKLLQNLGKKSKIPELGGIWHSWFGLPFVRFTTRVDPDSESSRLAVAGSVTRLAQLEGELPNGAAIVRTALAEMLSGAFQIETLKPDPLPTTKYYPISHKEGVRSWSGGQKLSGSVLLYMAFSNLLMVEGQAAGGVLLMDNPFGSCNHIEFVRLIVALTRQYGIQMVAYTPVVDEEIRRMYRNNVLLRKGGASGLSKRGFTMVQLEQKIYNNGEAARLRIKAEVPNAT

SEQ ID NO: 41206 - protein, 362 aa, Geobacter pickeringii
MLPESQHFIDALATGRTSLVEMWQAISNVMTLPHGGQREALMAVLDELRENGLVEFPRSDKLWDRSAVPHLPAWVNKLPTKKQAKDVARVIWSPELAFLAEQIIRQDSPWVKVDAWLKKYRGKKLEFKPIRERSLEIFGDEKALDRVVGLTPFKQGQISLESLGCLYVPEPIPWKPGPPDSRKFSGICVENSTTFDTLCRFNSEAGYWAFVAYGRGNLFVSMTDGLASVVKEYGHDRVQYFGDADLEGIEIAARGAKRLLESGILLELDHRLYNLLVKFGQVVPSKTGGEVSEDAARLLAQAELSSLSDMFTHYQRIAQEWAGLETLKIAFNSAQTVTYKLNVDRLLGVPHLDATHKEKVCP

SEQ ID NO: 41207 - protein, 488 aa, Escherichia coli
MSLGFLEQARNESMARRELSIQSHALLVVRTLDSIYSALQRNPFDGVELDALAAIMYLFDAMLYYADRERQPGMTRKEAELCLVGHLNEAYPGQEEPDYAQVASKIFAAIKDPFRLRYYDFSQRTHSEEQIVRLVRYDQLSGSDDILWSLTDDGMLFYTLRLDETPIERAAILAWRTLKTIRRGEIDKAVHQIQSTQRQLEQYLIGMRMKVRAAQSGDLSASYAHDIRPVLNDSFDKTREVLEHIQNSMSAITEMLVEGSSKLNPDKLNKLRKAQEIFAEVCAFTQRYQDCLLDVNKDFERARLKLIIPRDNTLFRETLEKGALIPLLSHSPDIVEKEIDGLIARLLVPRRQDDDRHILFDPEALLNLYLDRFEQALPHEIQDPTDQPVAIETNLRNIPESVIKKCSDWVSDRLKNWGHVSFRDVFDAYECEEFSEQEQQVCLLHIGSLAANSDPAIEVEIDEAIETTLWRANNVKLLTVAPLDPFEE

SEQ ID NO: 41208 - protein, 1478 aa, Escherichia coli
MWLIKRVYMDGAGHEEAFYKDLTLDYIGLSQAVSSPVVEGLRSPVRNATVVTSTYQQLVNGGGKSTYIALLLSIFEPSVSDFTQYLANHRQSEYHYRNYFYKELSVVLVEMVNESGQTLLLGHAHQRNGDDVDRTLFICDAPDSLMGAPFDEVPSYSRAERNSELRPYANSLRSFDSWLNLKAGSEGGMHWRKTTRQNEWRAFLLEQQINVDLIKTMVTFNSEEGGLTRFIEYKTEHDFLGAFFACTMSKDAAERLRELVAHEVERQGELEGIRRNESFLKDVLANWLAFLDPAKQLESIQAQQQLLEDGFREAMRDLAAFVGDAQVEQTQLEDNMDSLQTHIGQAMSLREQLGKRRALLEYDLVQHQFNKQKAIVDVLQDEADTNRHQIEITHAAIDYKAYAKALNEYRQADEDLKVFQSETERPLQVIFERTASEALGTLEWAIGRHRQREATLEEELGQMGRESHVLRQSYDKLQKTLGGLETERDGYKRDKFQGELQRNELCEAGLIQKDETPVAAQYRLELTLRDAKQSEELANTILHQKEQALEAQLHVVREASIDKSEARQKLILAEQKHQSAVDSALVLAKTYQKLPTSMQHDLDIEDTSWHSELCGLQFDNVLNANSQTLNGMKERLLQARHELDELRMTGHELVAKQVNEALEAFYAAGIARDKLWTFPHYLASAYNDDAQKIAAVIDQNPGRYLSLVALDNVTFEQVHKISEILPWKKAPIAIYLLDEAQDLRRETSELVQVVLSNPDKHGYSQAAYETRLQDLENTVASQEVSVNAAESALKVLESFRNDWSRHYEQYGKHWAGLLDQRELALLMLENADAALKQAEHDEQTLRDEKRDVQVRLNNAQQQKIQAEKAYDKVSLFVEKEWAKRETAIMKLEQLAAQIQRSKNTLCTQRERLERLSELEKNKRSEKTLLNIQIGSWSNLCNEPFYSEITATEGMEGRSPEYAHEMAAQAHKKLLEAANGDQVTVLKQQLKDAEQAQRYASERLTAQPTYNTYPDEVKASAINELTVINNRIVRLKEQQKQFTQNLISSQVTLQKFSQSCEEASKALDEDFVWEEKPIEIEAIQTSLAEIVNNLYAIEHQIKAQLEQKTLLLRKIENVKERLQNAKTAQAMIQPITPSSAAGLPGRILSIIEYADDLAAQCQMYAGLNEKLKQQNIRVSTVWGYFRKRIEEELAKDPDARASQEYLRRLDSIATYHEVLGDLERVGTGISQVFEAVQDSLEQFQRSIDLTVTHLTAHLEGAIKLLRRAMSVKIPEDCPVLPGRPIIKMTDRLNDVAADLRGFASSRLQQWIARGQIPRAPNRDALTADLVQSVFGEGELEVRLLKTNASRPQWTPVTRLEGSGGQRLTSAFLLFVTVGKVREYDTGISSAGFLLADNPLGKSNANDLMRIQTQMAKAYKIQLIYLTGISDENAQSMFDNHLFLNKVQKLRRRDLVTVDKERHALWAASLAAKPQFDPVI

SEQ ID NO: 41209 - protein, 347 aa, Escherichia coli; identical to SEQ ID NO: 41182

SEQ ID NO: 41210 - protein, 486 aa, Pseudomonas fluorescens
MDDYFASGYGALLDLTSHQRNLLLIRPILKLDFNKLMHTRDDGSYLLESIDTNYLCLAALYFMMEGSAIQQGYTLGEVRDHLKMLAGSMQRTLDEESRGRIADIVLDALSNKSKKYIEHRESYFHAPSGETKFLNFRLIRFEPDLDQNYRYSPTREGYLVLMGMLDLEVEDYQVLIEKMLVYLMENGRFEQAYDLANRALSLSVEHRQMIRDFVRQAARSPGSVKWSTDIQPTLNNARKHVEERQTIDFSMKESLTEKIRELDNAEARAPLSRLHGQLDAANLQRMKLLTEIGGAGQVFLDGQVSGFRARRASGLPDLEYSILPDLMGRPTGEIAAFADTVLLSLYPAVNLMVPDLSNLFHLLLERRNSELPGESEDEPSEFEDFLEIPMPFPKEMISKVHRWLDPKMHGSDILHLGQILDQAEDDGLTFMEQKAVAFELYRAFADSESRYKNRHAIIDGEFESSVVFGDNLRFEQAAANQETSDE

SEQ ID NO: 41211 - protein, 1437 aa, Pseudomonas fluorescens
MRISRIYVDHFGAPTGWYEQTTFDFCDPDTNAPGDACVNLENGGGKTSLLSYIFSCFDPRQDRWLQYLQSKTHSFRDYFARDGRPSFLIIEAIMPAKTVGGAEYPLIIGQSVVVKEHADRASEVDRRFFTFEANSGLRWEDLPVPDISIAPVKTMPEFLGWVQQSSRLSGGDFYVTHRQDEWMSHLEDRRMIDLELLKMQVAFNSREGGSSEGFLSFNTESDLVSKLLNLSMSKDQTAELRNMVGQAVDNLKSKPRLEEKLRQFGHLQQVMGPFSGTALQLLGATEALKNIEQQAVNVTAAMRSRLVVTETEVRNSSESIEDLEKLATKLLQDGSTAHSDYVAITGLILKRDDEAASQNLNQVTMESKQGELHLKGLRAGLALREIDAITTSLRDLEVKKEAITQELKPLEQECSRNGSLLRYKLEQEIGRLSDTIRQLVLKRDAAQVHITEIDQAFKELNKTSGDLNEQQGVLKGKIDAAQKIYDGLISGQLLLPTDIDVSAALDRFTNNIEEQEALLKEHKASRSEMTIALNELRHASLQANQTLSSANNGQDSLKKYLSEHELAIEKLQMNPLLIDMVQGACDPRSLVLVGDVQKLIEQTRSEISKKDIRLDQFERERESIIHTGLSGKNTDVEQVVEALSRAGVRSARAANTYVADLRHDADEARALVLSDPSRYLGVNVASVEWDRAMSLLPEFNLELSAPVTLAIASLTPTSADSERVVLRPINDSAFNREAAQVALATFEASIAQVSNERDEFVERDNLAQAVLSELRAFQVSYSHQQVVSAENELDRLKEQAALTVELIDNISAQITDFEQSIAAITPKVEQLPIAISALDGGKKQLLNYLDNWQGPAQEAQASLREILAKLSQIDHQIRDLDVTKTEKTIEVSELSKQESNLKPGLVFLRTEHDQVGRYDPEFETSADSQVYSLESLRSRYAEAMALLSVEEKERLGLIGHLLNAKRQDLEKAEKNYRQEYSGVDGEIVKTLMQLDLESEIGNQLAKLTELAKTRQEKQSIHSDAKAAIKEYWREREQIEPSDEMLVLADDDLRIAASNRLDFYEEKKAERETALEQIGIQKVKAAKQRQSLKDLHSNLKNLEATFDRKNLATQDVELSDDIGEIVTDIIRKLRAREGEVSRLRAAASNAYQAVIRIAGTSEFRAAEGQIAEMFASEDLDRACADNEHITDMIADRVSALQGTLDGMVPDFERCVTEIYNQVASATSLLKHAMSITMPIGTPYVSGRSILKMSSNLHGMSTDQRKSEIAQYLNRLIETTLIPETGSEVITQCLLLFTPRQTFGLQILKMEQNTEFQYQPVNNMKKSGGQGTVIAMFLYMLVSHLRVDTAAKAMRGGGGPLLLDNPFANVQTRALIDAQRILAQSLKIQLICLTANADPNIIEGFRRVLRLRKAGMQKSSHRTHIEMVKATFVDEVAEA

SEQ ID NO: 41212 - protein, 329 aa, Pseudomonas fluorescens
MSQLFFGRLMLSPQKRLDLKVLRSTWLDCFPEQLQTYDRDRLLLDALRQGEQEGLLKLPAKQSYERLGNPPMPTFITLIREPKKVSDFDFVKVAWAPEMGFWTSLSASELVTALKINEWIIRRRGKYMVVPLRERSLEIFDDEKYLDSRVRDGALFSGRLPLSVIGTRRVEHPLAYRPADAEGLPVLLVENHHTFWSLGEWNESAKMYSAVVYGHGKTIYASGLALVEVMRERGAVTAEYFGDLDPEGVDIPVLFNQRNTQQVTPCISLYERLLAIGRRRDGVSATDFHVARAEKWLPTLSGEIAALWGKGNWIPQEGLGLEQLFNYEF

SEQ ID NO: 41213 - protein, 506 aa, Bacillus thermoamylovorans
MESLDLKEITTGYMERMRRLALFDPLYDLERKREVDLEGKNIDMKGLGLLALLFFFENKLIRESKTGVKQLAAFLKEMTHQVYILRDEKYEEYARTIIQTFRPTHGKKRSYEYFDWEKKETGVIEYSILKANNFDVQTNAQYYTLDDDGLELIFATKEFYSEFQLSINQLILRKQLEKGEFKGALRQINEMRIDVETLEDRMEKLKHEIQRSIVSEETFERYKQLLDDIYGRLEREDEEFKELRNFVKETRERLYAQDVHKKERNAYNYILKINRELEEVHYEHSHLLDQTFHLKNTTLMTAQESLYYAGMQSFNFDQDLVSRVVSAPLPMDAMKGLLHPFLKVEENRTWSPLTVLAEQNLVEEREEKVEYHFLDVNDDNTNDPYRLWLTKKYGELMELFLQSYENNGVRTLSGFFAYLENQGMEEIYQQRYFYDFWLILHQRSPVHHGNEDETSGKTVLGEALSRLNGRVLIVTEKNIIIQKVDRYSIQDMTFELEGTDDGLFRE

SEQ ID NO: 41214 - protein, 247 aa, Bacillus thermoamylovorans; identical to SEQ ID NO: 41122

SEQ ID NO: 41215 - protein, 1473 aa, Bacillus thermoamylovorans
MPAISKIRLTNVVYEEGKKRYNDELFFFDGYNGAILLENGGGKTVFIQTVLQAIIPHTDLAERKIKNTLVLENAPAHIAIEWLINERPRRYVVTAVTLFTTKDGLDSLRYVYEYGAGDAHSIEEMPFVREGKNGKRPAEKGEMQDYYSGMRDRNFLARTFSTIKEYRKFIEEQYHIIAEEWDSIVKINSSEGGVEAFFDDCKSTNQLFDRLLIPTVENSISGHDPKMFADMFEKRHESLKQYKKLKETIEENKRIQAELEKYVATFEKLHIAKLAYDKTKQRAKGIWEEIQMQKSNMNEEHHGMMQTLAEWQSAYDHYQVKKASYQIAIEKSKFTALEKEYEEVYANFSQREEELANVNRDYYSLKLAKLKLELKNYQDELTMIEKEIEKLDQTEELEDLEIQLEEAKRSLLGYFVETMDEIKKEISQVQYELNPIQEQIEAIQKQLDGAGKLESEKQKEIAAIENQIRTRQTDLAKLEQLLLANPKQQKVESEYKLWQDRYQFLDEEVIRLTGEIKQLEHEQKEISKSIDELKTEREQVQNSLNIIENDRERIDYEQRILIEKLSLLRPGWSSLESIYDLEKSIFSRLEESIDILSKEKKELLYKERIAYRLVDDYGKQQLFFSDSYIDSHIKSWKNQFDYLLTGVEYLQTLDEHEYEKMCSYPLWSLTLITTNKSKPALQEKLQMSAEQLHFPIQVMTLEEAATVDIMTDDVHTWVIPLHWQKGMNEEAFDHWKTEIKERAKAATDTREAKEQELKKWETGLRDFQQFITMYPFEKVQLLDESRSEHIRKIDEMSRKIKNEEEKGGICQEKGKQFAETISEYKEEMQGLERNLERAMEYFQYVREVEEAKKKEKQLMNELENIQRKMTRWNRQLTDYQMREKSLVERKRDLESSLRFYENLDEYQAVRSYSPIFTGESKLAIQEKMNTIQLKLQKISKSYGEWKARRENAIQNINRVQLDMDELRKEQSQLNEEQVFPSDGEQLMENTRRLMVQLAKEVKRLDKMKTEKLAAKEGQKGKWQLTIDQFQRNYPDVEIVEFTEATLDEEKDLLVQEKRDLDEKKQYIDTQLSRIQKEIQSINEAEREMDRFIEKHHFDAPNIEATPLNADEKMAFTYHRKPSVQSIIRELESARENVDGENKNVGNGKQTFRQFCQTISDFKMRKMAENGVDFKDTYDELLEFQRNMVKRIEIAINYANESIRKEDAALQAFINQIHTHLTTIVEELREIPRKTKVKVGDDWKTIYSFSIPEWEEEEGKKRIRDYIEWILTQLESERYIKPDGSQDDMKIRKDIEMWLQSKQLLQNVMKNEAMKVSCRKVTNENKVTTRSYSWEQSNVWSGGEKWSKNMTLFLGILNYVAEKKKQNRPNTKLHRAVILDNPFGKASSDHVLSPVFFVAEQLGFQIITLTAHAEGKFLQDYFPIIYSCRLRESNDNNKQVMTKEQWLHRAYFQDHDPVVIERLGQTEQLSLFDM

SEQ ID NO: 41216 - protein, 340 aa, Bacillus thermoamylovorans; identical to SEQ ID NO: 41124

SEQ ID NO: 41217 - protein, 506 aa, Bacillus thermoamylovorans; identical to SEQ ID NO: 41213

SEQ ID NO: 41218 - protein, 247 aa, Bacillus thermoamylovorans; identical to SEQ ID NO: 41122

SEQ ID NO: 41219 - protein, 1473 aa, Bacillus thermoamylovorans; identical to SEQ ID NO: 41215

SEQ ID NO: 41220 - protein, 340 aa, Bacillus thermoamylovorans; identical to SEQ ID NO: 41124

SEQ ID NO: 41221 - protein, 506 aa, Bacillus thermoamylovorans; identical to SEQ ID NO: 41213

SEQ ID NO: 41222 - protein, 247 aa, Bacillus thermoamylovorans; identical to SEQ ID NO: 41122

SEQ ID NO: 41223 - protein, 1473 aa, Bacillus thermoamylovorans; identical to SEQ ID NO: 41215

SEQ ID NO: 41224 - protein, 340 aa, Bacillus thermoamylovorans; identical to SEQ ID NO: 41124

SEQ ID NO: 41225 - protein, 506 aa, Bacillus thermoamylovorans
MESLDLKEITTGYMERMRRLALFDPLYDLERKREVDLEGKNIDMKGLGLLALLFFFENKLIRESKTGVKQLAAFLKEMTHQVYILRDEKYEEYARTIIQTFRPTHGKKRSYEYFDWEKKETGVIEYSILKANNFDVQTNAQYYTLDDDGLELIFATKEFYSEFQLSINQLILRKQLEKGEFKGALRQINEMRIDVETLEDRMEKLKHEIQRSIVSEETFERYKQLLDDIYGRLEREDEEFKELRNFVKETRERLYAQDVHKKERNAYNYILKINRELEEVHYEHSHLLDQTFHLKNTTLMTAQESLYYAGMQSFNFDQDLVSRVVSAPLPMDAMKGLLHPFLKVEENRTWSPLTVLAEQNLVEEREEKVEYHFLDVNDDNTNDPYRLWLTKKYGELMELFLQSYENNGVRTLSGFFAYLENQGMEEIYHQRYFYDFWLILHQRSPVHHGNEDETSGKTVLGEALSSLNGRVLIVTERNIIIQKVDRYSIQDMTFELEGTDDGLFRE

SEQ ID NO: 41226 - protein, 247 aa, Bacillus thermoamylovorans; identical to SEQ ID NO: 41122

SEQ ID NO: 41227 - protein, 1473 aa, Bacillus thermoamylovorans
MPAISKIRLTNVVYEEGKKRYNDELFFFDGYNGAILLENGGGKTVFIQTVLQAIIPHTDLAERKIKNTLVLENAPAHIAIEWLINERPRRYVVTAVTLFTTKDGLDSLRYVYEYGAGDAHSIEEMPFVREGKNGKRPAEKGEMQDYYSGMRDRNFLARTFSTIKEYRKFIEEQYHIIAEEWDSIVKINSSEGGVEAFFDDCKSTNQLFDRLLIPTVENSIAGHDPKMFADMFEKRHESLKQYKKLKETIEENKRIQAELEKYVATFEKLHIAKLAYDKTKQRAKGIWEEIQMQKSNMNEEHHGMMQTLAEWQSAYDHYQVKKASYQIAIEKSKFTALEKEYEEVYANFSQREEELANVNRDYYSLKLAKLKLELKNYQDELTMIEKEIEKLDQTEELEDLEIQLEEAKRSLLGYFVETMDEIKKEISQVQYELNPIQEQIEVIQKQLDEAGKLESEKQKETAAIENQIRTRQTDLAKLEQLLLANPKQQKVESEYKLWQDRYQFLDEEVIRLTGELKQLEHEQKEISKSIDELKTEREQVQNSLNLIENDRERIDYEQRILIEKLSLLRPGWSSLESIYDLEKSIFSRLEESIDILSKEKKELLYKERIAYRLVDDYGKQQLFFSDSYIDSHIKSWKNQFDYLLTGVEYLQTLDEHEYEKKCSYPLWSLTLITTNKSKPALQEKLQMSAEQLHFPIQVMTLEEAATVDIMTDDVHTWVIPLHWQKGMNEEAFDHWKTEIKERAKVATDTREAKEQELKKWETGLRDFQQFITMYPFEKVQLLDESRSEHTGKIDEMSRKIKNEEEKSAICQEKGKQITETISEYKEEMQGLERNLERAMEYFQYVREIEEAKKKEKQLLDELENIQRKMTRWNRQLTDYQMQEKSLVERKRDLESSLRFYENLDEYRAVRSYSPIFTGESKLAIQEKMNTIQLKLQKISKSYGEWKARRENAIQNINRVQLDMDELRKEQSQLNEEQVFPSDGEQLMENTRRLMVQLAKEVKRLDKMKTEKLAAKEGQKGKWQLTIDQFQRNYPDVEIVEFTEATLDEEKDLLVQEKRDLDEKKQFIDTQLSRIQKEIQSINEAEREMDRFIEKHHFDAPNIEATPLNADEKMAFTYHRKPSVQSIIRELESARENVDGENKNVGNGKQTFRQFCQTISDFKMRKMAENGVDFKDTYDELLEFQRNMVKRIEIAINYANESIRKEDAALQAFINQIHTHLTTIVEELREIPRKTKVKVGDDWKTIYSFSIPEWEEEEGKKRIRDYIEWILTQLESERYIKPDGSQDDMKIRKDIEMWLQSKQLLQNVMKNEAMKVSCRKVTNENKVTTRSYSWEQSNVWSGGEKWSKNMTLFLGILNYVAEKKKQNRPNTKLHRAVILDNPFGKASSDHVLSPVFFVAEQLGFQIITLTAHAEGKFLQDYFPIIYSCRLRESNDNNKQVMTKEQWLHRAYFQDHDPVVIERLGQTEQLSLFDM

SEQ ID NO: 41228 - protein, 340 aa, Bacillus thermoamylovorans
MEELKRILSVYPKRMIDLTRLEELTKSFVHTYEEFADVILQLEKDQILEMVKSKGRTARTPSLAYQYRIQKSVLASSHRQELQIYRNKLHPAILLDEYFRIDPVVWKQDLPFIEKIDHYLKAFGFPNEPVPAPERSFELVQDEKWIVEKGGKEVLERIGLYERLQIIPVSEPLMFAVNPGQIHKENQFHLIVENKTTYQGLLPALVDTEFSTLIYGSGKVIIKSIEQFPAQYPVEANHEFFYFGDLDREGVSIWYSLTKRQSVKLALPFYIACLAQEPVKGKGYQLENREALQAFLTNFSKLHQDKIQKLLRLGTYYPQEILKSKQLQAIWRESDWKALI

SEQ ID NO: 41229 - protein, 531 aa, Bacillus cereus 03BB108
MSTNIEAMLEGFNERMKHIAMFSPILRLEQPVKFKELPIPTVALYILLYMLENKLAFNKNTTKEELQYVILDVVRQYWNKGFTKAEADELEDWLVSKNLRNRGKAHTFTYYDFDKREDKTYYFHLIEYGEGTNVFSDAEDSLDDFTLTSMGLELLFKTKEVFGELRITISQLFFKRQFEKGLFTDALRRVHEMHTLIEDEKKKIKKLQNTIIKDALGVSQRSELEVMIKRIDETLKAEREQFNDLKNLVEEKIDEFYEGSLTEKEQEGIHIIQEIEGKLVQAISVHESLFTEKQKTQNIMSESLESSIIHAFSVHLDFEQEILRELVETPATEEVLNAISKPFLPLRHHKSFNPLLALVPQKRYKKKQLKEEEIVEVDEEKMRLQEEEEARKKEEIENKEYRYITALLKHLVEKDKYLLSDIFQMIETQDERLYEDILYNPDPLLGLIAELHQSEYNRFEKVTSDVWKNLPDDKKINRMLIRLSSEFVTLQEIESFSLLETGRSHYIGTMKYKDMLITRGDFYGVDRRNRK

SEQ ID NO: 41230 - protein, 250 aa, Bacillus cereus 03BB108; identical to SEQ ID NO: 40584

SEQ ID NO: 41231 - protein, 1457 aa, Bacillus cereus 03BB108; identical to SEQ ID NO: 40585

SEQ ID NO: 41232 - protein, 358 aa, Bacillus cereus 03BB108; identical to SEQ ID NO: 40586

SEQ ID NO: 41233 - protein, 535 aa, Desulfitobacterium hafniense
MSVDLDFLEGFEKRMRIVAAVDSIVNRTNRRMDLERLFSAGQLDNLIFSVLVFIMERTLAEDEECTLESITLFLRRILPAYGVELPGDGIRQVAEYIIKDILQNGGEARYYPIMSYGQGMSETRIRLVEDKLQDGDKGYIITYQLTDQGYDLLFRTKEVEQEISFTIEELKLRELIKRKNYKKAISQSSSLIQMVRQKKNDLRQFMEKIRGNIYEVDIWEYEKLTASTYALLEEEYGMMKEILGMITLSEERLREEEQARGDLDEEMRKARREIALIRRNIHTTINEQRELIVDRHRLAALYKDTLEDSFMLARSKKFNFEQEILQRLEQCDERHIPLLWQLFNPLFKPNPERTLNIFSLFEAQSRLRQEEPGGDEIEIEELREDRERLKVEEINGLNTALIRFILEFAARHKEGFRLSQLLGELKHQAELYRRLVEGDLLFHTLLKLYDFGPLQIREWKEEAHEVVANPTGELDLDFCLMGIAYTDPDLFGVASLQLFKPDEAIIKEEILLSQGEEHFSKSIQISDFLFVVEVT

SEQ ID NO: 41234 - protein, 245 aa, Desulfitobacterium hafniense
MSSFNTALKLLKKLLEKGQVDRETDSDLFLEFRNPEVRQALAEMEEELDFQIIEASSTLYLVPAGGNSLLGFTSKDLREWVSSDARLADAYLLTYIGMFIFFLFYGGKNQNPKQREFLRLSKLLEELDQRFAALTLDGEQALALEEKYSLNFIGIAGLWESKQGYEEKSRKTKAGTVLNVWRLLEREGLIRILDNEREIRPTRKLDDLMLNYYLNDNRVAEIIGLFQGGEEYAAPQPHPDYQLLL

SEQ ID NO: 41235 - protein, 1482 aa, Desulfitobacterium hafniense
MPLLNRIRIINFSYNNDTRLIMDECFDFHGGESALLNLANGGGKSVLVQLFLQPIVPEVRIQGRKMAGFFRKQKQPTFILLEWKLDGGGGYLLTGMGIVPAQAATGEEISGKIRYFTFTCKYHGANAFDIRHIPLAEKKENLLHLLSFREARELMRDKQQKDPYLFGYFPQDEGADYGRHLAEFGIIQDEWRNVIAKINDSEGGIDEIFQKYKTSGQLLDEWIIKNIEKSMSKDQAELHRLEDMLEKLVQEVAENESYLLEREVLAGFLKVYAEQSKGLATLLEGLEQQRELGEKLTALHGYLRHQGEGLVQKQEENDQAQAFTRREEQRIELEERSQDYLLKKNAHIRSQELLQGVQERLQSTEERLAEAQAAEKIQQAARLWGDIRHKEGKRSGIEEILTARQTDFDQDRRIGELEYTLKTLLEKEQANLAEEDRRLQGEQTQGKASLQEAQQFLKDAESRQRALAQEKGRLSERKKQLEDQNGAALKKLNLQLRRNILGELNQAETEKIKSRLDQDLADQQRIEKQLTTEYAANVQVITGLEGESRSLQTRQTEENNTLLSLRRDIREYEEREAEVKSIVTRYDLDSEWLFQRERLDQVFGQKIQDLADRVEQAGITWHEAQENLLSLKSGRLHVPAEVAALLAEAGIQYDTGEAYLRGLSPELSAKMLRSNPLLPYAFILSRQDLQQISATLESLTLSRIIPFIPYEDLNLTMVSNGRLVQGESGVTLACLYEGRVFERSAMAKLVGELEEKSVQASREREHYSEEHRRVVSDQAVCAKFTYPADHRYNLGRAEQEAEVRLSGLIGQLAQASQKISGLQERNETINRELRRNQSEQATAQTKIELFREFLLKEAEYQECGKELIKVGDELQKLEARKNHWAEEQERLRGKLAEISRELWQNDDTLQKILKQYELYRQSPVAPLVAGSLEELTARLQALKSQYGSELEQLEQQKRELTMDIQQLKGELRKLKLQLQEEEYASVPYREEKADGLRAEIEDLASAVKGLRPQEIKAAREEAAAKTALDMALTEVKRLGWENPLGPEEISGDFPLRRRQAQKRLQELGQESRELQREKTLYERLQDQIDQTLDTQGLKAAPDFRPGEDLEAQTKDLQQGYRQQDRQNRQDVRSLRNSYGRLKEDYREKNLNIDTIFRALDHLWEDAQGEEDEGGRGLLSFDRFYFLFESVSIHQEKLADLLQVYELQLANLERNKKDMVEQSFLHGLRICEEIQWISDHSRIRLQGRSRPVQMLKIDLVTDSSENARERMQHYIEAGIEKVRQEIRQNKRPEEIRKSVIKLMSSRELLNTYLGNSHIPVSVYKIDLNPQNSGLKLWEDAAHQNSGGEKFVVFFSVLSALMSYARTRAMENLGGVAEKESSSVLIMDNPFGPISSEHLLNPLFEIARKHRTQLICLSDLKQNSIMNCFNLIYMLKIRTTALGNKEYLKFEEIIRDSADFQEDERLEKAVFRSEVRQISMFGEE

SEQ ID NO: 41236 - protein, 352 aa, Desulfitobacterium hafniense
MPKQTSADRLSQWAKRRSGITVLELQKLLEEPDYPSFHQLVTELLAEGRLIPIKASGLNGRVPSLANKYRIIQPREDYGECLEPIRSLEPTLNIAAYLQKPHYYVRHQEILEGLSRYLWYQAHLLEQPMSRKERSFSIWGKEKLIDEQFSLLWEVFRFNRLPENFLNYYDTPEPFFEYVHGGVLPRTLLVIENKDTWFTLRKLMRETGKNRLAGISVQVLIYGEGNKVTKPKALENYAQEMFGREVLTEGEFLYFGDLDHEGIQLFFRTQRENPKLKLRPFQALYRKMLDLAAERELQPSPDGRNITVRVREFTRLLGLDPDEDKDKLAFLLRGDYIPQEILNYQVLAALLE

SEQ ID NO: 41237 - protein, 530 aa, Syntrophaceticus schinkii
MSAVTAEDKMAAPGVFTMAREFPCFDGLNERIAALMEVFPLYDLMSKSTLRGYCGFEMGVCLLLYIMEKMLHYDPCTYEDAKDFISGILPLFAGTSPSLEELEQVTEKLLNELSNYGRNFEYEYHDPIEGKNRQVKFRLLVQEPFSLPDRDTIKLRLSREGLDIIFKSREIYQDLRFSVMQFYLDQQIRRGTFEGALETVKELGVAVTNMEQELVSLRQEIRRNVVEALDKPNYRRMLNRMTQQLHRERETFDNLIKLVRETLQNLDQASHSRGSTKLENVGFLEQELYRVAQSHLKLFNHQLELNTLTEDALMSSLRSTLMVRFHLEKELMAEVLRCSPPGEVVARTAVLPLLQPRSPRILDLATFLRPQTLLSRERERPPEEFFDEIDLDEEIRLQEMEKERHQRTIELLQRIFRLLLTPLVKRSRISLSEIAALLDENDWSREEMAAFVYTALLLHQAKKIQARLPWEYTPGDTDLLEFALFRLLQQDKELASLGDVSVAAGEGTVDLPYEMNVSNLILLKHGDQAW

SEQ ID NO: 41238 - protein, 245 aa, Syntrophaceticus schinkii
MNYKSSTVETALLLLRELLTHPVVNKENNSGLLMRIQLDPEVWGLWQEVMEPTFGVTLLKAGDQYYLSTGIEESIFSYTNAELRTSLGVRDNTELYTCSFIVLTLLAVFFNSDDTTGPSMDYITLTDLERQVTQNFETLAKREDIEELENRSRVNLAEPARFWLDLSVKKPGAVHDKRTISRWGYLLKTLDFLEEHRLVRVIQERQVFPQQRLSSMVAHYYNHRDHKNMILELIMEHGGEEDAAD

SEQ ID NO: 41239 - protein, 1487 aa, Syntrophaceticus schinkii
MPRISRVRLHNIRYGKERRVLDNLIFDLRGRSSLLILENGGGKTLILQLISQVVCPNAPLGKRRLATLVRSNPFTGHVLVEWQLDADTPAYILTGFCFAENTGSANRDMDYFNYLSAWEYSRPHSWDLESLPLVDEDGRTLNYRELQERLRSSGQFRIFSSDRRREYQRDLRTYNINPEEWERVLETNSDEGGVGKFFEYCSKTRSLLEKLFIPAIDDILGRGSSGTEDDLTRSFQQASAELMHLPEFQSHMQSLNKLGERIGVMQEALSGVKGAAGEVEAARTARQSLFNTLVRGLPRLADEQRELAERLQKNQDRVREIQYLLASVKCETLRRSLDALQNELNKKEREKDAARRCLEDTEGNYNRLKAWRFCESWLEKDHLLKQEEAAQQRLLQGHESVAKEIDSLGLQLWPLLCTVGREVEAQTTAEEKQLDVLQQEMRKASDAERELNEKMQSNLYRQTRLEVKSEGFAKRRTELAGSLHDVGIETDLSSPEKAEGLLNDALKGLERKIEELAEAIRKSNSRLDECSTQINILSGRKGELDKGRKDLLMARERWQEDVDRLRELLALAGLEWLFSPEDFAALQGELEVCRQQSQQSLVDLELQMNRLQERQSLLGGEAGAVPNNDILLLKDTLSSQGVDTITGALFLRNLPGSEERKQLIRRYPWLPYALIAEQGQLQRIIRRSPELRVDLSAAVPVAARSSIELSPEEQANDALLCFFHNQGMEPFVIPERLDDILYRLEEQLEQLKEKRKDEEGRNEQIRRASIVLANLLTNYEYQTAEEWEQRLKDAENALQGVCDDLEAAKEQERRIKEQLEIARTEKSKADQHLIELRNFRKPLEKYRLEFQEEDARKAEMVRLQQTLTAMEAELELCKTRKEKLDREIKDLQEQNRATLDKLNRLEKDNKDFYPSTWDYPEELIPKGVSWEDYRETAENLRARKESLNREVASLKDVDRLITGYKKDLEDLQGYIKGTGLDFAEVKNSYRPVRKQELDVCGREVKAYQDAFQKADKAFRSAEVLTGKEEGAWEIECSNVVDRHRHEPAELKGIDLEGYSKKLNEEKEEVSGRIVKQGEKLDLLGRLQQEYRIQVEDLTAVGLELTDDPGWETERELKELTCDAGAPRRAIRREMEAVDKALQRLAESHDAWHQVVDSCRQELEVLNNLDIRHLFKQLKDRTMVEGWEKDALSVQESLCHVGRVISKSQEELERRLKDLDRIKEEIAERAYSHVDNILEQLKTLQRMSRVELRGSSIPLMEIDLRPPNEDEGKELVRSYLADVIASAVQRRQEGESEDDLQQYLEGAVRSAALVEQLVPLDGIKLTVLKPRADDQPYQSSDYDRWENLTFWSGAQKYIGRFAVFVALMAYLREKRKKEQREQRTSVIIADNPFGEASSGHILEILKALTQQAGVQLFCVTAHRQTGIMKDFPVIYSLVSRPTLSGQQRMVIDPEKIPAPGAMEAARGMINDTDNPSWKMDIDGQLKLF

SEQ ID NO: 41240 - protein, 288 aa, Syntrophaceticus schinkii
MCYNTNKLFSGDIPMKMQDYICKVIDSFPRKMLKWDTDIRDPVARRFASRWEDAGGYEAFAAAINNLVEEKVLSPVKKSGLNGLSPPLALRYRKLPLQEGDYSAAKEEILSFYCSRMDLSSFLNSPQDYDRHRDILMAIDHFLIEAENNPPAVWDTVNERSFALTGHEKFLSSHKGNQLLKRIKITLQDLCCVPAPEPFFFWATALPLLPEERAHCLVVENKDTFHSLKYLLGAGKLKTNPEIHLLIYGEGKKILNSWSFIYECLPGAAGYQFFYFGDLGPGGARYLR

SEQ ID NO: 41241 - protein, 502 aa, Paenibacillus sp. IHBB 10380
MNWSDFGERNKRLNPLWNLGAGMNLGELQPYKEMVALSVLLQVYYLELESNERRSKDDIIVLAWTALEHFNIANLGTTEYVERLVDGLLWSGNGGDFESFYYDDASRQMLVQKYKYFTVDEDATRSSWEESGRTIYRLSEYAMELIFMSHEIIEEFQISIKLLEIQMHIKHGRVTRALQDVNELISRVRKMTQQQQEYRNALRRNPKHIFSEYGVKRHQRLEEIHQQFDEERKHFDNIHRSLARLANDEKDVIDFNEIRMLSERVELSRRVHDKLAEVVLNIFEVETNLRLNFPELFWGAVGFNFRTSVWEEWVKEEGLPSGDSLEILISGLFSPNQDFVYPLPWAWEEQDVGFVSELLMDESEEDKDAQSVQYVPKGIPWTEVTDLWRPIFKALAERGSFTFCADAFTIEELEGWARTPNAVDLWVQFFHTEITVQEQVEEGGKGSDECQMLIQNLLASDPELAGLRGKKLRTTIISSEQTERVRCAGLDMSPYTITIVER

SEQ ID NO: 41242 - protein, 252 aa, Paenibacillus sp. IHBB 10380
MSYSLEQLQQASRLFFELLRKKVIPLDDPVVAECLQDAGAYDALKYVAKEGGCRVMNSGHRIHLLVNPLGSVFATNFTQLKNKYSRIERKTHLHTINIIILVFLAEIDQDETNFKSGQDSMSYIQIADQVSSLFQAWFQMDVDGRFSGQWQLDIQAMYKVWSSLYMQTKSQEESDLLSRGSNSRIGLIHEGMKLLEEEKLVLISDTEKRIFPREELYERMRYLYHDVDRYQELKGLIGRTLAEKDGGTDATD

SEQ ID NO: 41243 - protein, 1493 aa, Paenibacillus sp. IHBB 10380
MPRIERIRITGLKYEKMLKKYDDLILDLCNEEGPANTLITLMNGGGKGVLLQAIFQLLMPKTPWGKDSENQVEAFFHNHKRQLKPYTFHVAIEWHLDNSERNEYMTTGIAMTAHNSLDQQDIKVDYLLYALMDYEEGSELTLSTLPLFDETTAEPTSFETIQQLIRERRNEIVPFGSHSSDMKRYYDFLAVRDIHIAEWRNMRRINGEEGGIKGYFKKNDAFTNHNVFEKLIIPEIGSSLNEGLREDDNTLQRMFIDAATVAQRLPMLEQREQAYTEFLGMAAPLYEKVKLGMEAERIYKETLLLGRQIYTVIHDEQRNAEGDRSKIANELVGHYQEAKQIRFETDNLKYLRSKEEWDYKQQEFKSLSDDQARARSRLDDSKALEKKYEMDHYMAKRMSKTGQIEQLQKEIQAIEGSLEMKESQEGIQAAKEELRKQWDVVFHLWQQTFSSFKTAHQSLTVEEVGLRQVREGFLSEAGGLDYQINELTASIRRYTEDMGAVVSQYGTEAANAPVTALQRTETTVRSILDTIVSLVEQRKEAELHRRQHEKTDAELSEKRRNYERDAVELNSLLDVQSRKESQIWSKLVTYLQMFEEHNLLGTTGLFEEKGAISERFIRKIDEVEHQIKRSRRDYYNLLLDVELQTQSYWLPNLDVLAVKDALDALKIVSTPGSSYLNDRPFIEREEELERHPLLPYGLILTRREADRIQPEMLKDTLLKSAVPLFIREEMAVVDQESFLLLTNQGSQMVLQPDRFLEWRNGIQAKLKEQEQELKDKEAYLSNLKSARQEFERLFQADNSMTFKAELSNLALLQKELQHNISNLNAEMEENESTIARISREHAEEELLKEDHEQREVALREWVERTKQQELNYKEKQELVKRKSLLDKEISNKNQQLEELKAQMVSINEQREKWTGETKYLLFPRLQNLFPEIAFPADYLVTGNESEVGIDPDAQNILLQQLSIVESLQQSLTQNEVEIRTRTNQIKEASENLAELEVSLNQLDVDWRNAAEPTDTAESIMSAKIRQKSNTTLLQEDYQHVRDSFTRCQTEMVNLQKELRKAEKAIKEKHERAVELWNDALDRKDDEIQERSQNNERMLDQCKRAQDRIDALLQILSNQSKIMNAYIEDRVNLRDVPEELRLSVREGCEALVAYWLQRMKVIRASRDEISRKVKEEKNSLSSRLAKSGWNAELETKIQDRLNTIHWEDFSIAQQVLDSMLRSSQDQIESIQSDKEDMELSRKMWVGRASLRVVQIVDIMKRMERRMIIHNEGNFAFPLVRLNYKNINVPKTSDDVEPMVSDYFNRCIIELLKKYSKIEQVPALAIREFINDGRIVYAALQNRFPILQVYKPVTENYFLYAAPEEYHYSDWEVINRGALDEAVGSGGQRQSVQLLVAMMIMTHKRVNRENKGWTVFLYDNPFGEMVSNNVLDPVFEISKALKFQWLIVTPPELVKNDVSVRFGVYWQLYFGGTKGDLLESTLVKGGRKIIPVSLF

SEQ ID NO: 41244 - protein, 351 aa, Paenibacillus sp. IHBB 10380
MKIIESQFGVVRHKRRKIKLDWLEKEFVQTVYTDRSAYELDGGFTILAFAIEELLTDNYLIPVHASQKSYKPPFIHTAYWLTESTPSSGGWDSSAMLRMQDLLDLRYYDNHPEEQVEKVWTRIEQVYTFLLTVKDREVITREERSLELFGREKWLSEPEGEGFLRRIGLTLTDLRAVVAREPFVHYVQPAKTIAITLIVENKSFFHSAKQLMRQGKTVCGLSPDMLIYGEGWKIDSSLLFLEELDIDPLRIILFYVGDMDRAGWDIYGKLKHSYPDLDLRLAIPIYEQMMEHTGSTYTYDTEQSCNPNHLTTVLQEFSEYPELREFIDQLLDENRRVPQEILNYEVMARLT

SEQ ID NO: 41245 - protein, 229 aa, Paenibacillus sp. IHBB 10380
MKGVMMSLTDEMNVNPLNVMQAVKGMLTEVEEIVFMNLLFSSSATIRAGNFGLSRREVEKQLKITDDHEKFDSFLKRVNQAVSRYFKVIYDEKKDQIVVMMRVPAKAARSTLSKESLAILLFMFYQQEVLQHEFTLFDQLLNALGHETTKANQRLNLNIDQLKKIGALEEYDTNSNEKAYAITAIGANMFSDSFLRRTVEFSQSNQLNKEEVLKFFKRYNLYQEGTEEL

SEQ ID NO: 41246 - protein, 1073 aa, Paenibacillus sp. IHBB 10380
MIPWKMWFTGIRDYQPTMMDLSGKESHILITGPNGAGKSTVTYCMGVVLYSSKVDIEGLKSRNLLPNDTWKAHIRLLFKNEGRMRIDAPTYVEFAVYILQEPGQPTKKEFVIHSGDDPEQWDETIKYTSGDRQYNFTTYKKDLQYKYKIDPDLFYLIWYQQEVNQFAVMDPQERFRIFAEMHGIDQVQRNWEESMEQLKDVNESLRTADVNVANKKQWLGMARSALERYEDNQKRLVEGGKLYAGALLKLEIYYKQEQVDLVAKEEQMLVDQDIAKDRLGMLQELGDRLNNELKQIQAEKGQLDTKIIILQEQLAVVKKEIEETTIEIGELDIQLKELNQEKSQITRTEEDVHQQLSEITKQLNEMNIEIEKAEASLQESENVISQLIASSSQMNAQIQQDKGLDHMHKERLRQYRSSHDVQMEIDRLDRSIPQSKQEREDKSRLLQELSNEKRMLEQNQLWSTRQRESLSLFKAMSVRAYTLNELVELNESARLIAEEHFETIKYAIFFDGSHVKAPNDLYHVPLRSIIPDRSVTEIQTLQIRVKKGIGDDVFPHAVKALWWVKQFFLAGEIRIENDVLIDSKGIRGPQEKKSYILSQKAMLKRKEEIQKRISELNISLANLQDSIKSDTQTMQELHAIIQSVRESEAFLTKKHEREGRILKYESEIQYLQEQKEHSKEIKTSHTKFIEVRVELKHIQGILQRESDFYVKLGQQKEQFETLQRKTQELHSLSIQRDTLKQHFDTAEELVEQVEGNERRQQRKLLNNQDEIQQASRTLNQIDIQINDTKEGIDTSKINLLTVTEEIENLKGVACFIYDEVDKEFELESNSSKKQQSLAKLRQERESGKVTFNSARNESGIDPAAPENYKVIEEEVHRLQDEYKRTSLLFEENQERAEKLKDQLETTINMRVLEIQQRFKNYMSIFQFEGQIDWNQQEDRRGRVLFHLFIKARKEGHRGTLEDVSVKARGGRVGKGVSGGEESLSSLLFALALLQNLQTAPGFIVMDEFDSALDEQRKLKVFDLYAGELQRKLIILSPKSHEHSYLDRFSKAYIVHHNPTVPRSKVAGLILKRI

SEQ ID NO: 41247 - protein, 435 aa, Paenibacillus sp. IHBB 10380
MQNFDDVVSFISQSFLKKDEQLEMPRTIGETSLIDIDIVKRTARTIRRVGIITVAREYSSIVGALPDQQLLSWTVGKRASLDDNQQTFDWLHKGWILKEVRFKRDGKSVERIQYRMGYLLYVYLLNKQTDEHRDFLNQFTQYQSNAAQKMEQITYLHDERLLQLKDLALFLSGSLQWSPNDLEDQYIFPANWSISKRIDGLNFLLAFLLISSSKEIFDWKEIGAHYYPGIGGSKAFDAYKIVFLNILETISGQSLETLGMISGGQITSIYFAGELEGTWSNFRAGPVHALTNISVSQDHYSTRATTLWLVENRAILTRMSAEPHFLQETNSLIVCVDGHLRSAHKHFIRQLLLNSSIDQTIFWSDYDEAGLQIAGEMFQSLMGHAVRHKWICLDHSIITNWSEYQQSMESLLQDMKSEQEIVLGEADDWRSWINH

SEQ ID NO: 41248 - protein, 536 aa, Desulfosporosinus sp. I2
MATTTFEFLEGFEKRMQLVAAIDSIINRTNRKMEFERLFEPGQLDNIILSVLVFIMERTLTEDEECTMDSLARFVAQILPEYSLALSPEVVRKLTEYIIKDILQNGGEARYYPVMNYGKGMEQLRIRLIDDKLIDDQRGYVLNYQLTDQGYDLLFRTKEVEEEISFTIEELKLRELIKRKNYRKAIGQSANLVQMIRQKKNDVRQFVQKVRENIYEVKIEEFERLVTGTYTLLEEEYSMMGEIRSMILLSEERLKEEEDLRGALDEQMIKARSEIGIIRRNINLTISEQKELIMERLSLSRIYKETIADSFALARARYYDFEQVILKPLEQCPEEKLPSLWQLLNPLLRPNPDRILNVLSLFERQARLKQEDEGTPSILLEELGEDMELRKISKINDRNLELLGSLLEFADRKRESFRLSELMQDLETKAEVFKELTEDDLIFKTMLKLYDLQVIDLSRWREEQEEVVANATGELDVSYCLYRLEYVHPDLFGIKRIEISKPDEEVYEQEILTYIGQEKLSRRIAISDFWIEVSFQ

SEQ ID NO: 41249 - protein, 235 aa, Desulfosporosinus sp. I2
MSEIKTALKIYRKLLEKGQLDRESEGDLFLEFRNVEVRSILAEFEEELEFKVIEVAGSLYLLPHSGNGVLGYTTKDLRESVATDAKLVDAYLLSYISMFILYLFYGGRNRNPKQREFLRISTLIEELDRRFELALSDGEEGKVLEEKYALNFTRIAELWASKQDFEERGRKTKTGTILNTCRLLEREALLRIVDDDRELRPTRKLDDLMLNYYLDDSRVEEIREFFEGAVSNAQN

SEQ ID NO: 41250 - protein, 1469 aa, Desulfosporosinus sp. I2
MPRINRIRIINFSYNNDLRHIQDETFNFHGGENALLSLANGGGKSVLVQLIFQPIVPETKIQGRRINAFFRKKRLPAYVLIEWKLDSAGGYLLTGLGMVSAEVSGIEDEKNRVKYFTFTSQYTGSNAFDLANIELVKQTGNILEIKPFKEAREMMMEKEKKDPYLFGCFYDDDGERYRKRLAEFGIAQDEWKNIIAKINDSEGGLDEIFQKYKNSSQLLNEWIIKTIEKVIYKDRSEAHRLEDMLEGLVREVIENERFILEKQVLDEFLVGYGEQVGALVELLNGLEEQKRLAGKLAALNRHLNTETDQLQEDQEGNQLELGDLKKEQQRIDLEERSHAYWLRHEEHNQAAQELADAEKSSLDNEEKLEAAKFSAKIMEAAGLSQEIGSKKADLSGIQERLEASRSQLGTDQRMRDLEYSLKRLAQETLQDLELALEGLSGEKTEWDKNLLQLKTDARNLDQELRGFIGEKGGLQQQVKQYEAQEREVRGKLKLNLNRNLLGELAQQDIEKARLGLQKNQVDLASKEVLLAEEKAENVRKQQDVERESQELREAKAEEANSLNRLNEEIAAYEQQEQEVLGILHKFGFVAELRFDRERLHTLFNQRLKNLDQSLEEAVRMRDESTESLSSLKQGRLHIPGEVVSLLAAKDIQYDTGETYLRNLSPDIRQKLLGENPVLPYALILAKESIELLAEAMNRMTLRRVLPLIAYEDLGKSIISMTERMVQAGEGLTLVCLYEGRVFNNESLVKLEEELKRKQTEAFEQYAHYSEERNDTIAKQAICGRFVYPSEHLYLLEKKKTAAEKQLKGIADNVSLLEQEKENLFRALEKLEQSLKETSENRQRAEAALTLFESWLEREKDYQTCRKRLGEVIEGISNADRKKAEQTLNIENLQEELKRVDYAIDRKKRETQEIRKKLTLYQQAPVAEIVEGSLEELESRLQGLKAAYTGEIEFLEKRQKDLQLDCAKMEKELARLGLAEEDYRGVAFDEGKAEEISSEMNELEKARKLLQRVTFQAGQKASAAKIACDIAAEEVKKLGAEFPLGPEEIKGDFQSRRHKLSAEYTRLDQELKQIALKISAYNKLMDQITPVLKGVKAEPEKGFQPEADLKAQTGRLAESFLTFQSANRTKADTLRNNYRGLKAEYREKNANISNIFKGLDLLWDKPDMDYDEYFYLYERMGQHQEKLGELIKLHESLLSNLERNKKDMIQQSLLQGMRFYEEIEWISDHSKVRLQGKNRPVQMLKIELSLDSSEAAGGRMKEYIEECILQVRDETRQEKSEADLKKVIAKLMYSRELLNVYLGHSNIPVKVFKIDLNMQNSGLKTWEDAMLENSGGEKFVVYFSVLSALMAYTRSRTLEAAGADEDKDSSVLVMDNPFGPISSEHLLNPLFEIAKKHRTQLICLSDLKQNSIMNCFNLIYMLKVRTSAIGSNEYLKFEELVRDQSAVQNDEKLEKAIFRVSEHKQISLFE

SEQ ID NO: 41251 - protein, 360 aa, Desulfosporosinus sp. I2
MEQIEKLLNHVSKTVTDLELQQILGESDYPRFQGEVERLVGFGVIAPVKAAKKNGRLPPLYNKYKIIKPQEDYTSYLESIRRLNPELSIAGYLQRPEVYKKHQQIVEGISNYLWFAQGLLDKPMSRKERSFSVWGREKLLDEQISLVKDVLRFNSLAEDFLNYYDTPEPFFEYRHDRGQLTTVLVIENKDTWFTLRKLMQDTGKNSLAGTVLQVLLYGEGNKITKPGALEEYKAAMLGGEGQATRFLYFGDLDWEGIRLFFRTREANPSLELKPFAALYSLMLELAAKHAERQELPKSPDQRGVTGSLSEFLAALELAQGDNPLSTSTSLAGGFLKDLLAEGKYIPQEIINYQVAADLLK

SEQ ID NO: 41252 - protein, 482 aa, Peptococcaceae bacterium BRH_c4b
MTGINENFDIFFERDQVRVRDALKDLIMLSGVLKDLSGEIFWDDPRRVLDALRVFDLILKGTFYEEEAIQGEQELVYRFERIYELQPTIDIPRLVRLGRRYNWITDSHNPPLKFTGTGKRMVMQLLRLVNDALVYHSQPAELKEIHQAERDLQLAKSYEDIGVGSQDTIASVLNNLDNAVNDLKFQREKYIQDRRALEKYQSVLALLEMLERELGERFARLKGAIDQKYERQHRRSATLFYRVIQELSSLLGENAYVSQLEVGRKVLRVNRDRFLQYLVDAYSDSLPGTTLKPVQTMQYMEEGIYDDGGDSFAGLWMPFTLPPRLHEDDVERGVRQLEDWIYRWEPPRENSMSENIEYHPARAVTARELASLLGAATSVAAELETDTRPIIDAIAGNPGISVAKLLAQLGGGWAGALRHLLVLSYLVSEEEVKLFTYKNGKDKATADVKTDGWRLNYPDGEVRFVKGTAVLGKQKKYDLKVR

SEQ ID NO: 41253 - protein, 226 aa, Peptococcaceae bacterium BRH_c4b
MEKYTAIDEKDILMLDKRQQQALSEILISSKSMDGVPRQRVMRVLRTRDEEVFNLFLRKANSILGDALKLVYDEQSNRCVALTRANAAWTQEVLDDHQLALFIFCFYLGMTSRTGRMTFDELHGYFQRSSLYAERKLMHALDHLAKCGLLRMEEYEGEGDEKKRSYYITQVGRQALPLPFLMRIVSESQGGEVTMEQVRDFFSLDRRQEDTGNTDEDKKQLKLFAD

SEQ ID NO: 41254 - protein, 1093 aa, Peptococcaceae bacterium BRH_c4b
MYPIRLQIAGIRDFSPQAMDLDKVVAHVLVGGKNGSGKSTLVYAIAFALGSPRISVDGLRSKTSRRGEDGWYARVSVLFHNPPGENRKDAPEYVELHAEVRVAPGTERRQLNYSLYGGEVPDKLSLLRKFQSRNDAREYYRRVFGIDAEGYFMFWYQGSIAEFANISDAARFQRVAEMFGLDELQREWELARIKMNDARDDFERARTLALNRRRRLQELEKFKNALEQRDFLRRDALLLYDACHRGLLELLRGEQGELLSRLDKYQKEHQQNLRARDDAHKALRDVTIKLSENSDKRNIKQSEFASENQHIIQLNEKIRVCSTEKEELSKKVRDLESKMYHIRRSKEDLLAEQGALRRELEILEERIRQLSGEIDDLTGRRDAINVEIGKAGSELERVKENIQQLEADQSALPSLEILREQYDKLKNTRDSDAGQKALLEERCRSLEADYVRLAGQKTLLLAEQEKLLKLYRQAGIKAYAFGEIFEVRGEISREEIEHLLAPLKHTLFVEQSLGRVPVEKAFYVVDLSRPHTGEPPRENILQEYLIPTEGVCPEEFLEKVNCWLAFIQLNPENNPPGHCGSGLVLWQGNLWDCYGLRGAVERGAAIGVKAIEIARRELEEKISQAGLDIENLDGHIKEMDEKIKDLSKKINRRQNADESLPGLSIQKQLLGTKLEQMGKELAAATETLAKTVEERNANNNNKVNKEQLLKQVEGELTVYAEYEREEKNIIRIRELSEALEKAEGELIACRQRSDALEGEVDSLERVVRELSREEDARQGEYDKLHSLVERQEQDLAGLNEQASTLSIEIEEVEVEQARLIKEFAEVITNLENTSQWLPFEFKPQEKNRYNFQRKKEEARGMLDDARSRVVNENALEEYNDFSYEYNLAVKELEECELRYNNLCSLEEERRQNFDKSVYNRWLGTNRRFSDYMRRLGMVGEVRSISPDPESRHASYQWELHVATRAGHRPERIVPESGRTVGEGISGGERAATSLVFALALLSDIERKPPFYVLDEFDSALDEERKHDIFDLYRSVLDRKMIIVSPKIHGDQYLNRFNKFLCVVANPGAGSNQTVSEVYDVTREEYVEIRGEDE

SEQ ID NO: 41255 - protein, 480 aa, Peptococcaceae bacterium BRH_c4b
MDKFPSWVKVLSNWSPSPSKSINGRRTRWNVYRDTTRTRRLVGYLEYNWSESPAEENIPENILGIISKECRKAERLSEERLLSLLSKEAIILGMATDNIVSELINSGYLGRWIRLNSDEKTIHSVAYGPMPPLIQHLGEQQQLLLKNHFQWITEREQRLQRILLLIENNQPAGDTLNTGELFQKSVVNAALRRIAEHIQAKLEELSVIGQDKKTIFHTDYPWPLSPTRTSSKYHLGVDFLLALAECLLEMPEGYEWKEIGARFNPSIGGSKYFDQARGELIQMAETVCGVPLDSLGLTSLGSLYPLYILGDLRLARGDIKEVYPDDTICALSNIQVNRTEEAITRAGRIILTENRALLLKMEATGWQRRQSESLIIGIDGRVRLAHRRLLKMLAATGPGKAFFSWVDTDPSGIDIARQVHEILPHCLFVSTQLETAMVLPYHEWLCRIQEEQDLRDREQEELLGGPEKWDQIFNIIHLRP

SEQ ID NO: 41256 - protein, 537 aa, Peptococcaceae bacterium BRH_c23; identical to SEQ ID NO: 41186

SEQ ID NO: 41257 - protein, 233 aa, Peptococcaceae bacterium BRH_c23; identical to SEQ ID NO: 41187

SEQ ID NO: 41258 - protein, 425 aa, Peptococcaceae bacterium BRH_c23; identical to SEQ ID NO: 41188

SEQ ID NO: 41259 - protein, 351 aa, Peptococcaceae bacterium BRH_c23; identical to SEQ ID NO: 41189

SEQ ID NO: 41260 - protein, 479 aa, Streptomyces albulus ZPM; identical to SEQ ID NO: 40831

SEQ ID NO: 41261 - protein, 1498 aa, Streptomyces albulus ZPM; identical to SEQ ID NO: 40832

SEQ ID NO: 41262 - protein, 361 aa, Streptomyces albulus ZPM; identical to SEQ ID NO: 40833

SEQ ID NO: 41263 - protein, 479 aa, Streptomyces albulus ZPM; identical to SEQ ID NO: 40831

SEQ ID NO: 41264 - protein, 1498 aa, Streptomyces albulus ZPM; identical to SEQ ID NO: 40832

SEQ ID NO: 41265 - protein, 361 aa, Streptomyces albulus ZPM; identical to SEQ ID NO: 40833

SEQ ID NO: 41266 - protein, 512 aa, Clostridium scatologenes
MNENYIKTLNTTVNELSVRMKSLVKYYPFFKIMNGKYSKDEYENIDAGEVCMGIISFLFYEGKLKAQHITFVNIQDYLQMFVEKVYSIKLIGDSLYKFTNDTIDIIQNSEGRGFDIGFPIFMPERQNVKYVINKSSDSGIKEFELTPSAIDFFLETKEFGEESKITISLLILKKLIEHNEYESALISLTNVNAEVIKQIARVYEIEMALIYGGNLGYKSFLEYRELADKHQAEEEKLFSETMEQIRTLREDYATKVSKSQLGEKEINAFRCLDEMDKELNKTVELHQQLLGKLVILSKKANEILRKKKINLLRPSFDFSTYLDKLGQIGSAKSLEYMAMPFFQLNIQKSFALPKINEMLDFDDNSTNNDDTNFQDKENAILINTDKFNNEIRERVLHNYKYIINYFFMLLKDRDSFIMGDVIMDADEETNKNIFKNPDFIGLILDFLRLNEENVLSDEKWKKEKGNDSLEKALEAVYMDRLETYKIKIETIEDSYIEIALGFKMTNVIIRKV

SEQ ID NO: 41267 - protein, 244 aa, Clostridium scatologenes
MDSNTKTALEIFSNMIRNVPVNEKINKDLYRSLLTNSIVAAELDEIVEMFQLELYITETEGAFVIAKANNKVFGYTNEELRHRLGAKNNKELYLCYFVIYCVIATFYIQSNYRTYVEYITSKSLLDRVEDKLTALATNTNIENVDDSSFKDMHRYWMNEMNESNNRNKETVDFNEKRGKTRLTLINKTLAFLVENKYMDKDEYTSRYSITPKFEYIVERFFDDAETKTVLQRILDEEIESKGEI

SEQ ID NO: 41268 - protein, 1475 aa, Clostridium scatologenes
MPSLNRGRAIARFNEGKQCFEDMKINSLGETIVLDMVNGGGKSFLIQCLGQTIIPNSTWQKDWDFKAVFDPANKNTVVHCLTEWELDEGMGYKYLLAGFCASKPNKITNSDGESNYGDFDKFSYICLYNSPNENDIFNIPLVEKDENNSQKRMSLQDLKKYLKGIKGDGYYVELPDKARDYKKRLAQYNITNAEWELIRGVNADEKYVATYLRTFSTSEKFILKFLIPKIEECNANRVDVEYRDSEELARDLLNIRELMDDLIKKKGQAREYDKILSFVELVARKLTEIKDKYVERDALYIEIKKSIAFLEQKIVELKKASDEVSENIEREEKLFKQNTINLKAIEIYDIEQSLADNNVKFNNQEKRVGELNIVLQKESKKLLIKKKENVYHSILQDKAKKAECIKSIEALEFSNTELLAERNSIGQKVKNYLANKINVSNVEIASINENIIKAADQVNTHTETTIKLRSEISSLERDIKRLTKRKIDIQKNMSGTNFKIIENTSKDNLTKIDMEERLEKALVEKESLKILKVQYEKDINEATTMIGTLKVNKVKLEHDLKDKNAILDEARMLYADIEEYIAKYEKSDINVLDETIDKKLEELSEGNKMLSIKISEITNLITSLKSNSLTLSKDTEEVYNTLKPKYSDAILGKDFLAKLTTDEKKYFISINELVPYAILLGEREYRKFISDKTVLSNYFGGAIPIINQDSLDNTVLLPNGMTFTSKDVDFFVNADEIARIKREKEIELSELQEEQSGLVHNIEEVKKSSAIVKSFISKFLNAKTIEVLAAEVGNIELVLKKNEKDTEEYTKLEISITANMIENKKQTENTEDLIDTLKNQIIEIDKYIELQNQYIAANDEIKSMGKEKECKSDELISEQRLLTELNIGKNILDDKIRTMDRTVGNLKDEIDKISFVDSNDDEVIKDAEYTYLKGELKATIDRFNGINSNLKGLEEEIQSCKVRIEGLKNNIEQDGISLDELDHITLEFTNNSNEVIAEIQIYVDNLGIELQKENNILLEYEKEIRSLSDRYKEKIKQLKEEKDTIYLDIKKFIQGYLNDINPKEKMKEIKSIIRDSEKKISQFKIIKNDLEKELQFQKDCKGEFSIIAKDIDVDLEIDDISLDRVRSSKEIEKAVSNIKNSINSKKHFYKADIVKGNALVNYMQGFNEILEELAKIPNDVANLETTITNLIGKDISEDKECLLKLIKQEQIRLDDDIKSLELQEEKFVTLCIQQSENILRDIKKLADLSVIEINGIRQEMIKVNLTKLEDDIAKEKMKNYIEYLINGSGEYEDDNERRNQLSKGLTIEKLFQQIIKPIKASSIELYKLEDINNMEVNSWLNWDRAYGSKGQTNGMYISVLICLISYLRKLYTSSTDKSKKVIILDNPFSGTTSEIIWLPILKLLKENNVQLWAFGFEIKTQLSNCFNVRYFLKKEPGVGYEKIIVAKFKSNADTGSLGYDVLTGKKIEYTQQTSF

SEQ ID NO: 41269 - protein, 351 aa, Clostridium scatologenes
MKVELVKGELSSNKKKTVYTIDDLYATVSRIYKKQVVDLQNVYYMEFYNLIKELENSGVIKKHGDGKTYVNPHLFKKYKVLRDKIVFTEEEKINMAKLNKVNLGYYGKRVDEFREDYDIIVALNDLLRDTTHYREITLNEISYIMFGYEKDMSEGKVSVVMKKLGIKEEDLGCRMKNEPLLNTIFKGFYEKDRRNILIAENLETYWSLNKILREISNDIDMLIWGQGCSVESNFRGTILYGVNENDSIYYFGDIDLSGVDIFLRLKSNFKDFSIMPSTSLYKNLLNIGMKMGIKKSRSQKQIDIEEDRLNIFLNAFSNEVRDKLKAIIKNREYIPQEALNYNELRKAYGNE

SEQ ID NO: 41270 - protein, 524 aa, Methanosarcina mazei WWM610
MEYAKHFQDINERMRHLKCYYPFFRIYAYSYRNNLEYDLPYIALSVLTLLIEEGKLRGRSLKVDEIEVHIKNILNEMYMDYETNSKQVTRTLLTILETDRDGESYHFEYMDPIRRKKDGHYVHLIEYDVSNKAYQISDAGLDFMISIKELPEESKISVSLILFKKQIENGSFVTALNTVRELNLEVLRKKEKKQNLLEKMLYGGADVVEDYSIFSEGVFSQLQQEKILFEEVRTTLLELTKNHEEIINISNKSANEKDFLILKQISTELDRGYQLHSGLLKEYTDLPGEYEKICRIRVNSLFDRKWHFKEILENNIRQNYPNDVHVIGMHPMFLPKTTRSFSLYKIFESQIVSRKKSEVSETRQNDEWSEKKLIDGTVDERQRNNFRVYAHALLGCVEDHGGDLTLEVYLKTVEDTLGPEALQNMDLIPFLFSLNVDIDDVNAQASDNSQKLKNKELNVTRFEFNKLKLSCHSNRELILEALLSAHEALGLSSSTFIVTSFPDEIINIKKGFSAYISNMKFIMK

SEQ ID NO: 41271 - protein, 251 aa, Methanosarcina mazei WWM610
MKFEKENLGIAFDMLYQMLSTGSIERFVYPKHFMRYEQESEIREALDFCAEKLGLYVCGRGDSIFLSAGVGNRVFGYTNEDVKNELGRGFKNPEMYTVFFIMNVIVSEFYKESFHDTLRINLPKNYLIGIIEAKIRALSDFEDLDKISEEYKFNFREIKDLWDSLPNVEFRDDSDIEIKQKGTSSKTAIINETVIFMKKHRLVDEHNNAVYPTERFKAIVSEAYNRSDVQTDIIEFIDDLTCLEEEKNAET

SEQ ID NO: 41272 - protein, 1465 aa, Methanosarcina mazei WWM610
MPKLKNLRIINAQFNEGKGIYQDFLMPFDGLSATYELVNGGGKSVLVMLLLQCIIPKSHLDSKKPFKAMFEGGDPNRTTHVLAEWELDEGLYEHKYLLTGFCAKKKDDPDDLLESGGVNHFSYIHLYDKSNDLDIFRIPLCRWENNEFVVMDFSKTLSMLKEKSGDFNIWITETIREYKERIKEYNLLEAEWRLVQSINKDENYLKTYFGGNYGTSRTLVEKLLINTTDECLRDKRRFSGDNSEEKSSESLASALYQSQEDLKRLKEEVEHVKEYTTLNSEVNKIIDENNKVIESHQKFDEAKLIASSQYKAHDLKVTETLSNLEKAEFDLNETKRLHEKVEHDIERFELMRLNIKVNKSKTVLEELRVEKEGVEKSLQDLKHKSNFATATNKYLEIQNLNSEIRESQNTLENIRKQNNELFGERDTIGKSLFLRISEDLDMVSEQYEAEMKAKNEIQEKISDCQHIIGQLHNELNFLGKEISRYDDELKNLKKRESVLNNQYAQYSRITCGLIIEDEVEATGELIEELEGKLKQLADEIETLKSSLLTSEIEIKYIQSQIKNTEENIEKVRANILKFESDRRAVLDIVEAREGTDIEPCLLTVDKEINDTQELLSTARKTHKELKQELKMVQEYGFALSEDFEDALTLLRDRFKFARSGAEYLKDLDTDGQRKLLNNVPWLPKAIILANDDFDALVKNPRNHLSPKIMDSSVILTGISSIQENKKVSLENVFIPSRDAEYYVNVLNRENTINRIEEKIKDVEQQIVRCDNSLKVAKNDREALSFYLYTYPVTYESELHERLSEYESLKKEEGNNLVSIRKKNEDDSVALEQAKSSLLTTQEKQEKLKEKRDLLIDLNKIMDEIVEKTRALEQSKLTLNNVETQHREKKNLKYKLDIDSKEKDSSVRSLYLQKSMLDKEVKSFVQYRNVNVDKLPEKDTDTLRSKWISVNSVLNQVSGNIEQIDHRIEKNKSLIEVFLKDIKNLEVSIESIKANSRSQPYPDDHLEFLKKEIENVQANLEDMNSRLHKASDNLLLLTREFEEKCHRFNAKSGKVYLADSFLIDSTLVDEELTKNQKESYRLVEKIVGLENLCKKTEKELESLKNSLDHYKILSDVYKIETQAVEIAVELISHKEIENLLKNTKENVENRKSKFNVAKEQFLNKIVDLPVASYFKDVVRQKLLVANTLREAESNANALQDYSCTITSRMEMHQKQADSLKSVEENIVAQALGIAMLYRDYLHKFVKLSKIDVDGTLEEMVRINFNDCEYSEERAESEMRYYIQELIQEIEVGNIGKKELINNLTPAYLINKVLDMKLLKLDIRKIDRNSLKFQRWERIQASGGQENAMYIIFLVVLMSYIRDIVVDRRDKNTSKVLVIDNPFGTTSSYYLWEKIWAILERNNVQLICPGHKIGTNVMEFFPINHLLTEELSTNDRTRIGIQVRARSEILDRIERQKRGGQLSISMY

SEQ ID NO: 41273 - protein, 359 aa, Methanosarcina mazei WWM610
MEEQVLEILEQYAKKRVEIKYIVGELKNGGINLISDPWLNRPFIDVIKKLIDENVLVPLKSAKKLQQYEGLPSKYEINRHYFRQCDEEIPAEELRGLSCKLNMSYYLKHIEEYRAHREFIRRINDLMMDNDCEVLTANERSYLIFGDEKAITSPKNASIDGEIILNRLNLTIKDIKAEKKPEPFFYIKAKEYESLSDILARKILIVENKDTFWTFMDATLSRELTDIHLLIYGEGNAVVSKFEFIQMVGGKTTDHYYYFGDMDQEGILIFNRLRSTFSEYNIRPAVSLYEYMLNKSGQENAKPLRKCRKINEESLSPFIDFFSHETRKVIEEIISAQKYIPQEVVNKTDMRRLRMIGIR

SEQ ID NO: 41274 - protein, 524 aa, Methanosarcina mazei S-6; identical to SEQ ID NO: 41270

SEQ ID NO: 41275 - protein, 186 aa, Methanosarcina mazei S-6
MSAGVGNRVFGYTNEDVKNELGRGFKNPEMYTVFFIMNVIVSEFYKESFHDTLRINLPKNYLIGIIEAKIRALSDFEDLDKISEEYKFNFREIKDLWDSLPNVEFRDDSDIEIKQKGTSSKTAIINETVIFMKKHRLVDEHNNAVYPTERFKAIVSEAYNRSDVQTDIIEFIDDLTCLEEEKNAET

SEQ ID NO: 41276 - protein, 1191 aa, Methanosarcina mazei S-6
MPKLKNLRIINAQFNEGKGIYQDFLMPFDGLSATYELVNGGGKSVLVMLLLQCIIPKSHLDSKKPFKAMFEGGDPNRTTHVLAEWELDEGLYEHKYLLTGFCAKKKDDPDDLLESGGVNHFSYIHLYDKSNDLDIFRIPLCRWENNEFVVMDFSKTLSMLKEKSGDFNIWITETIREYKERIKEYNLLEAEWRLVQSINKDENYLKTYFGGNYGTSRTLVEKLLINTTDECLRDKRRFSGDNSEEKSSESLASALYQSQEDLKRLKEEVEHVKEYTTLNSEVNKIIDENNKVIESHQKFDEAKLIASSQYKAHDLKVTETLSNLEKAEFDLNETKRLHEKVEHDIERFELMRLNIKVNKSKTVLEELRVEKEGVEKSLQDLKHKSNFATATNKYLEIQNLNSEIRESQNTLENIRKQNNELFGERDTIGKSLFLRISEDLDMVSEQYEAEMKAKNEIQEKISDCQHIIGQLHNELNFLGKEISRYDDELKNLKKRESVLNNQYAQYSRITCGLIIEDEVEATGELIEELEGKLKQLADEIETLKSSLLTSEIEIKYIQSQIKNTEENIEKVRANILKFESDRRAVLDIVEAREGTDIEPCLLTVDKEINDTQELLSTARKTHKELKQELKMVQEYGFALSEDFEDALTLLRDRFKFARSGAEYLKDLDTDGQRKLLNNVPWLPKAIILANDDFDALVKNPRNHLSPKIMDSSVILTGISSIQENKKVSLENVFIPSRDAEYYVNVLNRENTINRIEEKIKDVEQQIVRCDNSLKVAKNDREALSFYLYTYPVTYESELHERLSEYESLKKEEGNNLVSIRKKNEDDSVALEQAKSSLLTTQEKQEKLKEKRDLLIDLNKIMDEIVEKTRALEQSKLTLNNVETQHREKKNLKYKLDIDSKEKDSSVRSLYLQKSMLDKEVKSFVQYRNVNVDKLPEKDTDTLRSKWISVNSVLNQVSGNIEQIDHRIEKNKSLIEVFLKDIKNLEVSIESIKANSRSQPYPDDHLEFLKKEIENVQANLEDMNSRLHKASDNLLLLTREFEEKCHRFNAKSGKVYLADSFLIDSTLVDEELTKNQKESYRLVEKIVGLENLCKKTEKELESLKNSLDHYKILSDVYKIETQAVEIAVELISHKEIENLLKNTKENVENRKSKFNVAKEQFLNKIVDLPVASYFKDVVRQKLLVSRQSSIVG

SEQ ID NO: 41277 - protein, 359 aa, Methanosarcina mazei S-6; identical to SEQ ID NO: 41273

SEQ ID NO: 41278 - protein, 474 aa, Bacilli bacterium VT-13-104
MEELDKALISIFDTDGDKPELLQSMRDIAALSGVLSELSDKEYFQSPIHVLRFLRVLNIINQEALGITDPIENEETLFYRYRHTFGYDEEMTIGFIKHLTFVLGKYNWIAKTGKRIKMRDVGKRMMDVLIRLANDSLAYYLNDDVQRSLFQAKRDAELSEAYDDKGISGGNKLMSMIKNVEEAVSLLTERELEYLSDRNALNQVEVIHQLMKELEVKMVERLAKFETLDQELVFATVKQRGTTAISEGTKISLGTINKILKFAHLQETDFIKTIHPELFRNFIVKSFDPPIGSDIPNAHQILSFMEQGQYEDEELDGMWVPVKFASPLPPVAIDEGIEYVENYEPITEEIEETVEEDFPELEEVMEDQLEELMGDSRWQMTKQMIHTEQIEKYLDNVDEAGLDELVVQAGSDKWSDVLNGLIGVSALIANKKADIDEKANRKLDDNKTERDWRWIEDEQGTYGIRKRGRRDSKY

SEQ ID NO: 41279 - protein, 236 aa, Bacilli bacterium VT-13-104
MNKEPMELENEEEEIQNINPLSALQSIQGFLTKEEELVFMQILFSSSATIRTGNFGLSRKEVEKLLGITNDEEAFASFIKRVNQGLSRYFKVIYDERRNQVVALMRVPAKQARNVLNKESLAILMFIFYHQEVLQNEYTLFSQLIHSFGHESLQVTRKIQANLDPLKKIGAIEVYDTNSDEEAYQLTAIGVHMFSDSYLRRYAEFSQSNQLHMEDVLRFFKRYNMNGGVGDDSMET

SEQ ID NO: 41280 - protein, 436 aa, Bacilli bacterium VT-13-104
MIPSEWKEYLEEHILLKNEELHLIDINENNGNVDIPVIRRTARTRRTVARLTIGIVTDHTVSPPEKLVKAFSSSKVKKHLTLSDETYDWIRNGWLIREYRFEKDERTLKSEQYRMGYGLFQYQQFIQKQKEEEKKQLIHEWKTRWEETRGTGKVEDGLRLELLDLLENRLQLIANEGQRFLEGQVDKMETVNPSWRFRKQVLFLHFLVALYQIAAIEYHYDWKQIGARYYRKIGGSKEFDSYKKDFIEEAERFLERPLHLLGLASLGTITPIFFSGPMSGKKVTYSYGSVHATTDLAVFTDNFQTSAEVLWLVENRGVLTRMAYEEEFLLDSKSFVLGIDGQLRSAHRQLIGNLVPFVKQVIIWTDVDEAGLTIAKEIFQLTENEQVLTKWVVPPLEIVTDIEEFEIRYKQSIQAGKEEQEQEIGGVRYWKNWIKP

SEQ ID NO: 41281 - protein, 524 aa, Methanosarcina mazei; identical to SEQ ID NO: 41270

SEQ ID NO: 41282 - protein, 251 aa, Methanosarcina mazei; identical to SEQ ID NO: 41271

SEQ ID NO: 41283 - protein, 1465 aa, Methanosarcina mazei; identical to SEQ ID NO: 41272

SEQ ID NO: 41284 - protein, 359 aa, Methanosarcina mazei; identical to SEQ ID NO: 41273

SEQ ID NO: 41285 - protein, 524 aa, Methanosarcina mazei; identical to SEQ ID NO: 41270

SEQ ID NO: 41286 - protein, 251 aa, Methanosarcina mazei; identical to SEQ ID NO: 41271

SEQ ID NO: 41287 - protein, 1465 aa, Methanosarcina mazei; identical to SEQ ID NO: 41272

SEQ ID NO: 41288 - protein, 359 aa, Methanosarcina mazei; identical to SEQ ID NO: 41273

SEQ ID NO: 41289 - protein, 506 aa, Methanosarcina mazei
MLLSIFRIYAYSYRNNLEYDLPYIALSVLTLLIEEGKLRGRSLKVDEIEVHIKNILNEMYMDYETNSKQVTRTLLTILETDRDGESYHFEYMDPIRRKKDGHYVHLIEYDVSNKAYQISDAGLDFMISIKELPEESKISVSLILFKKQIENGSFVTALNTVRELNLEVLRKKEKKQNLLEKMLYGGADVVEDYSIFSEGVFSQLQQEKILFEEVRTTLLELTKNHEEIINISNKSANEKDFLILKQISTELDRGYQLHSGLLKEYTDLPGEYEKICRIRVNSLFDRKWHFKEILENNIRQNYPNDVHVIGMHPMFLPKTTRSFSLYKIFESQIVSRKKSEVSETRQNDEWSEKKLIDGTVDERQRNNFRVYAHALLGCVEDHGGDLTLEVYLKTVEDTLGPEALQNMDLIPFLFSLNVDIDDVNAQASDNSQKLKNKELNVTRFEFNKLKLSCHSNRELILEALLSAHEALGLSSSTFIVTSFPDEIINIKKGFSAYISNMKFIMK

SEQ ID NO: 41290 - protein, 251 aa, Methanosarcina mazei; identical to SEQ ID NO: 41271

SEQ ID NO: 41291 - protein, 1465 aa, Methanosarcina mazei; identical to SEQ ID NO: 41272

SEQ ID NO: 41292 - protein, 359 aa, Methanosarcina mazei; identical to SEQ ID NO: 41273

SEQ ID NO: 41293 - protein, 524 aa, Methanosarcina mazei; identical to SEQ ID NO: 41270

SEQ ID NO: 41294 - protein, 251 aa, Methanosarcina mazei; identical to SEQ ID NO: 41271

SEQ ID NO: 41295 - protein, 1465 aa, Methanosarcina mazei; identical to SEQ ID NO: 41272

SEQ ID NO: 41296 - protein, 359 aa, Methanosarcina mazei; identical to SEQ ID NO: 41273

SEQ ID NO: 41297 - protein, 524 aa, Methanosarcina mazei; identical to SEQ ID NO: 41270

SEQ ID NO: 41298 - protein, 251 aa, Methanosarcina mazei; identical to SEQ ID NO: 41271

SEQ ID NO: 41299 - protein, 1465 aa, Methanosarcina mazei; identical to SEQ ID NO: 41272

SEQ ID NO: 41300 - protein, 359 aa, Methanosarcina mazei; identical to SEQ ID NO: 41273

SEQ ID NO: 41301 - protein, 506 aa, Methanosarcina mazei; identical to SEQ ID NO: 41289

SEQ ID NO: 41302 - protein, 251 aa, Methanosarcina mazei; identical to SEQ ID NO: 41271

SEQ ID NO: 41303 - protein, 1465 aa, Methanosarcina mazei; identical to SEQ ID NO: 41272

SEQ ID NO: 41304 - protein, 359 aa, Methanosarcina mazei; identical to SEQ ID NO: 41273

SEQ ID NO: 41305 - protein, 524 aa, Methanosarcina mazei
MEYAKHFQDINERMRHLKCYYPFFRIYAYSYRNNLEYDLPYIALSVLTLLIEEGKLRGRSLKVDEIEVHIKNILNEMYMDYETNSKQVTRTLLTILETDRDGESYHFEYMDPIRRKKDGHYVHLIEYDVSNKAYQISDAGLDFMISIKELPEESKISVSLILFKKQIENGSFVTALNTVRELNLEVLRKKEKKQNLLEKMLYGGADVVEDYSIFSEGVFSQLQQEKILFEEVRTTLLELTKNHEEIINISNKSANEKDFLILKQISTELDRGYQLHSGLLKEYTDLPGEYEKICRIRVNLLFDRKWHFKEILENNIRQNYPNDVHVIGMHPMFLPKTTRSFSLYKIFESQIVSRKKSEVSETRQNDEWSEKKLIDGTVDERQRNNFRVYAHALLGCVEDHGGDLTLEVYLKTVEDTLGPEALQNMDLIPFLFSLNVDIDDVNAQASDNSQKLKNKELNVTRFEFNKLKLSCHSNRELILEALLSAHEALGLSSSTFIVTSFPDEIINIKKGFSAYISNMKFIMK

SEQ ID NO: 41306 - protein, 251 aa, Methanosarcina mazei; identical to SEQ ID NO: 41271

SEQ ID NO: 41307 - protein, 1465 aa, Methanosarcina mazei; identical to SEQ ID NO: 41272

SEQ ID NO: 41308 - protein, 359 aa, Methanosarcina mazei; identical to SEQ ID NO: 41273

SEQ ID NO: 41309 - protein, 524 aa, Methanosarcina mazei; identical to SEQ ID NO: 41270

SEQ ID NO: 41310 - protein, 251 aa, Methanosarcina mazei; identical to SEQ ID NO: 41271

SEQ ID NO: 41311 - protein, 1465 aa, Methanosarcina mazei; identical to SEQ ID NO: 41272

SEQ ID NO: 41312 - protein, 359 aa, Methanosarcina mazei; identical to SEQ ID NO: 41273

SEQ ID NO: 41313 - protein, 528 aa, Methanosarcina sp. 2.H.A.1B.4
MDYNKRFVDCAQRMNNMKCYFPFFYIYLNPFKDKTYDFDIPFLALDTLSFLFEEGKLKNRTLPLSEIEAHYTGILKAMYPDQSFSPQEIHDIAMAITRILESPTTAGKRFNFSYSNYAVPKEESFYLSLITYDLKTSAYEISDTGLDLMINTKELFEEAKIEISLILVQYQLKNGYFDNALQTVRGLSAAVYRLKDEKKSVLEQLMYTGIDAFGTYKEFRDRVQAQLDTENTLFLDVNGHIARMIHELEDRLESDDISEKYADRAQYQILLDIKTEFESCFNLYTGLVSEYNGLFREFENISKIRLQRLGSKRFMFEDTMKEHVCANLPNEVHVKKVHPLLLSHIQKRFNPLIIYEPQQILRKKVEPITKIERKIWTDELSLDDQIDENQMTYFVEYSKLLLDLLTTSQNIDLKTFLSEVMCRKGLTALQNPSLIQFLVELNIAAENTTNNDSELLTNDPFVTLFDCDEICKAENRTLRMIERSISEAQSFMEIPINKLKIVSIPKDTITIDENDKSSIKNMTFSVEW

SEQ ID NO: 41314 - protein, 252 aa, Methanosarcina sp. 2.H.A.1B.4
MTFEKKSMEIAFEMLTEILRKNGVYSLDLSKKSWCLNPEQESEIMEAFEFIIKQMGLIMCVRNKVIYLSPGVDNPVYGMTLEEIKVQLSQSFTNLHVYTAFFIIHVIITEFYKESMPETQRAFILKSDLINAINTKVDALSTHTELDKLSEEHNYNFSEIRDLWKELPVIMHRKGRDDPIETGKSSRYALVNTTLKFLEAQDLVHVQEDMIRLTERFKAIIDNAYRNEQVQYGIAQVIESLTSTEVDEYANN

SEQ ID NO: 41315 - protein, 1478 aa, Methanosarcina sp. 2.H.A.1B.4
MPTINSVRIINAVFNNGRGTYDNFTLDPEGNGFVYELANGGGKTVLLLLMLQCVYPNSKLENNKPFKLMFEGGDKNRTTHAMIEWKLDKGIHNYSYAVTGICAKKKIAYDGSEKDELDYFNYVIFYNHSNEYDIRKIQLCKTYEDGSLESVVSYSDTQSLLKNLEKNKPQHCEVHVFNRKEEYMEFLKRLGIIKTELEIIRKINENENKLDTYFKRYDTSRKLFQDLLIPTTSECLKDKSRVQGLQSSEDSTDNIAESVFKFRDKILALKELQSNLGDYRTLRDEAAKLEHSVNAVIGVFQARDATVHEAAVQYRSYESAVQELTHQIADLNAQISEVEKEHKECEIGKQFNTLRVLESEHNLMRIELDDLIRTRTDIADRHNKAEYDWNFARATGKYVQIKERRGKVTEREEQRASLEKSNEELYSTLNRMGSVLFSRYSAILLNLQENYNTKKKEQRSMGVEKDRIVKSHGKCEEALRISQEDLDKKEAKLKKLGQQESDTRKQLSANPQQPPALFDVEEERKRTREDIISRKQDLENTKSESKRLIEEKHKLELKQIKVINQKESAEGKIKEFSQKMNEYDSKLKEVQEIFATYDTTDIVDCILKLEDESTRYTKEKVLAKNKLDRLKKRLEFIDKYGYDIIDDSIEEVKAKLGDTFKNAIYGMDHLKQLDEADRVAALQRIPWLPKAMFVSSNDLKSITNNPFKLAVSVQDSSVVIASIDKFNSSEVCSTGDIFVPHRDTNHYINLLSTEKAKAIIEKDVDSATRDIESAKRSIEKIRKMEYTVTSFKTEYVDGYPNGYESYLKDQLDGFNAELTKLNEALSSLVDQIRDTGNRFDHSTSVESALEKTISDLTKKEKLLDILYRIVTESSEVETQFGELKLLIPKYKKELESIDLHKTMQEHELQQMAECIKQLEKELNVANDHVEKFKNYADRPVDEMGAIGTEELHSQFNGVEEASREERASVIRLNDEIADHKARINELTKDIIEVFRIPMDTLEQHDPQTAYSGEYIASLEKHRNDLVSQHAQQDEKCRSAEVKHRVQKKEFDAGIKEYHNVSGREYIHDPDLTDSEEFKRELTRLNTRELDLNRSWSSLKRKVQDTDKVRETAQKEFGMFSVLEGEYGLSKITVNITTELKPVTEISKQIGERNESLKTVKNSFTHARQQLRETALELKVGAYYSDSFDVKFRDPESAQEANQTVINVTEYVKELDGKIQHVEYELEGLEKDENNIINLIMQCNRIYLGYLREFANASKIKTHEGTVRPMISTNLDACIYDEELAVRNVREYVGKILGNKDIILDDVRKMTTPTKLIECAVDMNAIRVHVLKVDIQKHTPQLWDNINASGGQINAMYMMFLAVLFSYIRKIVIDQSALATSKILIVDNPFGTTGSAYLWDDIWAILEKNNIQLICPTHMINPKIRSFFPKSYLLTNKFSVDNAVKVCIKEATCNEASVKRTKEFMYGQLTFDEKFEAEP

SEQ ID NO: 41316 - protein, 305 aa, Methanosarcina sp. 2.H.A.1B.4
MIRAKNPQVISFYQLDEKYLINSTAFAPISLLSDKQLYLELTTGLFHRLGNNYYLQHLQEYKEHRPYILRISDLVSSRPAETLTANERAFELFGDEKALTSPEHAAFDGNAVLKNLELTLEDIGAEIVYEPFVYTRSKMFDTRDITPVRTILIVENKDTYWTLKNAVLHSDLDYIDMVIYGEGKAILSTFRYIEEVGGRVNDRYFYFGDLDREGIEIFNLFRKKYSEYEIVPAVKYYEYMINKVGVENAKAIRTHQKVKDYSSFIGYFSDTTGHNIKTIVENNLYIPQEAINKTDIKELRVIGLQ

SEQ ID NO: 41317 - protein, 524 aa, Methanosarcina mazei; identical to SEQ ID NO: 41270

SEQ ID NO: 41318 - protein, 251 aa, Methanosarcina mazei; identical to SEQ ID NO: 41271

SEQ ID NO: 41319 - protein, 1465 aa, Methanosarcina mazei; identical to SEQ ID NO: 41272

SEQ ID NO: 41320 - protein, 359 aa, Methanosarcina mazei; identical to SEQ ID NO: 41273

SEQ ID NO: 41321 - protein, 524 aa, Methanosarcina mazei; identical to SEQ ID NO: 41270

SEQ ID NO: 41322 - protein, 251 aa, Methanosarcina mazei; identical to SEQ ID NO: 41271

SEQ ID NO: 41323 - protein, 1465 aa, Methanosarcina mazei; identical to SEQ ID NO: 41272

SEQ ID NO: 41324 - protein, 359 aa, Methanosarcina mazei; identical to SEQ ID NO: 41273

SEQ ID NO: 41325 - protein, 524 aa, Methanosarcina mazei; identical to SEQ ID NO: 41270

SEQ ID NO: 41326 - protein, 251 aa, Methanosarcina mazei; identical to SEQ ID NO: 41271

SEQ ID NO: 41327 - protein, 1465 aa, Methanosarcina mazei; identical to SEQ ID NO: 41272

SEQ ID NO: 41328 - protein, 359 aa, Methanosarcina mazei; identical to SEQ ID NO: 41273

SEQ ID NO: 41329 - protein, 506 aa, Methanosarcina mazei; identical to SEQ ID NO: 41289

SEQ ID NO: 41330 - protein, 251 aa, Methanosarcina mazei; identical to SEQ ID NO: 41271

SEQ ID NO: 41331 - protein, 1465 aa, Methanosarcina mazei; identical to SEQ ID NO: 41272

SEQ ID NO: 41332 - protein, 359 aa, Methanosarcina mazei; identical to SEQ ID NO: 41273

SEQ ID NO: 41333 - protein, 524 aa, Methanosarcina mazei; identical to SEQ ID NO: 41270

SEQ ID NO: 41334 - protein, 251 aa, Methanosarcina mazei; identical to SEQ ID NO: 41271

SEQ ID NO: 41335 - protein, 1465 aa, Methanosarcina mazei; identical to SEQ ID NO: 41272

SEQ ID NO: 41336 - protein, 359 aa, Methanosarcina mazei; identical to SEQ ID NO: 41273

SEQ ID NO: 41337 - protein, 524 aa, Methanosarcina mazei; identical to SEQ ID NO: 41270

SEQ ID NO: 41338 - protein, 251 aa, Methanosarcina mazei; identical to SEQ ID NO: 41271

SEQ ID NO: 41339 - protein, 1465 aa, Methanosarcina mazei; identical to SEQ ID NO: 41272

SEQ ID NO: 41340 - protein, 359 aa, Methanosarcina mazei; identical to SEQ ID NO: 41273

SEQ ID NO: 41341 - protein, 524 aa, Methanosarcina mazei; identical to SEQ ID NO: 41305

SEQ ID NO: 41342 - protein, 251 aa, Methanosarcina mazei; identical to SEQ ID NO: 41271

SEQ ID NO: 41343 - protein, 1465 aa, Methanosarcina mazei; identical to SEQ ID NO: 41272

SEQ ID NO: 41344 - protein, 359 aa, Methanosarcina mazei; identical to SEQ ID NO: 41273

SEQ ID NO: 41345 - protein, 524 aa, Methanosarcina mazei; identical to SEQ ID NO: 41305

SEQ ID NO: 41346 - protein, 251 aa, Methanosarcina mazei; identical to SEQ ID NO: 41271

SEQ ID NO: 41347 - protein, 1465 aa, Methanosarcina mazei; identical to SEQ ID NO: 41272

SEQ ID NO: 41348 - protein, 359 aa, Methanosarcina mazei; identical to SEQ ID NO: 41273

SEQ ID NO: 41349 - protein, 524 aa, Methanosarcina mazei; identical to SEQ ID NO: 41270

SEQ ID NO: 41350 - protein, 214 aa, Methanosarcina mazei
MKFEKENLGIAFDMLYQMLSTGSIERFVYPKHFMRYEQESEIREALDFCAEKLGLYVCGRGDSIFLSAGVGNRVFGYTNEDVKNELGRGFKNPEMYTVFFIMNVIVSEFYKESFHDTLRINLPKNYLIGIIEAKIRALSDFEDLDKISEEYKFNFREIKDLWDSLPNVEFRDDSDIEIKQKGTSSKTAIINQIAGGHPTLKDGVCFGPPARLFW

SEQ ID NO: 41351 - protein, 359 aa, Methanosarcina mazei; identical to SEQ ID NO: 41273

SEQ ID NO: 41352 - protein, 524 aa, Methanosarcina mazei; identical to SEQ ID NO: 41270

SEQ ID NO: 41353 - protein, 251 aa, Methanosarcina mazei; identical to SEQ ID NO: 41271

SEQ ID NO: 41354 - protein, 1465 aa, Methanosarcina mazei; identical to SEQ ID NO: 41272

SEQ ID NO: 41355 - protein, 359 aa, Methanosarcina mazei; identical to SEQ ID NO: 41273

SEQ ID NO: 41356 - protein, 524 aa, Methanosarcina mazei; identical to SEQ ID NO: 41270

SEQ ID NO: 41357 - protein, 251 aa, Methanosarcina mazei; identical to SEQ ID NO: 41271

SEQ ID NO: 41358 - protein, 1465 aa, Methanosarcina mazei; identical to SEQ ID NO: 41272

SEQ ID NO: 41359 - protein, 359 aa, Methanosarcina mazei; identical to SEQ ID NO: 41273

SEQ ID NO: 41360 - protein, 502 aa, Paenibacillus riograndensis SBR5
MNWSDFGERNKRLNPLWTLGAGMNLGELQPYKEMVALSVLLQVYYLELESNEQRSREDIVELAWSSLERFNITKLGTAESVERLVDGLLWSGSGGDFEAYYYDDLSRQMAVQKYKYFTVDEDATRTSWEESGKTVYRLSEYAMELIFMSHEIIEEFQISIKLLEIQMHIKHGRVTRAMQDVGELISRVRKMTQQQQEYRNALRRNPKHMFSEYGVLRHRRLEEIHLQFDEERRHFDNIHRSLARLANDEKDVIDFNELRQLSERVELSRRVHDELAEVVLSIFEAETNLRLNFPELFWGAGGFNFRTHIWEEWVKAEGLPDADSLELLIGGLFTPSQDFIYPLAWAWEEQEVGFLPEDVLDEPDEAGEEESIPYTPKSIPWSSVSELWLPVFKGLAEKGSFTFAEEAFTEEEQRKWSGTPDAVDLWAQFFHTEITVQPQDADSQGGAADECQKLIRHLLAANPELEVLRGKVLRTTIQGSHRPSVTWPGLEMSPYTITIIER

SEQ ID NO: 41361 - protein, 252 aa, Paenibacillus riograndensis SBR5
MNYSLEQLQQASRLFFDLLRRKVISLDDPAAAECLQDNGAYDALQYMAKEGGCRIMNSGHRLHLLVNPLGSGFASNFTQLRNKYSRIERKTHLHIINIIILVFLAEMDQDEHHFKPGQDSMSYIQISDQVSSLFQAWMEMDSEGGFSRQWRLDIQAMHKVWTSLYMQTKSQEEADSLSRGAGSRIGLIHEGMKLLEEEHLVFISENEKRIFPREELYERMRYLYHDVDRYKELKALIGRTLTEKEGEAHAAH

SEQ ID NO: 41362 - protein, 1498 aa, Paenibacillus riograndensis SBR5
MPRIERIRITGLKYEKMLKKYDDMVLDLSNEDGPANTLITLMNGGGKGVLLQSIFQLLIPKAAWGKDNENQVEAFFHNHKKQLKPYTFHVAIEWRLDNSDRNEYMTTGIAMTAHSSVDQLEIKVDYLLYALLDYEEHAELTLSTLPLYDIDAGGPVSFESIQQFVRDHRGEMASFGSHSSDLKKYYNFLAERDIHIGEWRNMRRINGEEGGIKGYFQKNDAFTNQNLFEKLIIPEIGTSLNEGLPEQEGSLQKMFMDAAIVAQRLPMLEQREKAFAEFTGLAAPLHELVKQGTEADLHYRETELLGRQMYTVIHDELKTAEEGRRKKADELVQLHQESRQLRFEADNLNYLRSKAEADRKQEDFQKISDNQIRARQRLEDSKAKEKELETAHYLARRKLQLRQMEQWQKEIEAIEGSLEMKERQEVVQAAKEELRQQWEQVYKLWQGRISAFSRRQQSLSAEEAARRKERESCLLELGGLDSRIHELTASIRQYTEALGVFAARHGQEAAHSPAASLQRAIAAAKGFAENIAALNERRKAADEDRFRLHTKHTQVSGKLLAHEQQEGELQEQLDIQLNRESQLWSQLVVLLELYEEHNRLGATGLFEAKAVVQERFIRRLDEAEAQTKRLRRDYYHQLLDVELQHEAYWLPNSDLLTVKDRLDALKISSMLGSAFLNDQPYLIREEELDRHPLLPYGLIVTEREAAKLQPGMLKDLLLKSAVPVFIREQMAQPAEQPFLLLGGQGPQMVLQPDRFLEWKQGISARLKDQEVELQDAEGYLAKLKSARQEYERLFQGEHSISLKGKLKALNGLQNELRISLGELNTEISENAAAIGVIVREISECEAGKEEHEEKAAALREWNERTHKQEQDYKDKQKAVDRRSELNKEITGKEQQLAQLKAELDSTSLERERWVGDTRYSLFPRLQTWFPELVYPAGLQASSTQHAEDQPEFPLDASIQDKLLQILSTLESLQQSLSRNELEIRTRAAQIKAAAEQLAELEAAVQQIEANWRNVPEPNDTPDAIMAARTRQKSDTGMLDEDYQLVRDSFVRCQTELDHLQKQLAKAEKAIKEKHERAVELWNEPLDPKEDEIRERSRENEYALNNCKQTLASLDQWLQTLASQSKVMETHVEGRLQLRDIPEEVQLRTREDCEQAVAEWLLRSKESRSERSEISRKVKEEKTSLSGKIAKGGWNAELETKIQERLNTVHWEDFSIALQVLDSMLQSSQDQIESIRSDKEGMELSRKMWVGRAAKRVVQIVDILKRMERRMIIHNENGHAFPLVRLNYKNINVPKTTEDIEPLVSDYFNRCISSLLEKFPKIEQVPAAAVKDLISDGKIVYAALQNRFPVLQVYKPVTENYFLYAAPEEYHYSDWEVINRGALDEAVGSGGQRQSVQLLVAMMIMTHKRVNRENKGWTVFLYDNPFGEMVSNNVLDPVFEISKALRFQWLIVTPPELVKNDVSVRFGVYWQLYFGGEKGDMLESTLIKGGRKLIPASLF

SEQ ID NO: 41363 - protein, 356 aa, Paenibacillus riograndensis SBR5
MKELIMEVIERKYGAVRRTRTKLKLEKLEQDIIGTYEYRSDYVDAGGFSTFQAGMKELLAEKYLIPLIRPKKYKSSALDEVYWLAETASTTGGWNEASMLRVLAAHPLNLDYYINHPAEQTVQVWEYIERIYTFLRTAGEREIITREERSLELFDDEKFLSEKEGAQLLKRLGITLETLKAVTVREHFEYYPESLQSVRSILISENHSFYDSAKRLIKAGKSVCGLQPDMLIYGEGWKIVSSLMFLAELDADAQGASIGYVGDMDKAGWDIYGNLKLSYPHLKLNLALTVYEYMANFAKHTYPYANEQKCTAPHLEIMLQEVSAVPRLKLCIKRLLEDNKRIPQEVLNYEVMARLA

SEQ ID NO: 41364 - protein, 501 aa, Bacillus sp. SA2-6
MNESWEGFAQRMQRLNPLFELGRGMEVGELKPHLQTILMQVLLTIFYRELNDDDQRRKSDIRYIVEDTIKQMKLLADDKQMDRITSGLLYQGKEEYSKPFEALYYDEIRQSWETQVFRYVTMDELYTNLEMGSSIVYKLTDVAQEMIFMSREMAEEFSITIEQLYSMQLIKNGNFRKATRNLDHLISRVNRLMANEFTFQKEMINNPKILLVEEGMQRADNREEIEKQFEEEKTHFRTILSMIEKTKQRNEEDFIQRELAILQEKISHTRQLHDRFAKLVIQNISNEIKLKAENPSLFWENSLVSFREHYYENWLMKEGAHSLDTIEKVLAPLFSPKNEFILPLDWIWGEQEFNEQQLADVVIEEETEDRAPTQRVTNWDSVIKAWSYVFQYLQTYGEFSLMKLAELPMEVQDLWFEESESIDLWMMFDKKPLKVQVLHRKEETLSDEREILLFKLMMEYPQFQMFEGLKLFTQFDSQAEPFLWHQMKITPFKICVQEERG

SEQ ID NO: 41365 - protein, 248 aa, Bacillus sp. SA2-6
MNAERIKKASAVYFTLLKEKVIDENSEHFQIYFDPEVRQTVLLLADESGTYIIESPKRIQLVVQPTGSVFATNFTHMKDKHKQIETKKHFHLISVIIMSFLAGIDRNQAAKIRTKREGISFYTLERQVNDLIMNWDSILKNQPGFGEEQKIDAKEVVTAWKYMEVDTEDYGLKKGNRRTRIGLIASAMKLLETEGLIYVLDQADIPKAIPRQELFERIDYLYHDYDRYELFKKLVTPEEGEHAENPSN

SEQ ID NO: 41366 - protein, 1486 aa, Bacillus sp. SA2-6
MPKIHRIRIVGLKYDGMQKQYRDTTFNFHNDQTSTNGLIAMMNGGGKGVFLQTIFQILKPGTSWGKQNNRYYQQFFFNHKEQFIPYTFHVVIQWELDGADRRHLVTGGMFSAEQRISMSEDGNESRTLEQEAKILPNITFYTREFEKREEAALEHIPLFENEEVAETESLKDYLKWNGYDVYRDTKKHYRILDTYGIDRKDWDILKDINKDEGGVGKYFEGAEDDHSLFQKRIIPTVSQVLHRTEHQKNDLVEIFKSQASIAKDLPVLLKREQAHKEFLEDIVPFEDHLAKGVHHKEIVEASMKEGRQLLGALQHLKQYEEETLLSLEKDMEKLMEKQADLRFQKDNLEYAKAHREVMDWEKKLSEESQKHASLQKVALEKQERKEQLVFQALLKEWSENESSITALAQQAEKLEQNSGLEQVNERMEEIREEAAGQWNQSFQAIQEDVKKHVGYQKFLKKKAKELSRQDKHKTQEIAQLGTEIDFLYTQMHAFESKEAALIEEFGDRLTYDFKGFVDSLSRQIDDKKAKIEDLQAKEKASSEKQTELASAKGTLVQSIQHCEEKIKELKSASEEQKQRETKLADKLHGLLDDAGTPFTRSLLSKYSLKLEEMLDHNRQQAETLKKELWETQLDDSLNDEPFWIANNDVKELKEWIDEKTGIDVFYGTQFLQSLSPEDLANTLMAHPLLPYGLVVNQHQWQKINVQVLSGRMYKSPVPIFMREEMNKEQHSSSFVVMNGTEKELLHEKNMFTQWKIKIAKLIEDKKETLVEMEKTENSLRAVLKEIDRFLSRELSSEIEKAVIEEQTLLFSTKAKLREINAQVDKEKEWQLELKDQREKATRKIEKLTKDVQTLEAFEEEKTLHQENKRVKAEKEKQKDVLGAQQAEINAEYENIVETQTSWNETYLEWKHAAEQSIKEISYFIKEAAFPSGEKAELSEEGPRLSSNVLAELIGSVEELKQLQKSKEEQARELLVIQAKIEGEQKQQKKLEKKLHTHNEDWKDAPEPEEPISMLENMLQTAQKETKAAEKEEREQGTKVTVAETSLELAKGQREKSAKKVAKHERKPEEWEDLDLEIKAVEIKDQQKITKDEIKQTETAQKETEAKITGYEGDLLTLSVILKEEAAPFTDDDLETIRNQGKQSILSWCGEHQAIQEEGQEKHAKIEQSLRNLKLMIEGKDWEVRFKNEVLTTLDHMDTRHYHHIQSVVKNMKRFSQSGLEQLERDKERAEKAQNFWASRASMKVMGISEGIRSMIAKMKLKNERGTFPLVQLKEDILPKKAEDIEPLLKQHFVSAINKITRKYDTIDDQNRELDQEIKQLISDEQILFVSLRNRYPELLVYNMRTDNAFMYGKPQREHYSTWQTINQGSRTKSDGSGGQKLSARMVMMMMLLSVKGESNQSWVPLICDNPFGQAASAHVLDPIFAVAEKLKFQFIVVTPPELVKTEISQRFESYYKLDFIREKGKEIVSDTVVPAFRIYQSEEVVQ

SEQ ID NO: 41367 - protein, 354 aa, Bacillus sp. SA2-6
MNIIETRVRGFIADIQHPKQKKKININDLEFQLRRLLDNYFEMDGYSHFYAAVQNLQEEGILIPIQNNQYNGRTPGLPLYYWVNLKVREAKWDRLEMMKLSDVFDFSFYERHPEWQTEEEWTRIRNVYMFLQSSQERAIVSLEERSLELFGHEKFLMDVDRFPEGKGFLSRIGVSEEQLKIVKYGEPFVFWMKQGKEIKDIQRVLIVENLSFFHTSIQLLEDNQLDYEPQLIIYGEGAKIERSFSFFFRMFPPKPYLFYYAGDLDAAGYGILIRLMDKYKDCCIQPALKIYRKMMECLEQGNDQKGGQLQNLRYRDAFFGWFTEEEQALLQQLWEENKRIPQEVLTIETWRRWM

SEQ ID NO: 41368 - protein, 226 aa, Paenibacillus durus ATCC 35681
MSLEEPESLHSNLPLGAMERLSAVLSPDEEYAFVQIMFSSSAAVRSGSFGLSRREVMKILKLEPGDEQGFASFVKRVNQSVARYYRLIYDERRDRAVVLIHVPARQARELLSSESLALLMFIFYHQEVLQNDYTLFTQLLEAFGHESLDVRRKILANLDTLIKLGAVSRYENPSNEEAYALTAIGARLFSDSYLKRFAEFSHSQQLNMDDVLKFFKRYNLEAGEGY

SEQ ID NO: 41369 - protein, 1077 aa, Paenibacillus durus ATCC 35681
MNPWALEFSGIRDFSDTRLEWGGPEDHVLIGGPNGSGKSTITFCLGAVLASTKVDLEGLRSRNLPPDRVWRATIQLIFANIGTSPVDAAAYIGFRLNLEQKPGDPLRKEYFICEGNEPWKWNKETRYTPGDSTNHLHEYRHQLQHKYKVDPDAFYLIWYQQDVNQFAVMRPEERFRIFSEMTGIERMQHNWEKVKEERKDAQSALQTAESNQHSHRLNLGNWQQERDRLISRNERRRLGLKSVLTASAALERLYGREQELLKEQTDELEERHTDELDRRMKLEEEHQAYLKELEERTRRMEELTRQLEEVEGEASKERALRGQLNDEYRQLEDILRELDKQMRAIPYSRAEVEERLAQDRAKMGDTEAKGRETEEAYKEAQTHLDWLAAEIGKLEYALEEDFRRLGDAKKMLAQYGGSAALEREAESLESKRSSLRDSGRELELSIRSLADELEALTKGTGMYSLRQEASIRRLRGKGMTVYALRDLLEMDEHIPLEREDQLEAVKYTLFVDARGFAAPTDVYHVELPSVVPERTADELALLGLRVKKDLDDQTYAAAQKALWWVGELVSGSDSSRPRLKNGQLVDSLGRRGPQEDKRWILNPRGIKLRAERARQELGKLELQLEAVRRNLAECEERLNLIRSVLQLIKEAETVVGAVAERDLRGRELDRKAGEQRKWMDIRNRSAEERQRLNLASAELAVRLEALEGYRQVYDRADQESSKIERFGQLGRELEASGERLQGLERELQDLLAESDRLDRSLESTKRRIREKHQYIEESKKALEALGREKQEQFERLEVIQENRAAERQFYSDWTDRLRVVYAGLLEESPDFPDVPDWNPAQAKSHKEDALVQLNLALGETVDENALENYEKVKQEFERGEQEVQDARMLLRQLEESLAELEEKLVSTTNYEIKRVGSRFVRYMDQFSFDGEVSWDMQEMKQGNIKYYLNIKARKQGHRGPLEEVGMKGRGGRVGKGVSGGEESLSSLLFALALLKTIQAEPGYIVLDEFDSALDEGRKSKVFALYEQELSRKMIILSPKSHESDYLRHFNEAFVVYHDARIPKSAVIRIKKKAENKV

SEQ ID NO: 41370 - protein, 472 aa, Paenibacillus durus ATCC 35681
MRGCKSLLNTEIIDFICTHYLSKGSELEQATLSESGRRFEIDIFKAGSRTRRRIGKITGGHTDTDLAHENSVPEVLERLFHSPRVRKSERELLREIRDASLCNGGLAEGWIMRKDRYESDGKTVARTEYVMGYTLYIHLERKRRRAQEREKQTIANWNARLGTILEERNKVPDGRIGKENRHLLWNFIEDMAAKLEHCSDYKAVFKVIWNKEQPWQGRKLEFYVDFIIALAEIATARAHFDWKEIGARYYREIGGSKRFDPYKADFLEAAEEQIGCPLPLIGLCSAGTVTPIYFAGELSGRGGFAYPQGFLHAVTDVTVWKTEFRTGCHTLWLTENRAVLTRMSAEPDFLLNSGSLIIGLDGQLRSGHRKLIKDVLTGSKSIGQVIVWCDGDKSGLDIARNVHALLDSASPEAVKWILPAAGDPKGNDPRSCLFRTWEAYEAAALAGLDRNEADEQEAEMGDTDIWNMWMDL

SEQ ID NO: 41371 - protein, 488 aa, Enterobacter aerogenes; identical to SEQ ID NO: 40647

SEQ ID NO: 41372 - protein, 1478 aa, Enterobacter aerogenes; identical to SEQ ID NO: 40648

SEQ ID NO: 41373 - protein, 347 aa, Enterobacter aerogenes; identical to SEQ ID NO: 40649

SEQ ID NO: 41374 - protein, 488 aa, Enterobacter aerogenes
MSLGFLEQARNESMARRELTIQSHALLVVRTLDSIYSALQRNPFDGFKLDALAAIMYLFDAMLYYADRERQPGMTRKEAELCLVGHLNEAYPGQDASDYAQVASKIFAAIKDPFRLSYYDFSQRTHSEEQIVRLVRYDQLSGSDDILWSLTDEGMLFYTLRLDETPIERAAILAWRTLKTIRRGEIDKAVHQIQSTQRQLEQYLIGMRMKVRAAQSGDLSASYAHDIRPVLNDSFDKTREVLEHIQNSMSAITEMLVEGSSKLNPDKLNKLRKAQEIFAEVCAFTQRYQDCLLDVNKDFERARLKLIIPRDNTLFRETLEKGVLKPLLSHSPDTVEKEIDGLTARLLAPRRQDDDRHILFDPEALLNLYLDRFEQALPHEIRDPTEQPVAIETNLRNIPESVIKKCSDWVSDRLKNWGHVSFRDVFDAYECEELSEQEQQVCLLHIGSLAANSDPAIEVEIDDAIETTLWRADNIKLLTVAPLHPFEE

SEQ ID NO: 41375 - protein, 1478 aa, Enterobacter aerogenes
MWLIKRVYMDGAGHEEAFYKDLTLDYIGLSQAVGSPVVEGLRSPVRNAKVVTSTYQQLVNGGGKSTYIALLLSIFEPSVSDFTQYLANHRQSEYHYRNYFYKELSVVLVEMVNESGQTLLLGHAHQRNGDDVDRTLFICDAPDSLMGAPFDEVPSYSRAERNSELRPYANSLRSFDSWLNLKADSEGGMHWRKTTRQNEWRAFLLEQQINVDLIKTMVTFNSEEGGLTRFIEYKTEHDFLGAFFACTMSKDAAERLRELVAHEVERQGELEGIRRNESFLKDVLANWLAFLDPAKQLESIQAQQQLLDDGFREAMRDLAAFVGDVQVEQTQLEDNMESLQTHIFQTMSLREQLGKRRALLEYDLAQHQFDKQKAIVDALQDEADINQRQIEITHAAIDYKAYAKALNEYRQADEDLKVFRSETERPLQVIFERTAGEALGTLEWAIDRHRQQEATLEEELGQMDRESNTLKQSYDELQKMLGGLEADRERYKRDKQQGESQRGQLCEAGLIQKDETPVAAQYRLELTLRDAQQSEELANTILHQKEQALEAQLNVVREASIEKSEAQQKLILAEQKHQSAVDSALVLAKTYQKLPTSMQHDLDIEDTSWHSELCGLQLDKVLNANSHTLNGMKERLLQARHELDELRMTGHELVAKQVNEALEAFYAAGIARDKLWTFPHYLASVYNDDAQKIAAVIDQNPGRYLSLVALDNVTFEQVHKISEILPWKKAPIAIYLLDEAQDLRRETSELVQVVLSNHDKHGYSQAAYEARLQDLENIVASQEVSVKAAKSAFKVLESFRNEWRLHYEQYGKHWAGLLDQREQALLILENADAVLKQAEHDEQTLRDEKTDAQLRLNNAQQQKIRAEKAHDKLSLFVETEWAKRETAIMKLEQLAAQIQRSKDTICTQKERLERLNEIEKNKLSEKTLLNIQMGNWSNLCNEPFYSEITATEGMAGRSPEDAHEMAAQAHKKLLEAANGDQVTALKQQLKDAEQAQRSASERLTAQPTYNTYPDEVKAAAINELTVINNRIVRLKEQQKQFTQNLINSQVTLKKFSQSCEEASKAIDEDFVWEEKPIEIETIQTSLAEIVNSLHEIEYKLKLQLEQKKLQLQKMENVKERLQNAKTAQAMIQHITSSSAAGLPGRILNITEYAQDLATQCQMYAGLNETLKQQNIRVSTVWGKFRKRIEEELAKDPNARASQEYLRQLDSIATYHEVLGDLDRVGTGITQVFEAVQDSLEQFQRSIDLTVTHLTAHLEGAIKLLKRAMSVKIPEDCPVLPGRPIIKMTDRLNDVAADLRGFASSRLQQWIAKGQIPRAPNRDALTADLVQSVFGEGELEVRLLKTNASRPQWTPVTRLEGSGGQRLTSAFLLFVTVGKVREYDTGISSAGFLLADNPLGKSNADDLMRIQTQMAKAYKIQLIYLTGISDENAQSMFDNHLFLNKVQKLRRRDLVTVDKERHALWAASLAAKPQFDPVI

SEQ ID NO: 41376 - protein, 347 aa, Enterobacter aerogenes
MIWLSRLESTANKHRLAAGKAARTVKANAVLDEVLRAHNQEALSQEAPDLLSQAVTLLLERDWRAQPKHKASWQRYWRGMSLPSAFVYEGAIVPTKTTSEIAWHPWLARRITGQLTQPIKARLQQLNTYLFRQTEGDKSLFPGLLGHRERSLLIFGDEKALDSLPPDGWKHVALTLADMGAVRCAPPLPYESSCCHDLPAIIVENSDVYYRLCQLNRVQTRWSLVIYGAGNKVSGQAECVSQLLEVEQVKQLLYFGDLDVAGLKIAHQLQCKLLSDYGISLHLDEWLYNELILNGLMTPEGNANNERFDFELQCRWMPQFVLREMKTLLAIHRRLPQEGVASLGLVI

SEQ ID NO: 41377 - protein, 488 aa, Enterobacter aerogenes; identical to SEQ ID NO: 40647

SEQ ID NO: 41378 - protein, 1478 aa, Enterobacter aerogenes; identical to SEQ ID NO: 40648

SEQ ID NO: 41379 - protein, 347 aa, Enterobacter aerogenes; identical to SEQ ID NO: 40649

SEQ ID NO: 41380 - protein, 501 aa, Paenibacillus etheri
MNWSDFGERNKRLNPLWNLGAGMNLGEIQPYKEMVSLSILLQVYYLELESNERRSKEDIIALTWTALERFNIANLGTNESVERLVDGLLWSGNGGDFESYYYDDAARQMSVQKYKYFMVDEDATRSSWEESGRTIYRLSEYAMELIFMSHEIIEEFQISIKLLEIQMHIKHGRVTRALQDVNELISRVRKMTHEQQEYRNALRRNPKHIFSEFGVARHQRLEEIHQQFDEERKHFDNIHRSLARLANDEKDVIDFNEIRILSERVELSRRVHDELAEVVLNIFEVETNLRLNFPELFWGAAGFNFRTHIWEEWVKEEGLPSGDSLELLLSGLFAPNQDFVYPLPWAWEEQEVGFIPDVVMDELEDEIDAETIQYIPKGIPWAEVVELWKPVFYALARRGRFTFTAEAFTAEELTRWARTPDAIDLWVQFFQSEITVQEQAPENSNGSDECQLLIRYVLADDPQLESLRGKLLHTSIAPELTPRVRWSGLDMSPYTITIVER

SEQ ID NO: 41381 - protein, 252 aa, Paenibacillus etheri
MSYTLEQVQLASRLFFELLRKKVIPLDDPAAAECLQDAGTYDALQYVAKEAGCRVMNSGHRLHLLVNPLGSVFATNFTQLKNKYSRIERKTHLHIINIIILVFLAEMDQDETHFKSGQDSMSYIQISDQVSSLFQAWMQMDDEGRFSQQWRLDIQAMSKVWTNLYMQTKSQEESDLLTRGAGSRMGLIHEGMKLLEEEKLVFISESEKRIFPREELYERMRYLYHDVDRYQELKKLIGRTLAEKDGATNAAN

SEQ ID NO: 41382 - protein, 1493 aa, Paenibacillus etheri
MPRIERIRITGLKYEKMLKKYDDMILDLCNEEGPANTLITLMNGGGKGVLLQSIFQLLMPKTPWGKDSENQVEAFFHNHKKQLKPYTFHVAIEWHLDNSERNEYMTTGIAMTAHNSLDQQDIKVDYLLYALTDYGEASELTLSTLPLFDEENAEPTSFETIQQFIRDRRGEIVPFGSHSSDLKRYYDFLATRDIHIAEWRNMRRINGEEGGIKGYFKKNDAFTNHNLFERLIIPEIGSSLNEGLREDDNTLQRMFIDTATVAQRLPMLEQREQVYTEFLGMAAPLYELVKLGVEAESVVQETELRGRQIHTVIHEEQRNVEEERSKVGNELAGRYQDAKQLRFETDNLKYLRSKEEMELKQEEFKKLSDDQSRARGRLDDSKTQEKKLEVAHFLAKRMLHTRQIEQWQKEIQAIEGSLEMKERQEVIQTAKEKLRKQWDVVSSLWQQTIRGFGTAERALTTEEKGLRKERESFLQELAGLDIQINELTLSIRQYTEELGTFAAQHGQEAAHTPAAALQRTISAAQTILLDMEALEKQHKEADNRKLALHKNHAELSEKHRSYERELDELGVVLDSQTYKESQLWSQLVVLLEMYDEHNRLGATGLFEEQEAIQVRFIRKMDEVEQQTKRSRRDYYNQLMDVELQNQSYWLPNSDILAVKDTLDSLKIQSTPGSSYLNDRPYLEREEELERHPLLPYSLIVTRREADKIKPDLLKDTLLQSAVPIFIREEMVASDPVSFKLLANQGPQMVLEPDRFLNFKSGIQSKLKEQEQVLQDAEAYLSKLKSVRQEYERLYQTENTVTITAKRNTLMKLQSELQLSIISLSNEMDENESTLARIGRELIENKALSAEHEHRAAALQVWIERTKKHEQDQKEKKKYSDRKSLVSRELASKDQQLEHLEAQMVSLGGEREKWMGDAKYALFPRLQHWFPEIVFPTSHQLADDMEATPIDPVEQNLLLQQLSTVESLQQSLTENELEIRTRAAQIKAASENLTELEASLNQVDENWRKVTEPAESTESIMAARNRQKSETSSLEEDYQMVHDSFIRCQTELENLQKELRKVEKGIKEKHERAVEIWNELLEQKEADIQERFQENELMLNQCKRSLERMDALIQTLSNQIKIMNAHIEDRVNLRTVPEELMLNVRESCESLVADWLLRIKDSRVRRDEVSRKVKEEKNSLTGKLAKNERNSELETKILDRLNTVHWDNFAIAQQVLDSMLRSSRDQIESIQSDKEDMDLSRKMWVARASYRVVQIIDIMKRMERRMIIHNENNYAFPLVRLNYKNINVPRASDEVEPMVSDYFNRCIQELLAKYPKIEQVPTPIIKEVINDGRIVYAALQNRFPILQVYKPVTENYFLYAAPEDYHYSDWEIINRGALDEAVGSGGQRQSVQLLVAMMIMTHKRVNRENKGWTVFLYDNPFGEMVSNNVLDPVFEISKALKFQWLIVTPPELVKNDVSVRFGVYWQLYFGGVKGDMLESTLVKGGRKLIPNSLF

SEQ ID NO: 41383 - protein, 359 aa, Paenibacillus etheri
MRSILMNALEKKFGAVRTGRSKVELDKLEKEIIRTAYETPAEYELLGGGFRVLAVAITELVAEGYLEPMKSSPMSYKQPSIPTSYWLSKSASAQARWDPSAVLRVQDLLDLHYYLIRPETQTQELWSRIERVSNFLRTVKDREMITIEERSLELFGQEKWLSDPEGKQFLTRVKLTLESLKCVNAREPFIYYVKPAVTVRNILIVENKSFFHSAKRLMLNEMMICGLSLDMLIYGEGWKIDSSLLLLEELNIDPLQTTLLYVGDMDKAGWEIYGKLKVSYPNLNLRLALPIYEQMMKLTEEPYTYKVPQTCNPEHLYNVVQELSSNLELLAYIERLLKEDLRVPQEVLNYEVMARMAER

SEQ ID NO: 41384 - protein, 488 aa, Paenibacillus etheri
MDLPLISIFQTNESKPEMHQALRDVALLSGVLNDLNSQNFLQTPIEILRFLRIIQLINEEALGLDEPIENADTLYFRYRNRFDDIEPPSKKKVDQIVNVLVKYNWISKQTRQLKMRDVGKRMMDTLIRLANDSLAYYMHDDIGRSLFQARRDAELSEAYDDHGISGGNKIASMIRNVENAIQLMKERELELLADRNALPQLEIIHQLMQELEIKLSERFRQFYTLEDSLVLSNLMQSGTSALADGTNLSMGMINKYLKFTMMKQTMLLSSINPEKVRLFITQMYDPPQESDIPNAYQIMSFMEQNEYEGESMDGLWIPIKFAAPLSGEAIGEAIEYLENYEPIVELMQEDDQEIQYINEEIDIALLEDMMGETEWLLTKSMIETEAIEVFMKEVEAAPIETVMIEATSTAWGDAINALTALSALVGSKKLTLEEAKDESQVQVSLYEKEWDWMSRDDSNQVVKHKNYRIIENKDIDSMQERSDDELDG

SEQ ID NO: 41385 - protein, 226 aa, Paenibacillus etheri
MMNLMDEMNVNPLNAMQAIKGMLSEDEEIVFMNLLFSSSATIRAGNFGLSRREVEKQLKSSGDDEKFDSFLKRVNQAVSRYFQVIYDEKKDQVIVMMRVSAKAARSTLSKESLAILLFMFYQQEVLQHEYTLFDQLLNALGHETTKANQRLNLNIDQLKKIGALEEYDTNSNEKAYAITAIGANMFSDSFLRRTVEFSQSNQLNKEEVLKFFKRYNLYQEGTDQIE

SEQ ID NO: 41386 - protein, 1073 aa, Paenibacillus etheri
MIPWKMWFTGIRDYQPTEMDLSGKESHILITGPNGAGKSTVTYCMGSVLYSSKVDLEGLKSRNLLPNETWKAHIRLLFKNEGRMRIDAPNYVEFAIYILQEPGQPTKKQFVIKSGDDPEQWDETIKYTSGDRQYNFTTYKKDLQFKYKIDPDLFYLIWYQQEVNQFAVMDPQERFRIFAEMHGIDHVQRNWEESMEQLKDVQESLRSAEASVENKKQYLGMARSALDRYEDNRKRLIEGGKLYAGALLKLEIYYKQEQLNLVAMEEQLLVDHDIASDRLVTLQKQGDRLNNEMKQIQEEKEKLDTKITLLQEQLASVKKEIEETSIVIGELEIQLKELSQEKSRITHTEEEVHQQLSAITKQLNEMNIEIEKTEASIQESEDIIAQLIDSSSYLKALIQQDKSLDLIHQERLRQYRSSHDVQMEIDRLDQSIQLSKQEREDKSKLLEELSNEERMLEYNQLWSARQRESLSLFKAIGVRAYTLNELLELNESARLTAEEQFETIKYSIFFDGSHVQAPNDLYHVPLRSIIPDRSVTEIQTLQIRVKNGIEDDVFPHAVKALWWVEQFFLSGETRIENDMLIDSKGIRGAQEKKSYILSQKAMQKRKEEIQKKTSELNTSLANLHDSLEIDTKTMQELHAIIQSVRESEAFLTMKHEREGRILKYEDEIKHLQEQKEHSQEFKATHTKFIEKRIRLEHTQVILQLEADFYVRLGQQKEQFEMLQRKTHRYNHLCLQQDALKQQNDTLEELAEQKDGDERRQKRNLSNNEDEFQQATRTLSQIDNQINDTKESLDTSKINLLTVTEEIENLKGIARFIYDEVTSEFEHEPNHAKRQQSLSKLRQEHESGKVTFNSARNESGIDPAASENYKVIKEEVQRLQDEFKRTSLLFEENQERAENLKDQLETTINMRVLEIQQRFKNYMSIFQFEGQIDWNQQEDRRGRVLFHLFIKARKEGHRGTLEDVSVKARGGRVGKGVSGGEESLSSLLFALALLQNLQTAPGFIVMDEFDSALDEQRKLKVFDLYAGELQRKLIILSPKSHENSYLDRFSKAYIVQHDPTVPRSKVMGLNLQRI

SEQ ID NO: 41387 - protein, 435 aa, Paenibacillus etheri
MQKFDDVLSFISQSFLKKDEQLEMQRTIGEASLIDIDIVKKTERTIRRVGIITIAREYTSIVEDRPDQQLLRWTVGKRAALDDNQQTFDWLHKGWILKEVRFKRDGKSVERIHYRMGYLLYVYLTNRQRDEHRDSINQFTQYQSNVAPKMEQIKYLHDERLHQLKGVASFLSDSLQWGLNDLDEQYIFPTNWSVSKRINALNFLLAFLMISSNKEIFDWKEIGAHYYPGIGGSKVFDAYKVEFLNFLETLGGHSLETLGMISGGQITSIYFAGELEGNWSSYRAGPVHALTSISVSQDHYSTRATTLWLVENRAVLTRISAESHFLQETNSLIICVDGHLRSAHKHFIRQLLLNSPIEQTIFWSDYDEAGLQIAGEMFQSLMGHAVRHKWICPDHSIISNWSEYQYNMESLLQYSKSEQEIVLGEAKDWRRWIYH

SEQ ID NO: 41388 - protein, 525 aa, Microvirga vignae
MDDRSDLHLEGQASTAAIQEDLLAYFGSRASPQELPVESPAAWSDDLLAARGAARRDTPAASLDLKRRAAGLRYVQPLADLEYSLSKVASEHKMELDGYRIGLRLIRDVALLNTFDDGPTNSQLRGMIAEAVFEQWPDISHPVLVQLATLTLQILENQRSKEVDKRFEVNVFDPISRTIEKLRFRYLEYTRSQSGEYRYRVSDEATLVYGALADHDLDRDLQGALHKLVEEAIRHGQMERAERISREARGLARRIYLRIRHLISDLLTNARAVSWQAELQAPVEDARSHLEKRITDHERLREIVIERRGEVQETETAARLDQFMEDLEEERNAINLLLKELNSAHQKFMDAQAAAFRFRRRAHLPDPKEVATSLLTMSVEAMDRTIPGILRTMAPIDPIRFFDLDRLLVALRDQVEQDIVPDRMRQVADQPVGSLSSFSAEERDEAQQIVARVLAEPGDLTMDDIFARIDARASSIRVRRVAGMLLYGLYGMGARKARRDVVIDGQFENDLFEGKRLVFPLRRTS

SEQ ID NO: 41389 - protein, 1439 aa, Microvirga vignae
MSHIRRIYLCNVGQATSWRPPQIQKIFKPEIGLEPFTIMELENGGGKTTDISLGLATFEPSFRRFLPAIAKEDSDGGQARHFSDYFSEDGLPGMVAMEFIVPSTATADRIVIVGYVVTRREAEGKGQFRRDFFVIEPLPDLVTADVLATLPGSGEEDAYPELRSHRDIQAWIKHMRGRGDIVFDHEDGQDRWQKMAASHGIDLRLLGMLVDVNRRESNGDMGFFSYRTEREFLTALTGSLFEEDELASHYEHFSQGIAKIRSMEPRQAAMEQLTVLHDNASRFSRAAREYNSAMKQREDSTVSMGRIVARMRATEFELDGQIQQGLQTIDHLTLERENASERYEEMQGQSEGSWSTFYKLTCADAAERHERAIGAVTTVKREIAALGLVRLLAREAKTAEDLRDVRNKLQEQEEGLRPFIESEARARGVLIAILCRRKVSLQDQRQAADSERQNANAETEQSRDASRALVKRRQDLEGQKVRSESDVAEAERARSERIADGHLQESETATGAIKRIQAEEEAARIALSEWSGAIVREREAIASLENVSGELHAKIEEARQRKTQIQEALRGEEHLRAQCNMSEEVTRFLEGPVDPGLPRLQETLRERAEDLQRKILAGEIVLRRKEDMAKAVEAYGVAFDRPDAQRILEALHRAGLREAKAGGFWLSQTVLDPTKARAIVDADPLRLDIVVPTAADLAKATAILERETPDILSHVAISVARDVVPDQDPERIIVGPQDDAAWVRSSAVRLAEDTATERQRLSAEGNRLRIEAEAFVRIGALVETWMRTYGPRWVDDQRAALDAAETRIEHLTGEADQVRQEIAQRTQTVGELQDAVREYERKTEDRRQALKHLLRLRDIEAKAATARERLAEIYAEISGIKEQLEVVEHRIAEWAAIERTAFERSVKLGVSLKEIDAKLVRLGDAATPAEVPDLAVEDAEASWVRQKEDLDRKRSGIDPGLTVRESSLVENLEAIQSEIADFCNREGITRQDGMRFLPEAHVLDDLTERARKRLASHDAEVRAAFRALHEVETAHDKFRQERKISRYPDLPYENPEDAQVAAQAFGAEAAAQLRRREAIDEKEKAVALLISDLRTQRTRVKDWSDNLPAGFAHILPDGHAIADLGAEMKHFKEMVEHRDRAIEAARKWKEDATEISQSILKQVTSDTFKSVDPMVAENIRTSSLEALLQSGDELEGLVFDRIASIKDDVENLHRQIDLLTDLLKRFVGQGFRMLRDVMNVRIPDDSPVQPGKAIVRFRTGIVDIPQEARDRVMATVILEMARDQRTPRDGAHLLVDLMLKLTGSDMGTQVLKPTLVDGQYDPYNKMTHSGGEKMSVGMMFFAGIARLRAKALRKPMRRCAVLILDNPLGALTSPDLWRSTLSVLKAMDVQIIAYTGVIDHNVHEMFPYHVVMGRFRTPDGSEIHVRPVDYQRKPLPEAA

SEQ ID NO: 41390 - protein, 356 aa, Microvirga vignae
MSDAIRLLAELRKGRRQTVIRAELLVCARSLFLESDKQLPRRLRAALEDLQGNGSIRLPSIRNKEAWDRSTVPPLPHQISLRAVPKERKQRSEAAWTPEFAFASRIQASAKRDALVAINDHFARNRGPWDRMVPYRIRSAQILNDEKAFDRLGLIEGNTICGQAPLSLIGAYNPDLPLVREDAAAASTTVLIVENAHAYDLIASLNRELSVYRSVLWGGGNRVTKRTISALSLRRALSACQANRIEYAGDLDPEGIRIAANLHAELAKEGMALHPASAIYRVMLEMTPFPMATQQQPVGDAIAWLLEEFRADSASLFEGGHRVAQEVLDVPQVTMALRQRIGDTAAKMTIRQSYPH

SEQ ID NO: 41391 - protein, 488 aa, Enterobacter sp. GN02548
MSLGFLEQARNESMARRELTIQSHALLVVRTLDSIYSALQRNPFDGFELDALAAIMYLFDAMLYYADRERQPGMTRKEAELCLVGHLNEAYPGQEASDYAQVASKIFAAIKDPFRLSYYDFSQRTHSEEQIVRLVRYDQLSGSDDILWSLTDEGMLFYTLRLDETPIERAAILAWRTLKTIRRGEIDKAVHQIQSTQRQLEQYLIGMRMKVRAAQSGDLSASYAHDIRPVLNDSFDKTREVLEHIQNSMSAITEMLVEGSSKLNPDKLNKLRKAQEIFAEVCAFTQRYQDCLLDVNKDFERARLKLIIPRDNTLFRETLEKGVLKPLLSHPPDTVEKEIDGLTARLLAPRRQDDDRHILFDLEALLNLYLDRFEQALPHEIQDLTDQPVAIETNLRGIPESVIKKCSDWVSDRLKNWGYVSFRDVFDAYECEELSEQEQQVCLLHIGSLAANSDPAIEVEIDDAIETTLWRANNIKLLMVAPLYPFEE

SEQ ID NO: 41392 - protein, 1478 aa, Enterobacter sp. GN02548
MWLIKRVYMDGAGHEEAFYKDLTLDYIGLSQAVGSPVVEGLRSPVRNAKVVTSTYQQLVNGGGKSTYIALLLSIFEPSVSDFTQYLANHRQSEYHYRNYFYKELSVVLVEMVNESGQTLLLGHAHQRNGDDVDRTLFICDAPDALMGAPFDEVPSYSRAERNSELRPYANSLRSFDSWLNLKAGSEGGMHWRKTTRQNEWRAFLLEQQINVDLIKTMVTFNSEEGGLTRFIEYKTEHDFLGAFFACTMSKDAAERLRELVAHEVERQGELEGIRRNEYFLKDVLANWLAFLDPAKQLESIQAQQQLLDDGFREAMRDLAAFVRDAQVEQTQLEDNMDSLQTHIGQAMSLREQLGKRRALLEYDLAQHQFDKQKAIVDALQDEADTNQRQIEITHAAIDYKAYAKAQNEYLQADEDLKVFQSKAERPLQVIFERTAGEALGTLEWAIDRHRQQEATLEEELGQMDRESNALKQSYDELQKMLGGLEADRERYKRDKQQGESQRNELCEAGLIQKDETPVAAQYRLELTLRNAKQSEELANTILHQKEQALEAQLNVVREASIEKSEAQQKLILAEQKHQSAVDSALVLAKTYQKLPTSMQHDLDIEDTSWHSEQCGLQLDKVLNANSHTLNGMKERLLQARHELDELRMTGHELVAKQVNEALEAFYAAGIARDKLWTFPHYLASVYNDDAQKIASVIDQNPGRYLSLVALDNVTFEQVHKISELLPWKKAPIAIYLLDEAQDLRRETSELVQVVLSNPDKHGYSQAAYEARLQDLENIVASQEVSVKAEKSALKVLESFRNDWRLHYEQYGKHWGGLLDQRELALLILENADAALKQAEHDEQTLRDEKIHAQVRLNNAQQQKIQAEKAHDKLSFFVETEWAKRETAIMKLEQLAAQIQRSKDTLCTQRERLERLNEIEKNKRSEKTLLNIQMGNWGNLCNEPFYSEITATEGMAGRSPEDAHEMAAQAHKKLLEAANGDQVTALKQQLKDAEQAQRSASERLTAQPTYNTYPDEVKAAAINELTVINNRIVRLKEQQKQFTQNLINSQVTLKNFSQSCEEAGKALDEDFIWEEKPIEIETIQTSLAEIVNSLHEIEYQLKLQLEQKKLQLQKMENVKERLQNAKTAQAMIQPITPSSAAGLPGRILSITEYADDLATQCQMYAGLNETLKQQNIRVSTVWGKFRKRIEEELAKDLDTRASQEYLRQLDSIATYHEVLGDLDRVGTGITQVFEAVQDSLEQFQRSIDLTVTHLTAHLEGAIKLLKRAMSVKIPEDCPVLPGRPIIKMTDRLNDVAADLRGFASSRLQQWIAKGQIPRSPNRDALTADLIQSVFGEGELEVRLLKTNASRPQWTPVTRLEGSGGQRLTSAFLLFVTVGKVREYDTGISSAGFLLADNPLGKSNADDLMRIQTQMAKAYKIQLIYLTGISDENAQSMFDNHLFLNKVQKLRRRDLVTVDKERHALWAASLAAKPQFDPVI

SEQ ID NO: 41393 - protein, 347 aa, Enterobacter sp. GN02548
MIWLSRLESTANKHRLAAGKAARTVKANAVLDEVLRAHNQEALSQEVPDLLSQAVTLLLERDWRAQPKRKASWQRYWRGMSLPSTFVYEGAIVPTKTTSEIAWHPWLARRITGQLTQPIKARLQQLNTYLFRQTEGDKSLFPGLLGHRERSLLIFGDEKALDSLPPDGWKHVTLTLADMGAFRRAPPLPYESSCCHDLPAIIVENSDVYYRLCQLNRVETRWSLVIYGAGNKVSGQAECVSQLLEVEQVKQLLYFGDLDVAGLKIAHQLQCKLLSDYGISLHLDEWLYNELILNGLMTPEGNANNERFDFELQCRWMPQFVLREMKTLLAIHQRLPQEGVASLGLVI

SEQ ID NO: 41394 - protein, 501 aa, Bacillus vireti; identical to SEQ ID NO: 40996

SEQ ID NO: 41395 - protein, 248 aa, Bacillus vireti; identical to SEQ ID NO: 40997

SEQ ID NO: 41396 - protein, 1487 aa, Bacillus vireti; identical to SEQ ID NO: 40998

SEQ ID NO: 41397 - protein, 357 aa, Bacillus vireti; identical to SEQ ID NO: 40999

SEQ ID NO: 41398 - protein, 534 aa, Desulfosporosinus acididurans
MAKFEFLEGFEQRMKLVAAIDSIINRTNRKMEFEKLFESGQLDNIIFSVLVFIMEKTLTEDEDCTMESIADFVAQLISAYSVSLTAEVIRKLTEYIIKDILQNGGEARYFPVMKYGQGMEQLRIRLIDDKLIDDPRGYVLNYQLTDQGYDLLFRTKEVEQEISFTIEELKLRELIKRKNYKKAIGQSANLVQMIRQKKNDIRQFVQKVRENIYEVNIEEFERLVSSTYTLLEEEYSMMNEIREMIVLSEDRLREEEDTRGALDEQMAKARSEIAVIRRNINLTISEQKELILERLSLARIYKETIADSFALSRARYYDFEQVILKPLENCEEENISSLWQLLNPLLRPNPDRSLNLLTLYERQARLKQEEEVLPSIVLEELGEDLELQKIKRINESNIEIIRSILEFAQQQRGSFRFGEFLQDLQSRERVLQELTADDLIFKTMLKLYDLQMIDINKWKSQQEDVVANATGELDVSYCLYQIEYSQPDLYGIKKLEITKPDEQLWEQEIATYIGKEMFSRRIVISDFMIEVSFE

SEQ ID NO: 41399 - protein, 233 aa, Desulfosporosinus acididurans
MSDIKTALKIYRKLLDKGQLDRETEGDLFLEFRNVEVRAILAEFEEELDFKVIETAGSLYLLPNSGNGVLGFTTKDIREAVATDARLVDGYLLSYISMFILYLFYGGRNRNPKQREFLRISKLVEELDKRFSMALADQEETKLMEENYALNFMRIAELWESKQDFEERGRKTKTGTILNTCRLLERENLLRLVDDDREIRPTKKLDDLMLNYYLDDSRVEEIKGFFEGVGQDA

SEQ ID NO: 41400 - protein, 1469 aa, Desulfosporosinus acididurans
MPRINRIRIINFSYNNDSRHIQDETFNFHGGENALLSLANGGGKSVLVQLCFQPIVPEIRIQGRRINAFFRKKRLPAYVLIEWKLDAAGGYLLTGIGMVAAEVSGVEDERNRVKYFTFTSRYTGSNDFDLANIELIKQSGNILEIKPFKEAREMIAEREKKDPYNFGCFYDDDGDRYRKRLAEFGIAQDEWRNIIAKINDHEGGLDEIFQKHKNSSQLLNEWIIKTIEKVIFKDRAEAHRLEEMLEGLVREVIENERFILEKEVLDEFLKVYGEQVVSLVELLNGLEEQKNYGAKLAAMYSYLDSETVKLNEKNEDNKITLDNIELERKRINLEDRSHAYWLRRDEYLLAASRLAESEEKSRENEEKLEITKRSLKILQAAGLRDELRVKRADLSGIDEKLKVSKSQFDTDNRMRNLEYSLKMATQEILQSLESVLTRLKEEKGEQETLRVQADKDVSDLGNNLRKFEGEKGSLQQQKLQYESHERDVRSKLKLSLSRNLLGELAADEIEKARFELKKKLEDLKNEGQQLTEERAGKEQRQLEADQEIQGVGEETSREKNVLHDLERDIEVYEQQEREIQGILQKFGFNFELRFDRVRLQAAFDQLLKDLNHSLEEAVRMRDDAKESLFSLNNGRLHIPEEIISLLADKDISYETGEAYLRNQSPEIRQKLLAANPVLPYALILARQDIELLAQAIKNLTLRRAIPIMAYEDLSLSMSLLADRWVQTAEGIFLVCLYEGRIFDHSGLEKLEEELKRKQKDSLEQYRHYTEERNEVVAKQTICSRFAFKADYRYDLAKKKTASEIKLQTLADRRDFLRQEKENLRITLQNLKQKIQTVIESQQKAQKAVELFEAWIEQENDYQTCRQRLTEVNEAIAGAERRKSELEASLVSFQKKIEGFTLEIEQKKIEVRDIRKKYNTYQDAQEAEFIAGTVEELEERLQALKAQYSGEIELLEKRKTELQSEGVKKEKELSKLGLSEGDYIEVVYDEGKLDEINLEISVLEEFNKKLQNKRFAATGIESAAKEACRIAEEEVRKLGAESPLGQEDIKGDFPGRRHKLAEQQAKLTEEITQISRKITDYNKLMEQITSHINKLKVEPEKGFRPEQDVKSQTGLLVERYRTIEAKNRTQGDGLRQKYSGLKAEYRDKNTNIGNIFKGLDQLWDKAEMGYDDFYYLYERLSLHQDKLRELIKLHENQLFNLERNKKDMVQQSLLQGMRFYEEIEWISDHSKVRLQGRSRPVQMLKIELALDSHDAAGLRMKDYIEACIAKVREETRQEKSEEEVKKAIAKLMYNRELLNIYLGNSNIPVRVFKIDLNMQNSSLKTWEDAMRENSGGEKFVVYFSVLSALMAYTRSRTLEAAGAEEDKDSSVLVMDNPFGPISSEHLLNPLFEIAKKHRTQLICLSDLKQNSILNCFNLIYMLKVRASAIGSNEYLKFEEIIRDDSDIHNDEKLEKAIFRVSEHKQINLFD

SEQ ID NO: 41401 - protein, 397 aa, Desulfosporosinus acididurans
MELLEKIFLHSKQTISDQELQRIAQESDYELFHTQVEKFVESGVLVAVKSSKTNGRIPPLFNRYRIIKPQEDFSAYLESVRRLNPLLNIAGYLQRPELYKKHLEIVEGLSRYLWFARELLEQPMSRKERSFSVWGREKLLDEHLALVKEVLKFNRLEETFLNFYDTPEPFFEYHHQPGELTTVLVIENKDTWFTLRKLMQTSGKSNIAGTEVNVLLYGEGNKITKKGALEEYKVTMLGGQKKKISAGISAAKPTTEGASCDECAKDGVSIRPAISVEADKKGNSCEGSALVVGQCQPRFLYFGDLDWEGIRLFFRTRDANPSLDIKPFSYLYRLMLELAESVELPRSLDQRGVSGPLSEFLSLIGLTEESSLSSILAEGRYIPQEIVNYQVAAKILK

SEQ ID NO: 41402 - protein, 532 aa, Peptococcaceae bacterium CEB3
MGEELRGFAGRIQNVALFQPLFALNNNRKYNQYDALSLGFGVLLLILENMLIGRNYCEHEDIARFLRGVVAEVYSTDLTENESLEMAYYFLDALRNNGRPFDLEYKDLENGQDVRCKFALIEVASYEIHGTMRFRLTDAGLDLLFKTKEIYKELRISISQLYLRQQIEKGVFQEALRTVDDLYVQVRDVQAKLERIRQLVLRNVSEVSVANYITLMEEVTEQLGREKEVFSSLQGLLKETVEGYRFRELTGKERESFDQLVLVAKRLDLVVNEHNRLFTSKLSLGALLEEAMLDSLANTFRTKINFERDFVDQVVSDNPDLEALRQVLNPLFRCQRHPSFNILRVLEPQRLKGEESDPEDVFLGPTEADLELAVERERLLKHQRDERTLDYLEIVLGSLLKEKEQKLSGILKSLAGEVYVRLISEVEFYAFLVQLHQMGRIPLTVDEEMRVKIIDSETGNLPFLLLKYVDAHPESAALGEVDVEATPRELRLENGSRVTDYRFSVCPQGSLGSQHAQNLQDPQGPQRSETGV

SEQ ID NO: 41403 - protein, 244 aa, Peptococcaceae bacterium CEB3
MFESYKAETVASALEIFLELVKKGELHAEEYPQLVQTYKTDLEVQGLLTNIVEPLADVKILESLYVLYLSPNLDNRFFGYTNEELRQRLGLTLNRELYLAYFIILSLLAMFYGEDSLSEVSRSYVTAADLERFVSERLQSLAGAAELPEWEKELEVNLLSSVELWQDMPEYDPELKTLRRSNKNRISFILRVARFLEEDGLAHVEQDREIYLTQKTEQMVRKYYSERNRQEKLLSLLCARKEEA

SEQ ID NO: 41404 - protein, 1464 aa, Peptococcaceae bacterium CEB3
MPHLWRARLTNIEYDAGKKIYSDELFRFNGRNTLINLANGGGKTLLIQLLLQVVLPNESLNKRPLADLLTGKKYTGHILVEWKLDTQEPAFLTTGFCFTRGNEEDERLKYFLYTLHYHVANDFDIKNMALVQDKTPLSYSELLNLLRGAPRSPETRISIYDRDDKRRAYLRDLESYGLFAQEWKNIKQTNNIEGGVGEFFAQAKTSRQLLDTILIPAVEEAIFNGEEDAKRLALAFQQVNESLIRLPELEKNLRDFQLLRTEGERVLTEVRRFAQNQATLREEKSRLRQLFNRVEQEWETVGQDLGQIEEALAGKKNERQRLLYLAESIPYVRLVREKEAAEREHRQAQEQLRSLREREAEADFRWRQSRGVNFYLERAALLAANQGYEKQRDLLALGREDKLLELDRARATFRAVLTVLRTEIQEEYDCLKTDNTILLRREQALKKELEGLRQTDKDLAGRIASLAAVLERYQKTWDELAQVYQNIGWLEVPEQALKDLSTDLACIRNTLQGLEEKRSTLLSEQKEREESLKTLILTISEREYRLSDLQKEKEASERATANLQEALGRFSIHCVHPQAEHSRIEAEIISKKMAFRDRIRLEGVRLEEDKSQLSLLRDTDSYVPNREILKVQKLLEELRIPAQTGSKWLEEQGEEADREAYLRHQPLLPYGLVLAEEDFKRLENSNTWQSELLNSPVPLLARRPALVPAEESTLSKILPIGGPAYLLWHKGYRYALSGESRREWAHDLETEIERKTEILGNLQVTEDQLVTLQEQADGYFRLYPPGYLPSLAAQIDQAEEALALARSENEKLMAEKAEAERESKETRSRLEEKRKAENARERDLERFRAWQQDFLDRRQKYSEHNQALLDQQRLAYELRQKESEQEQTREEHLNGERKLKDLESLKQRREEELNSVPVPSRQVLPEHEMSYEEAKALWEVSEKAFAQAHSELRHWEENIRRNREDSEKLLKRLVRELKLELTDVEEAKYPITEEEIDRQEAEVLKLKEETGAWLERVNAAEKVIERLLGQLSEKEARIRQTYGREPALAFEDLEGEAARIAREIDALKSQVEEWNQIAADTLKRKTMLTRALDSLAAGLKNFEVPPSEEILAEADWQAARDKLAATIEAWSKLLQSTQKDSQRLREAVEKAFRHYAQVLRDQGNTVIDRFVSHLVADEERHFQLEAVEQSFAKSFEIIAQYEEKAAFEMKEAERNKLELVQRSIKQVERVAQEMQMIDRYVKVDYAGRRVNAVQIKLKEIEADKAPALMEAYIDDLIKELKRLAQEGETEEKQEKFIERKMSSRQLLNVLSALDQASVRVLKPEQHPTGPYFSAWEEVQKWSGGERYAGYMAMFMAILCYTRSKMSSLHNPPKVMLADNPFGIASSPHVLNLIFQLAENNKVQMICLTALSEDAIFAYFPTVYSLRLRPFAGNDYMTSKIERGSYHIDSLEEELKKKRQVEFDW

SEQ ID NO: 41405 - protein, 371 aa, Peptococcaceae bacterium CEB3
MLELISELIAGAKQKTLASSSLEDQVYNRLGEEYARLGGYPAFAAVIEALCREGTLQAVKASRSNGRTPALSNRYRKVSGVLSEESLGKLLGMHPLIKSEAYRKFPQTFTEDEAYLKALDAFLKNPGLKASLEQGISANERSFQIFRDEKFLLSSQGRTFLQRVGLNLEDLSCYVTCEPFFYVDYRQVSPSEQSSSLPGVPVAHTALIVENKDTFHSIKRAWRAGGRRLGEQDFDLLIYGEGRKIVSSFAFVEDIQGISPENLRVLYFGDLDPEGLDIFGALATAFPDYRIEPLVFCYEALWRLYGHAAPLRRETEQKLHPDYEGKFLEFFPQTLRSEIKSLLAQKRYIPQEGLSYLFFSRSGEVSLWEKN

SEQ ID NO: 41406 - protein, 559 aa, Robinsoniella sp. RHS
MIRTAFITTNGIEEEIMFDFLEGFEKRMGFAAVVDSIVNRKNTNMEIEGWFQGEELDNLFFTLLVYIMEQTLNENDECTLENIARFLDDILPVYQKKWPFDQVMRLAEYMVKDILQNKGTVKNYGIMDYGRQWHDIQVRLISDKITADNKIIYQLTDQGYDFLFRTKEIDKEMDFKLEQLKLKMLLKRKNYKHALKQSRDLINMLRQKKREMESFIDRVRQNIHTIDRGEHERLLLETYNLIDEEYEDMLEMKEAVVKDEDRIGREIEESGYSDETMNNALYNLNLIKRNIQIVIGEQRNLIGKRFNMNDIYEETIRNSFYASVVKRFDFQKEIMDEMEKVNSKNVSNLWKLMTPLCMPSLDKKMNLSLIYQNQGKLRENEEEDHVVEEEVLEEDLQAADREISNAMNFRVIERIFKFAGERGTSFTFSQFYEHIVEKTQRIHQYTENKRIYLILLKLYDYGVIDIESWKKHSSEDMIPDTNGEFDLSWCLRQMEDRYPDFYGVEQLVFEKKDFIFHAVLEDTVGAEVLYSTIEMADIEIIPKIRSEVGQDVETGISDI

SEQ ID NO: 41407 - protein, 234 aa, Robinsoniella sp. RHS
MLKQALAIYNRLLENGEIDAKTDSELYIEYKNEEVREILEQFSEELNFRILDTGNTIYMIPNLDNDVLGYVMKDFRENIATNAKLVDAYLQCYICMMIFQMFYGGKNTNPIQREFIQTKDLIEVLDQKMEGYLAGEEEALSLEKDYCINFYKIAQLWQNKQIGDSIARKSKLGTLARAYAQLEHEKLVRVLEEGREIRRTRRMDDLFLYYYLDEARVQEIHQLFSQGEKINAED

SEQ ID NO: 41408 - protein, 335 aa, Robinsoniella sp. RHS
MKIDISKIQKKRFRYEDILNLYPDMNYRQLFDILEELCESKQIAPIKKSGKTSFYPAVFREYKKLPPSVDYSCYIDEIAALNPRLNISRYLEKPGEFKELRDGICKLSEMLWKDDPRLQQKMSVKEKSYAIWGDEKYLESKSGSRILAFNQFDQVSLNYYYAPEPFFCRVFDQIAGDVIVIENKDTWYSIGEALKNSKNKRFLGVKAGLLVYGEGNKVTGEAALQTFVTEYGFEKRKILYAGDIDIAGILMFYGAVTHNREIMIQPFMPLYNKMAKRAKNLQMQPTDDNRGRDWNTGFLDLFEEQNREVVRKVLDENRRIPQEILSFQDYIGMCD

SEQ ID NO: 41409 - protein, 498 aa, Bacillus firmus
MNESWEGFAQRMQRLNPLFELGRGMEVGELKPHIQTILMQVLLTIFYRELNDDDHRRKSDIKYMVEDSIKQMKLLADEKQIERITSGLLYQGKEEYSRPFEALYYDEIRQSWETQVFRYVAMDELYTNLEMGGSIVYKLTDVSQEMIFMSREMAEEFSITIEQLYSMQLIKNGNFRKATRNLDHLISRVNRLMAREFSFQKEMINNPKILLMEEEMQRADNRAEIEKQFEEEKNHFRTISSMIEKTKRRNEEDDHIQRLLQEKIGHTRQLHDRFAKLVIQNISYEMKLKAENPSLFWETSLVSFREHIYENWFMKEGVSSFDHVEKVLGPLFSPKNEFILPLDWIWGEQEFDEKQLTETMEEETEDESITHQRVTNWESVIKAWSYVFQYLQTYREFSLADLTTLPLEVQDLWFEESETIDLWMMFDKKPLKVQVLQRKEESLSDEREILLYKLMQEYPQFQVFEGLKLYTEFDHRAEPFLWYQMKITPFKICVQEEK

SEQ ID NO: 41410 - protein, 248 aa, Bacillus firmus
MNAESIKTASAVYFTLLKDKVIDENSEHFQAYFDPDVRQTVLLMADESGTFIIESPKRIQLVVQPTGSVFATNFTHMKDRHKQVETKKHFHLMSVVIMAFLAGIDRNQAAKIRTKREGISFFTLERQVNDVIMNWDSLLKAKPDFGEEEKIDMRDVVTTWKYMEVDTDDYGARKANRRTRIGLIASAMRLLETEGLIIILDREDIPKAIPKQELFERIEYLYHDYDRYEIFKELMKTEEDQHAENTSN

SEQ ID NO: 41411 - protein, 1486 aa, Bacillus firmus
MPKIHRIRIAGLKYDGMQKQYRDTTFNFHNEETSTNGLISMMNGGGKGVFLQTIFQILKPGTAWGKQNNRFYQQFFFNNKEQFIPYTFHVLIQWELDGADRRHLVTGGMFSAEQRISMNEESGESKPLEQEAKIVPNITFYTREFERKEEASLEHIPLYEDGELAETEGLKDYLKWNGYDVYRDTKKHYRILDTYGINRKDWDIMKDINKDEGGVGKFFEGAEDDHSLFQKRIIPTVSQVLHRTEHQKNDLVEIFKSQASIAKDLPVLLKRELAHKEFLEDILPFEESLAKGVGHKEIVEDSIKAGRQLLGALEHLKKTEEEILIDLEKGIEKLTGRQVDLRFQKDNLEYAKAHREVLDWEKKFAEEQKKHIVLQEAVKEKQERKDELAFQLLLKEWHEGEQSIGALSQQIAKLEQNSGLEQVNQRMDEIKKEAAQQWEKSAASIREAVHQYSGYQKFLKKKAKDLSKQDKQKTQEIAQLRTEIDFLYTQINEFESKEEQLIKEFGDRIAYDLTGFIENLNKQIDTKEAALKDILAKENRSNEKQNQLASSHGTLAQSIHFSEEKCEELKRKSEEQQKKETKLYDQLQGVLQGVNAPFTNALLSKYAFEVEELLVQNREQGEELKKALWETQLDYALNDEHFWIANNDVKELKEWIDEKTGIDVFYGSQFLQSLKPDEMASQMLSHPLLPYGLVVSRPQWEKINKQVLSGRIYKSPVPIFMREDMADENQQNAFVMITGTEKELLADKNKFTNWKIQIAKQIDDQKDTLAELEKTETALRRIIKEIDRFLSHDLAIDIEKVLLQEKEALLSRETELQAIIVQEEKEKELQLGLREQLEKTKEKIEKLSKDAEYLTEYDREKSMHQENKRVKQEKEKQKEVFEKLQNELGNELQTIADLQEKWSQTYLEWKLSAEQNIKKIGFFIDGAAFPAAEKAEASEEVPRLSPYILEEINGSIEELKQLQKSKEEQASELLAIQATRESEQKQQRKLEKKLHALNEEWKDASVPDEPISILENMVQAAAKETKAAEKEEREQEKTVTIAETSLKHGMDQRKKSSKKVAKHDQKPEEWEELDLEVKTIEITDQTKQTNAEIKKTEERKKEAEQSITEFEKDQLHLSVILKEEAAAFSDDDIEKIKSQGKQSILSWSEKHQAIQDEGQEKHAKIEQSLRNLKLAIEGKDWEIRFKNEVLTTLDHMDTRHYAHIQSVVQNMKRFSQSGLEQLERDKERAEKAQNFWASRASMKVMSISEAIRSMIAKMKLKNERGSFPLVQLKEDILPKKAEDVEPLLKQHFVSAINKITKRFEMIDDNNPMLDQEIKQLISDEQILFVSLRNRYPELLVYNMRTDNAFMYGKPQREHYSTWQTINQGSKTKSDGSGGQKLSARMVMMMMLLSVKSETDQSWVPLVCDNPFGQAASAHVLDPIFAVADKLKFQFIVVTPPELVKTEISQRFHAYYKLDFIREKGKEIVSDTIVPAFRIYQGEEAVH

SEQ ID NO: 41412 - protein, 361 aa, Bacillus firmus
MFKKVNKINIIETRVRSFIEDIQHPKQKKKLNINDLEFQLRKLLDDYYEMDGYSLFYEAIQSLQDEGQLTPIHNHQYNGKTPSLPLYFWVNVKPHTGEWDRLEVMKLSDRFDFSFYERHPEWQTKEEWSRVKNLYAFLQSSGERETVSLEERSLELFGHEEFLQDVISFPDGKGFLARIGVSEEQLKVVRYGEPFVFWMKQGKEIKDIQRVLIIENLSFFHTCIQLLENDLLDYEPELIIYGEGTKIERSFSFFFKIFPAKSYLFYYAGDLDAAGYGIMTRLIEKYPECCIQPALKIYRKMLECLDQSNEQKSGQPQNLKYRDAFFRWFTEEEQELLLQLWQETKRIPQEVLTIETWRRWM

SEQ ID NO: 41413 - protein, 518 aa, Streptomyces viridochromogenes
MIFEEPSAVYESITSRMRALAVVYPLLALDTSKVKKERGWDRYRMAELALAAIDVVTLRTDMRTAVRQEAVVEHVAEFAALQLPGRTGEEYRAVARWVTERLINTEERDRAFRHEIGYVTDDGFETREASFQILKEVPDQVGQAALIATDAAITVLVHAIDVDIASEQIAAEAKLEALLKRARISEAWQIAHGARIQSIRYAKDIHGRVEAMKRNVRTVDWDAEVKDTVEEALEHVRSRSAAETQLKERVNQLLQATDDERKRRQLEDLGALIHECWQRHSVLIDMLMKVGPEFRRQQDRQVFVAPAIHTRVHLHEQLLQPALELSLDACLGPLEAFTRAVLGPVRPRVMYLPDFFEALAKVTEQVGGELVPVQSEHDWSEIGDSSAFSDEQHRAVDTLLEAVTDQGVRLSTLLEATRHPGTGTGPESGTDELLADRVQQLFRLIPVRQLADGETTVVAVDDGAALADERFGGSDFLLIRTSGTAMATAPQTSPPPPAVPAPRRPEGPGARPLDQESA

SEQ ID NO: 41414 - protein, 1485 aa, Streptomyces viridochromogenes
MYELNRILLRNFGPRDARYEDVPLDFSGAGAEVETASLIPDAGHVNQRPAPASLVMLQNGGGKGVLLTGITCTTIPYRHSDLETLRNFVVSMAQPSHVVLEWADARTGRLLVTAQVLALDHDGKLHRCFYSFHPSAALDADRLPFHRDGHWVPFEDYCTELRDWEKRVEALELRIVEGQEKWEKHQRGLGLQPDLFDVQRRMNAKESDAAAAFTTNSADAFVEWLLRKATDDDQYTELGTAFQGYAAAHDARALWERERQFAVEMRQACEDVADLHHALEEHAGAADAAEKDLVRLAAALRNRHTSLTAAAAEDNSTVKSTHRTFEGAKRARELAQSRLHHVQTQSHALELDEITRQQEQTQKDKQEAENQSAAWQTVPIALRHAQALDNHNRAQQALAEAERNAAPYVQALDAAAAALRAGYTRAEKDVRDAIRTHENATAKAQRRIEQWRTRSDELLTEVGAAKEETRTLQGVTRAFATRLSAARDKELVAPQESAADAAARMQGHARHSEQLLREAKESRDAIRALRDQAYNVLAAKEKLAWSARTAATAADEEVSRLRARAEAVRGNPLCAELLETDSGELRTGDALRWLHDHAVGLHQFAERRAGGLESTLTRKRMDLQHDQDLLALLDTSEGLLPAAVEVRDLCGQLSDHGIHAVPGWQWMRDNVPTTERQQVISAHPDLVGGIIVGGPDGLEAARSRVEHLRPLPSAAVTVGTGERMLSSHAASEDGRFVVEPTPALHDEEAAAAERAAVDARITAVTGELDALGQRLTAVRDLVRQIANWRDACGDLPVPNRLEQLGELQDAAEAAEAAVEGARTAASEHAAALEGAEGECDRLAEEAQDAQRAADGLVHLAQEESAAAQAQTRIAVLATESAARADELESLGSQISQAGDEIVRHARAIEAAEQEAHGYARARDAITATSQAQQAQEAHDAALEPLPVLQHRYRQAQDELKGVEIGEDQQQRADAAQQALLHSQEEWNRVPGHVQGLAMQYSHDARAGNEVQVDAILRALETRVRTYDETLQGLRDQATRLKERATRLSPAAPLSEEDATAWTPATLAEARSLLALATGEHNTAQEDERVAAEVFNAARRAQTDSSRELAAFDRVLPLLESAVRGLVIPSDQAPYDGSAEAAERTARRVTAEYISSREKALQTERKLEGGVGRLKEVPADVRFERLDIPLRTQISALDSRHIPAMAATWTAALSSRIAALNSDLEGMAKAREALASQLGGHVTDLLQRLDQASRFSAFPDGDTPWSGQKFLTIRYKKPDLAALAAQMHETVDDLAGNLRTRKLKGTDVVMRCLKAAVPRGFSAEVMKPNAAQRVDRVPVEEMSRVFSGGQELTGAILLYCALAALRTSPGPRSRTRNGGLLLLDNPIGRANAGYLVDIQMEMASALGIQLIYTTGLSDEDVTSRFPMRIQLRNDAEARSGLSLIRLDDQVRNALIPTPRIAPDQNAPEPAGYLTSARLYKKQDDAR

SEQ ID NO: 41415 - protein, 315 aa, Streptomyces viridochromogenes
MEAFREALPGPASGEHARSTLATLLYEIAEHGIINLPTTRTKWDAGRPALPEQVRLHTATSAKSATPHRHVSWRPELDWAYSARLTASQTEDLLACNRWFRDTRNHPDRRAPLPLRERSYDIFRHEKRLDTLITGALFAPGRLTLEQLATYREPPPLAYRQLGNGDTMLVVENSDTYATLRDLLKPDPGRIGYIAFGSGRAFEASVENIAELDGIHRIVYYGDLDAEGIAIPARASINGAQHGLPPIEPAMGLYRLLLAHEPTTGDIIASDRAHSLTAWLPGELRQAVHALLAKGQRLAQEATNRNELGTESAWR

SEQ ID NO: 41416 - protein, 506 aa, Bacillus sp. LF1
MEKARQLSFEDLGSRFKTLIPVWILGTGANFGRLNPYARHLSFTLIAVIFYQELLDDVRRTRDDLVQTVFKMAESMKKDCDWFEAEKIVDALMVNEGSSKHTFAFQEQFFNEHKMEWETFRFQYLEIDRDATNFEEGLPVYKLSEEAQALFLNTNEIQKHLPVSIQQILVELLIEKGELKSALRMLDSLNHRVMTLLKEEKIHMDELIRNPKSTIYENKSRWGKQLKDVEAQFDEESQKYRKLDGILRRIAVSPEHQNTYMQLTKRLSKTKNNHDRLAKLVIENVRLELQIRNSHFRNIWLTNTTSFRKTIWEDKAKVVGFAHPDEMLTLVESLFSPYKPSILPLEWGIEEHLDLSRPTFGGTGTKTKPQLEPISLDWDSILTLWKPIFEELLKTGRVSLRHLQQIDELTMARWVENREAFDFWLAFASMDEPFIVNEENLQQIDSDDKALLLSKLMEEYPELSILRNKQIFSIPSKDSMVLRNKIDVSTYLLIMEEAEENEHRAD

SEQ ID NO: 41417 - protein, 253 aa, Bacillus sp. LF1
MNIAQIERAAFELVACLWQRKYLPNDHPLVHPYIESQEVRNCVRRLAESFGLRVVRQDKHIHILVQPHNSFHTNPISELKRNVKSYENRVDLYIMGVVWMVICSEADNDIDSKIKWENEGLSYGEIEELVTKALNHWHELDIESEGTFSKDWSLAVKEMHKKWKLLRYHKLENGRVSYIKESKFGLIDGAVRELEKDKMVFIERTAQTSRMTPTPVFFERLRARFGNMDRYQDRYDVFQVLLEDVKETGEMGA

SEQ ID NO: 41418 - protein, 1520 aa, Bacillus sp. LF1
MEARLAKMRVVGLKYDSGNIHTDDLKLDFTIPESMPGHAAYILRNGGGKGVFFQTLFQTLDPLTSWKKDLNHVHHFFFNDEDRPIEYTFHIVQEWQVSLSKRVILGIAVTPRLVSNDKKSQTNSPIELDYFLYTMEPLVIEMADIFELQLWNEKEKEAVPFNTWKEAIKSDKSFHFYSKQDRDSYIEKIEEYGYDTNTVNILKRINDGEGGFGEFFKGSTDNTGLFYNLLIPTINDKIEGIDSRNKKEVSVVTSWFLEALKISKELPDLLAMVDSIEQINDFILPLQDRFREGEEIKQSVEIWENKGSELLQLLMSLMDYKENQVTKLEKEQTARKEQRDIARWKYANIDYIVLHQERDEVDGQYYELEHEQLKADLALKGYQTQLIKEKVNLELKRRMDKLDEIEANNQSISTLMDSEDLKEATAGLKEIREYFNKKWESISESWQKEMNRNARSILAHETKIQQLKMDMDSESKQKRDLEFKAYDLSNAIDQFEKKLEEACIQYGAELPYQISDIIDETRMELTQVKTAFESASKSQSILENEILDTRIDLARQEDRVKAIGSEIKQVENESIVATQKENELIANVSKILKTHYPFELERESYYEIRKDLENYLEKTKDAHKEQLRKMWTFQEDIHLIEEGDKIGSYIPNSDLLKVKQLLDAHRIESMYGSEYLHHLSREEKQYELERNPALRYSVVILEESFESLNLSFIEQELIRSHVVLVDKTKSSKKDKQSTANPFLDKQDEMNYLFKDLSYSFLEDEYEFEQWKVMVEKNADDADHEVGAFERKIEQIEKVSKELEVLLSGILKTELALKLLNLQTEEKKQTNILSDIKVQLEEKEGALNKKLEEVESLSNKLEVLEKNEKELLLLENELEQDKENRKTKSNFLKLIEETENGITQLEEEKGKITIQKTNNSASFSNWMGYVRSNYSTLRRMLGDIQMPVAAVIDTFDEKQDLRSHSYGHSLSKEARENIIKYHELDKNISNKNMRLAELNQTVKTLQEQVIKHENILQDLYGNSWSELSVPESDEMHLATLVTQAEKQRDQGKAKVDGIMSKMKYNREEIEKLEKRLEDKRKDMEKDYPRFGAEYIEIPDWKAAKEQYRKERNLLERQYSETREEITKLHTSIEGMEQTTRLLKDLKLPVHPAQVLSEQERVIIHENPIEYFTKWNQKYNSSTTNYRSYQENLGKRITQIKEKIESFTNIPETYQKELVHFLSTIRDMSFDDAVASLNNYLDWAKNNLQDELEQKEKADKAVDLCAERQSRRVLDVINVLQDLVRKLTIINWKKERFPLIKYNKNFPFPTKLEDIKPLVKELCMNEIDFYVSKYKDKIDNFTVHDIVKTMNISKLVLKAMGDFPRLMIHIPDIEGGLLRGEAKHAVYKEWETINQGSVTSSTKSGGQTLLAHFIVIAMIMRQRVEENSPLFLVTDNPFGTMSAPELVEGVFSLLDLLNIQWLVVAPPITNVSITSKFPTINNMNIEVVEGRKVLEKKLVKNYRKYLQNFSVLDNPEEKDHIS

SEQ ID NO: 41419 - protein, 374 aa, Bacillus sp. LF1
MGHLEEIIIRCITSLREKQRSSRKLLRTEKFENEVIGAAGSPRKYNELGGYKEFHKVITRLKKDAILQDVTNPGFNGKRPRLNDTYWITPKYVENTWNKADIARVMNYIDLGFYLRQKKYQTEDEWKLILTLYEFVKNKDTHIKITREERSLMLFKYEQLPDDIEAEKYLASSHGTSLMNRLQLTPEDLLYKVVHEPFQYWKNEAVPENYLHEVLVVEGLSTYQTLKEVLIRQLPWNFGPIPHYLVWGEGYRICSTLGYLKDITDDPTQLTIRYSGDIDYEGFNIYFDAKNKHRDFNISLAHHFYSFLISFSNEVATSVLKKQKVIEKNLYLLQEEFKDYKETFEVIKTLWNQRKRIAQECINFETLRNKGGFQ

SEQ ID NO: 41420 - protein, 471 aa, Bacillus sp. FJAT-27916
MAESLISVFQADESQPEVMQSMQDIASLSGVLSDLSAQSSFQTPREIIRFLRIIQLINEEALGLDEPIENAETVYYRYKNRYKDAEPPSKKKVNQVIGVLVKYNWISKQSRRIRMRDTGKRMMNALIRLANDSLAYYMHDDIGRALFQARRDAELSEAYDDRGISGGNKIASMIRNVENAIQLLKERELEMLADRSALPQLELIHELMKELDGKLQERIASFATVEDSLVLTDLMQQGTSALAEGTNQSLGMINKYLKFTHMQKTPLSSTIQPERVREFIQQMYNPPVESDIPNVHQLFSFMEQGQYEQEAMDGLWIPFKIAAPLSAEAIDEAIDYIETYEPISAPMEETDEEIGYLSEEISEEEIDGLIGETAWALTKSMIKTEAVEHFFESHSEAPMDQVIVETTSAEWGDAINAMNAIAALVGSKQVTVSQSEKTASKAYEREWEWMNREDGSRIIRKRQKQDESDHE

SEQ ID NO: 41421 - protein, 230 aa, Bacillus sp. FJAT-27916
MNQIMNEGGQTEEFNANPLNAMQAVKGVLTEEEEMAFMNILFSSTATIRMGNFGLSRKEVERLLGLKEQDEQFFSFLTRVNQAISRYMKVIYDERRDQVIVMMRVPARAARNTLSKESLALLLYIFYQQEVLQHEFTLFDQLLESFGHETMKANQRILMNLDTLKKIGAIEEYDNPSQEKAYQLTAIGAQMFSDSFLRRTAEFSQSNQLNKEEVLKFFKRYNLYPKGEDE

SEQ ID NO: 41422 - protein, 1071 aa, Bacillus sp. FJAT-27916
MIPWRLKFSGVRDYPPTLLDLSGEDAHVMITGPNGSGKSTITFCMGAVLYSAKVDIEGLKSRNLEANQTWKAAISFLFKNEGANKIDAPDYVEFTLKIVQEPGQPIKKEYSISTGENIDEWEEEKRYTSGDRFYNFTSYKNDLKYKYKVDPDHYYLIWYQQEVNQFAVMHPEERFRIFSEMHGIDKVQRDWEESMEKVKEAEETSRASETNVKLKKAELGMAKNAFDRYTDNQRRLYEGGKLYAQSLLGMEASYQKQVRELAGQVEQTHEDIHEENEELARIRLVQDRLAWELTDRKEMLQSKEAEHEQEERILQDIKDQIKSIQVKIHNLEDELEDITKRKSQMTRTEAEVKAELERVKIRQQEIEEALKQKDSELNKVMNCWQEGVQVIAGLEQEIKQIDSLETIHKARLAEYISSHHVQMTIDQLNRTILDNRDRHDVLRKEKLELQAELSYLKEGQNVSYRQRESLAYFKDRGVQAFPLSALLEMEERVNPREEQLFQAIKYTVFFDGRKAVPPNDLYHVPLSLVIPDQVRMSLPNVPLKVKGDLRESMLPHAMKALWWVAQLFEDGLPEINGGMLTDSLGIRGSQEKERLILSQKAIRLRKQEVENQVDERTDLMRELDASIAGDTKLYQKLNGIIHQVKESEAFMLAEHEHARKRERLKALVHERDELEGLRRQHEQKKQVLTRKQIEDKLYQDQLEEEASFYLELGKMKEKYEELHQLNLNLTNEKRREREQKLKLELLEEELDKLEQIISKAEKEARNVAGQIDDSARKLEYLAVQADNQKSDQDAAEFGLMDVKRELEDLKQAALAIYEEAAQNVDEHNLSALPVLKSERESGKITFDLARNEAGIDPAAPQNYETVKKEYERFESEYTRTKLLLEQDKERMEKLRDQLETTISMRVIEIQQRFKNYMSQFQFEGDISWDSFEDRRKRTHFQLFIKARKEGHRGSLEDVSVKARGGKVGKGVSGGEESLSSLLFALCLLQNLQITPGFIILDEFDSALDENRKVKVFDLYEKELQRKLIILTPKSHENEYLNRFSKAFVVRHDPRIPESRVAGILKKERVEH

SEQ ID NO: 41423 - protein, 434 aa, Bacillus sp. FJAT-27916
MIRVEEIDYIKEWVLKKGEELEVPYTSNRSDGLMYVNVIKHTQRTYRITGVLTISASEPSFTEVDKNLLQFGFTPRKKVSLPDNDQTLKWLREGFIIKEIRFKKDGRTPDSQHYRMGYRLFAYSENEKRKKTEAAEKELLAWVEKAKLVTSLSIPSHKSIDLRRLIKVVEDFCHQTAADIKVSVGFPSGWTLAKRLRFLHFLVAFLQLSIKREQFDWKEIGASYYQEIGGSKRFDRDKNDFIEQLEGLAECPLVRLGLTSLGRITPFYFSGPLVGGYSSFQYGPVHALTDLSISSDDYRTTAKALWLVENRAILTRMASEENFLEETNSLIMCVDGHLRSSHKQCISQLLAGSDIDQVLIWCDYDPDGLQIAHEIYETVSDAKGKELKWIQPDQQVSTSLLEYEGYMLAFLEENRMEQEEMAGSREEWVKWLNH

SEQ ID NO: 41424 - protein, 501 aa, Bacillus sp. FJAT-27916
MNESWEGFGERMKRLNPLFELGRGMEVGELKPYLQTILMQVLLTIFYRELNDDDGRRKSDILHMVDETIKQMKLTADTRQIERIASGLLYQGREEYSKPFESLYFDEIRQAWETQTFRYVAMDELYTNLELGGSIVYKLTDVAQEMIFMSREMAEEFSITIEQLYSMKLIKNGNFRKAARNLDHLISRVNRLMTKEYSFQKEMMNNPKILLIEQEKRREDNRWEIEQQFEEEKNHFRTITSMIEKAKRTEEDEVVQGELMLLHEKIEHTRQLHDRFAKLVIQNISHEMKLKAENPSLFWENSLVSFREQIYEDWILKEGIRDFGLVEKLIGPLFSPKNEFILPLEWVWGEQELASIQGTEDTEQEEMEEDWMERRITDWSSVVRAWSYVFEHLLQHGEFSLADLKELPLEVQDEWFEESETLDLWMMFDKKPLTVQSPNRQEEALSDEREKLLHKLMNGHPQFLALEGRQIYTKFDSSAEPLIWYRTKMTPFKICIQEEGI

SEQ ID NO: 41425 - protein, 248 aa, Bacillus sp. FJAT-27916
MNAEILKKASSVYFTLLKDKVIDETSEYFQSYYEPDVRQAVMILADESGTFIIESPKRIHLVVQPTGSVFATNFTHMKDRHRHIENKKHFHLMSVIIMSFMAMIDKNQAAKIRTKREGITFYALERHVNELMNKWTVMLKENPSVALDEMIDMQEIVTTWTHMEVDTDEFSLRKGNRRTRIGLIAGAMKLLETEGLIIILDREDIPKALPKTELFERIEFLYHDYDRYEQMKRLMASKEEEHAEDPSN

SEQ ID NO: 41426 - protein, 1484 aa, Bacillus sp. FJAT-27916
MPKIHRIRIVGLRYDGMQKQYEDTTFDFHNEETSTNGLIAMMNGGGKGVFLQTIFQVLKPGTSWGKQNNRFYQQFFFNKKEQFAPYTFHVLIQWELDGSDKRHLVTGGMFSAEQRMSMNEEAQDADSMEREAKIVPNITFYAREFDRKEDVALEHIPLFENGEVADTEELKDYFKWNGFDVYKDVKKHYRILDTYGINRKDWDIMKEINRDEGGVGKFFEGAEDDHSLFQKRIIPTVSQVLNKSEHQKNDLIEIFKSQASIARDLPVLLKREQAHKEFLEDVIPFEEHIEAGVKQEEIVVESKKKGQALLGALEHLIKQDKEELTSLAKEMEKLTEELSLLRFEKDNLEYARAHEEAVTWERKLAEEKEKLEQLQKLAVEKQAEKDEAAFSLLLKEWSEFENTIANLNQQMGSLERNSGLEQVNTRMEEIKHAVQSQWTEVSEKLKEENDRYHAFKLHLEKSIRSLTKDDKQKTIEITQIKTDIRTLTEELQRFEIKASDMVKAYGDRAAYDLDGLVGKLKNDQTRLADEMNDLKGKEKQSQQFQGELSNTVGTLTESLKHMKERFDEWKQAYEKQEKKETALIERMHAFLDDVSAPLSHAMLSKYGHALEDILQKNEEETEQIKKELWEVQTDQYLNDESFWIANQDVKQMKEWIDEKTGIDVFYGSQYVQSLDDEAKRQHLKSYPLLPFGLVVSQIQWEKINHHLLQGKIFRSPVPIFLREEMKDGGTDSFVIIDGEERDLLMDRQSFAKWKTSMAKQIEEKKEAIQEFAKTEQAIRRLTKDIDRMTDTDLCTDLLRQMEKQEALIDSAQRELTHTVKTLEKERELQTGLQEQMNQKQRRIDETEKDLAEVSAFVEEKHQSEDNKTVLAEKEKRRDKLTTEQLELGKLLDDYTVRLAQWNHTHLEWKMAMEQDLKEIGAFVEDAVFPTLEKTEPSEEAPSLPSHLLDAMIGHVTELKQLQRSKEEQSQELTLLKAKKEAEQAQAVKLEKKLTKQDENWREKPKPEEPLSILEGLFQSAQKEAKEADKEERKQEKEVTVAETTLKHALDQRKKAEKKLNKHEKEPETWEGQDLDVKELEIKDRTKIAKDRLKNAEKGQKETDARITGYEGDQLTLSVILKDEAAPFANEDLETIKNQGKSCILSWCDEHQGMQEEKQVKHAKLEQALRKLKLAIEEKDWEIRFKNEVLTSLDHMDTRHYAHMLTIIQNMKRFSRSGLEQLDLDKERAEKARDVWTNRASMKVMSMTDAIRSMLAKMKIKNERGTFPLVQLKEDILPRRVEDIEPLLKQYFVTAIDKISAQFDSIDENNKQLDQEIKQLIGDEQILFVALRNRYPELLVYNMRTDNAFMYGKPQKEHYSTWRTINQGSRTKSDGSGGQKLSARMVMMMMLLSVKTEADNSWVPLVCDNPFGQAASAHVLDPIFAVAEKLKFQLIIVTPPELVKTEISQRFDAYYKLDFIRSKGKEIVTDTVVPAYRIYQGEAVQ

SEQ ID NO: 41427 - protein, 346 aa, Bacillus sp. FJAT-27916
MRGFIEDIQHPRQKKKLNINDLEYQLRQQIEDYYDMDGYTLFYETIQKMAEEQVLSPIMNKQTNGRSPGLPLFYWVNVKKQETKWDRLEMLKRNDLLDFTYYNQHPEWQTDDEWERILNVYDFLKKEEERELVSLEERSLELFGHEKFLSDEKLFPEGKGFLQRIGVNKEKLKIVKYGEPFVYWLKRGCDLTSIKRILIVENLSFFHTSVKLLEEDLLDYEPEMIIYGEGKKIESSFSFFFRMFPEQPYLFYYAGDLDAEGYSIFVRLKERFDDCSIQPALKIYRKMLECREFANEERKQVRNELHKNAFFSWFTEEEQALLESLWVTQKRIPQEVLTIESWRKWL

SEQ ID NO: 41428 - protein, 488 aa, Salmonella enterica subsp. enterica serovar Typhimurium; identical to SEQ ID NO: 40981

SEQ ID NO: 41429 - protein, 1481 aa, Salmonella enterica subsp. enterica serovar Typhimurium
  MOD_RES (1147)..(1150): Any amino acid
MWLIKRVYMDGAGHEEAFYKDLTLDYIGLSQAVGSPVVEGLRSPVRNAKVVTSTYQQLVNGGGKSTYIALLLSIFEPSVSDFTQYLANHRQSEYHYRNYFYKELSVVLVEMVNESGQTLLLGHAHQRNGDDVDRTLFICDAPDSLMGAPFDEVPSYSRAERNSELRPYANSLRSFDSWLNLKAGSEGGMHWRKTTRQNEWRAFLLEQQINVDLIKTMVTFNSEEGGLTRFIEYKTEHDFLGAFFACTMSKDAAERLRELVAHEVERQGELEGIRRNESFLKDVLANWLAFLDPAKQLESIQAQQQLLDDGFREAMRDLAAFVGDAQVEQTQLEDNMDSLQTHIGQAMSLREQLGKRRALLEYDLVQHQFDKQKAIVDALQDEADTNQRQIEITHAAIDYKAYAKALNEYRQADEDLKVFQSETERPLQVIFERTAGEALGTLEWAIDRHRQQEATLEKELGQMDRESNTLKQSYDDLQKMLGGLEADRERYKRDKRQGESQRNELCEAGLIQKGETPVAAQYRLELTLRDAQQSEELANTILHQKEQALEAQLNVVREASIEKSEAQQKLILAEQKHQSAVDSALLLAKTYQKLPTSTQHDLDIEDTSWHSELCGLQLDKVLNANAQTLNGMKERLLQARHELDELRMTGHELVAKLVNQALEAFYAAGIARDKLWIFPHYLASVYNDDAQKIAAVIDQNPGRYLSLVALDNVTFEQVHKISEILPWKKAPIAIYLLDEAQDLRRETSELVQVVLSNPDKHGYSQAAYEARLQDLENIVALQEVSVKAAESALNVLKSFRNDWRLHYEQYGKHWAGLLDQRELALLILENADAALKQAEHDEQTLRDEKRDVQVRLNNARQQKIQAEKAHDKLSLFVETEWAKRETAIMKLEQLAAQIQRSKGTLCTQREKLERLSEIEKNKLSEKTLLNIQMGNWSNLCNEPFYSEIMATEGMEGRSPEDAHEMAAQAHKKLLEAANGDQVTALKQQLKDAKQAQRYASERLTAQPTYNTYPDEVKAAAINELTVINNRIVRLNKQQKQFTQNLINSQVTLQNFSQSCEEASKAIDEDFVWEEKPIEIETIQTSLAEIVNSLHEIEYQLKLQLEQKKLQLQKMENVKERLQNAKTAQAMIQPITPTSAAGLPGRIXXXXSITEYTDDLVTQCQKYAGLNETLKQQNIRVSTVWGKFRKRIEEELAKDPDARASQEYLRQLDSIATYHEVLGDLDRVGTGITQVFEAVQDSLEQFQRSIDLTVTHLTAHLEGAIKLLKRAMSVKIPEDCPVLPGRPIIKMTDRLNDVAADLRGFASSRLQQWIAKGQIPRAPNRDALTADLVQSVFGEGELEVRLLKTNASRPQWTPVTRLEGSGGQRLTSAFLLFVTVGKVREYDTGISSAGFLLADNPLGKSNADDLMRIQTQMAKAYKIQLIYLTGISDENAQSMFDNHLFLNKFQKLRRRDLVTVDKERHALWAASLAAKPQFAPVI

SEQ ID NO: 41430 - protein, 347 aa, Salmonella enterica subsp. enterica serovar Typhimurium; identical to SEQ ID NO: 40983

SEQ ID NO: 41431 - protein, 466 aa, Brevibacillus reuszeri
MEKVDRPLISIFQFDDSAPEVIQSMKDIASLSGVLSDLGSQYSFEAPTQILRFLRLIQLFNEEALGLDEPIENAETVYYRYQNRYKDPEPPSKKSVEQTVNVLVKYNWLSKQSRQLKLRDVGKRMMDAIIRLANDSLAYYMEDDIGRSLFQARRDAELSEAYDDHGISGGNKIASMIRNVENAIQLMQERELEMLADRNALPQLELIHQLMGELEVKLQERLRQFQTLEDSLILANLMQKGTAVLAEGTNLSLGMINKYLKFTHMQKTPLTSSIQPEKVREFISQMFDPPLDSDIPNVYQLLSFMEQDQYEGEAVDGLWIPFKFASPLSAVAIEEAVHYLETYEPLVESDEMVEELVFVSEEISMDQMEELMGQSNWLLTKSMIETQDIELFLDKHEEASIEQVVIEATTDQWSDAVNALTAISALVGNKKITIHKTGQTNLPEYERKWEWMNREDRANIIRKRNK

SEQ ID NO: 41432 - protein, 209 aa, Brevibacillus reuszeri
MQSLKGILTENEEIAFMNILFSSSASIRSGNFGLSRKEVEKQLQIQGDDEGLTSFIKRVNQAVSRYFRVIYDERRDQVVALMRVPARAARNTLTKESLAILLYMFYQQEVLQHEFTLFDQLLNAFGHETTKANQRILLNIDPLKKIGAIEEYETNSHEKAYQLTAIGIHMFSDSFLRRTVEFSQSHQLNKEEVLKFFRRYNLYQKGENE

SEQ ID NO: 41433 - protein, 1067 aa, Brevibacillus reuszeri
MIPWRLTFSGIRDYSPTLVDLSDADQHVLITGPNGAGKSTITFCMGAVLYSSKVDIEGLKSRNLLADQTWRAKISFLFKNDGFMKIDAPSFIEFTLSMSQDPGQPLKKVFSISKGEQIDSWEETITYTSGDRYYNFSAYKKDLQYKYKIDPDLFYLIWYQQEVNQFAIMHPEERFRIFSEIHGIDKVQRDWEESIEKMKETEETLRSSELNVKLMKADLAMKKSALDRFLDNQKRLREGAEMYIESLLGLEKHLHREKESIQAIIQQLEEELYEVQDAIALKKEEKEKATEGLETEKGEFEILNARIETVGNKMDEAAVQLQEINTKIEQLEKELESITSRKGQITRTEDEVKGRLHTLSEEQRQTDEQHHYTESLLAEQNTAWQKKVGKIAGIKEKIARDDELETVHRERLRQYKSSYAVQEKIVALEAGIEEYKDRKRNDIRDLQGLREELVLLEEERDLSARQIESMKWFRSKQIKAYPLRELIEMDETARLKDELLFQTIKYTMFFNGTHTNPPNDLYHVPLMKIVPDRSITHLTNLHIKVKEGLSEDEIPHAIKALWWVEQFFRENIFSIQNGVLIDPIGIRGPQEKDKYILSVKALRARKHEVQVQIDELYQRISLYDKKIQEDTKTVQELNSIIHQVREAEAFMTHEHERVILKNKLNEELETEERIKQDRVRLESDRTRFVRLQLEQAALEKVLRDEEAFYEELGKMKDKYEELNVLQKQGLIQKDLVREQKKTFSRLENERDQLDRKINQTQREIRRLSDELDHVEDDLRMRRNQKESNLNQIEITKEELVKTIQELNELQHLIPGIYSEVIANAALEKPTSIPQLKIDRESGQVKFNQARTEDGIDPTAPENYETAKYEYERLDDEFKRTNILLEQDKERAEQLRDKMETTINMRVLELQQRFKIYMSHFQFEGDIGWESYEGQRKRIHFKLYIKARKEGHRGSLEDVSIKARGGKVGKGVSGGEESLSSLLFALALLQNLQTTPGFIVLDEFDSALDENRKSKVFDLYVQELKRKLIILTPKSHEETYLNRFSKAFIVQHDPTVPKSKVIGIVKVG

SEQ ID NO: 41434 - protein, 440 aa, Brevibacillus reuszeri
MTDSLLITYINKNILKKLEYLDLKFTPALDSPFIDVNIMKKTERTYRIVGMLTLAMYDPDSEEESPDNELKKINFTTKKKVQLDDHDPITLGWLEKGWIIKELRFKKDEKTVDSMHYRQGYRLYKYEEEQIQKKKHAIDQQIQNWNESAASFEYKLDQHLLANSKKGVLTLINMINEGDIQGYEELVNSPLFPFNWSIEKRLKFLHFVMAFVQLAGNKTNFDWKEIGANYYQAIGGSKEFDLYKEEFIAQLEDWAQCPADTLGLTSLGKITPLYFSGHIAGRFSTYQFGPVHALTDLAIVEDEYCTNTSILWLVENRSILTRMAAEKNFLKEANSLILCADGHLRTSHRKCIQQLVKNSSLSQVIIWSDYDPDGLIIARELYEAVTQVRSPHIKWITPQLDVITNWQQYEEHMVAFLKQQMVEQEQVLGGVSEWKKWIAH

SEQ ID NO: 41435 - protein, 524 aa, Pseudobacteroides cellulosolvens ATCC 35603 = DSM 2933
MEDIRGYEGAAGDCLKGFRQRMESLAPFIHLSRKLSGFQKYNHIDMVSVGFSVLLFILENMLIGREECSIEDIASFLQNVIKRCYDLNLTQEESKEMAFYIRDSISGSGGETVEFNYMNLENGTGESIPVKLIDTSYYEIKKSARYKLTDQGMEMLFKTREIFSEFRINVTQMYLKQQIEKGIFSGALQTVNELNLQVRQLREKLENLLLNIRQNVLGIDFEELKLLFMKIKEQFESERREFHNIRRILKEQRQAIEKINYNDIEEKELKSLEQIKILSERLGVTTSEHDRLFKEKLDIVGEYLKTIELKLRQGVSEYIDFEKSIFDVLMMKNHNLDPLASILSPIFTNTSRNKVFNVFKALDPQRIKSDMEEVKENIDIDVLVEEREKAERQEREKRDKKVMSYLEAILMEAYSQGESKLSSALKRLDDELYRSASFDFDFYSLIVILHQNKEIDFDELQEILTKMVRDTSAYNINIYYLFDKLFKKRPESKELKRFLLLSSTKKIYFENGNEITDFVIKGVK

SEQ ID NO: 41436 - protein, 237 aa, Pseudobacteroides cellulosolvens ATCC 35603 = DSM 2933
MESLSPDSVRKAFSLYMNLIEKSKITKKDDPEGFLAFEDPEISFITRIFEEEAGIMILRSGDTLYFTPRTDNKFLGFTNEELRDKMGFSNNSELYISYLIILSIIIKFYNGENYNNKVRSMLKVEELEGFITLKLESFKAMENGEQKDEELNFNFSTISRLWLELPTYDEKIKSFSQSKGTKISFIYRTLKFLQEQGLINMDNDSEIYTTEKLDTMVISYYPESSRKKEILSFLERI

SEQ ID NO: 41437 - protein, 1473 aa, Pseudobacteroides cellulosolvens ATCC 35603 = DSM 2933
MPQINRFRIVNFRYDDDKKYIANEIYEFDGRNALINLENGGGKSVILQLALQSVMPNTSIGSRNFSDYFKVGTSPTHIMVEWKLDGTRAEYLLTGICISKNADGLRYYTYTQTYTLPHDIDIKGIEAVSRDKQVIGFSEYHNYLKRLSTEMRIPINVYSRDRQRDYRERLHTFNLFREEFGAIKIINQAEGGIDKFFEDARKSRNVIEKLIIPNIPQAEGEYSGILAETFKKHIENLKNIPLYQHNIKMYDAFCSKTASLINNLEGYGTKVEEINNAGRDILAFDNLLGIGVDRLINECESLMDNDKGFAAMIEELTYKKVSLDYQKKLMELEEIKTRHERKTEEIALLVNEIHETDRKIKYINSAIAYKDMLECRLILSEQYGKLETLTREKDDIYREYQNCIYYAYSLLCEEKKEKDKILDELNLKYMEQLNEKKELLNKLEKKNIDRDSIRDSLSSINTRLQEARERYSKITAYFAKDMTLLVEPSEGLQNIKNEKEMLFNKKETYIGEIDRWNNSNNDYVINETRIKEALASENEKKNNKEQELENFHKRFSRINRELSMYEIEGDVYSIHGSELLNALKLKADNKLGEISGKYHELIKRKILFEGCEYYVPDIEVKKVYDFLKGNGVRCIPGSLWLNNQREDLREALLHKNPLLCYSIVVEKNEMEKIKGFIKELLDMVESFPVTFIADTEEGIITSGEYSDKESKGLDRVGTMEAYVLFSKNNSFSIQPQLFSSYLAGMDKDIGKIKDEYEAIKRDVEKITGLMERCGQFIEMYPEGYLKETENFIDATLDGIRKNEAALKDFAGKRELIAKKTKENQEKIKNIEEIINEKDKDIENLSLYIELGNKIAELDKIYREEEGKRLKIEQDKNSISSSINGISKEIENTKYKMDSISQKSRDRIKLMDDISMKLTIKELSMEITGVLDEVLKRAEGLHKKIDDSSEESIRMIIDMQKKNVSDKQKFIQINGFYETDFIDGIIDYTEEELKNETKLYNELSMKKDAASEEERSLLVDEKTLEGKVDQIRSDIEKRFGHVPYEFQHIEGVDISSFNAQIDAVNKKKTRNLKAIDEKEKRRIRLLEYKGRLDDYISEKDIKINSDSRENMDSFTYGGESFCIWDILQLPVENIAVAAKGLQKQYLDLTRIISDMQMDINRSYDELYKESDWAENITIRTILENIIKKDMYNYKYVKSLFDDIILSVQNMKNAAQFQLEESLRDKDEIVERCFQKAEAIYDEVRTVDGFSKIKLDGAMRKTILIEAPALHPEEGKALMTRYIEVSISEIEKMKSEGKYDPARIDDEIAKIMSPVRLLDAVTNLNEYSIKVYKPESTLGASRYIPWEVVINWSGGEKLAGFFAMFISIISYLRYKKTGWQGSSKVIWIDNPFGQANADYLLSYIFDLAKATNTQMICLTGHMQVDIYKQFDVVYSLIHRMLAGMNMSVIQSKLVKSQGELESASYRVKHEQMTLF

SEQ ID NO: 41438 - protein, 227 aa, Pseudobacteroides cellulosolvens ATCC 35603 = DSM 2933
MLSNYMIGNSATESLKYRCTMNERSFEIFNNEKFLGAEGKVILKRLGLSLQELNCYKTLEAFFYIRFGIEESLNILIIENKDTFYSVLKYLERNQDKRIGGVKINMLIYGEGKKIVNSFSFINEVAMGTPIEKVYYFGDLDFEGVGIFNSLASKFGKHLVVPHVALYKELLLVSKEPPQLRTRQNELYMELFLMYFDSESKDRIEKILYSGKYIPQEALIFGRYKGL

SEQ ID NO: 41439 - protein, 496 aa, Clostridium homopropionicum DSM 5847
MNLSIKDITKDYDERVKRIALFEPLYKLQDKRFKDGNGNLVDCFSFGLITLLFFFENMLMRNKKNGVKELGSFFEAINKEEVNLSSEGFEELARTIIEAFRPPSGKRNSKTFYNWDTRRSEVVQYSILKASMWDNESNTQYYMLDEQGLDLIFATKEYFSEFQISINQLVLRKQLEKGEFVGALRQIDEMRLSVSNLYERIYKIKHEIQRNIISDETYERYKNTVEDINLRLNIESEEFRELREFVRETREKMSYEFKSEKDRKTYELVIQIDKELGEVHYEHSTLLKESIALKTTALQSAQESLYYAGIESFNFNQEVAARFTASPLPLEASRRIVNPFLSLEVNKSWSPLSVFSPQRINSNDKNIDKEDYFLDIDEENIKKELLHLKEDFKRLMELILQVIGDKNKIALGEIVDYIKDNEVNYILNNRIFYSFCMILHQKSPINIGEIEEENILSHGLELLKNRYRTLEAVESNTYIKVNNKFTISNMIIKLEE

SEQ ID NO: 41440 - protein, 250 aa, Clostridium homopropionicum DSM 5847
MEYSNDDVIGAFKIYSVLAKNGYADKEDLRAFLAEDHIGALVEQFAREVDCTIFKSGEYIYMIPLAVDSPFHISNESIKRNHLPNRANNLDIYLMYFSIIVLFGEFYDSYQTREATRDFLSISSWLDSINEKIESLKGHDSEKLKNMCKEQEYNWVAIMEKWEAMDDINEKVKVQDARTISRKSFLTIVKQFLIDQKLIEDIGNDEIALTEKAKVIIQKYYMEVDYNRGILEFIYSIEKDKERDLDASHI

SEQ ID NO: 41441 - protein, 1478 aa, Clostridium homopropionicum DSM 5847
MPAISKIRFTNVIYEGGAKRYNDDIFNYEGYNGAFLLENGGGKTVFIQTALQAIIPNIEVADRKIKDTLVLTGNASHIAIEWILNNNPRRYGVTAVTLFMGSNGVDFYRYTYEYSEDDKNSIENIPFVKENSNGTKRASGKEEIHEYYLDMVKNHMHAQLFDSNRKYHKHLEENFKIYHAEWRSIARINAGEGGVEAFFDNCKTTTQLVDNLLIPVIEEAMVGRGAKDFADIFENQREHFKNYKQLKGRINESKLIDKEINKYVEVFSKYHKLSEELNTEKGRVKFLNNYIKEEKTSLEDELGKAEKDIIECEKNKSELHRKELSYDIAVLEEEFKDLEKLCNQYKDELNEKKKVYEEADERLQNLQISRIKHNINEKNQKLQYLEEELENLDKNFTVEEIKINLNKSCSLLKGVFVGEKEALEKLKGNHEEKINTLEKEKQSEAEALKRKIEEKNSLNGEIIKLKTTISNLEKDIERIKNRILSSPTTDVLEREMEKWKENIVSLNSGISSYQQQIPELRHKREELKAELKTLREKEKTSQGELNNYNTIFDTISKERTELTGKLISTGIVLSEKDDIYLKESSVLSSLEAKVEALKREKENLIFEERAVYRFLDDYKENSYYTADPFLYKIYENLKSSITTLEIGAMYVKRASAVLEREIEALYKDYPYWVNSLIVDEEEENKLLEKLKDLGENIVFPMVILKEKEAREIASGNFSEKDKHKTIYPNIWKNNLSKDYFISWKQSLEGKAKTVTELRQNKESEISYFENILNSTKGFFNKYPHEYYLEVKNCILNLTQLYNEIISNIRNKELKVEELEKEERELSLKLKEAEQNLDNISGKLISAQDCIQKKKSIDNYNISIQELLNKVKNLDEEIYRVNNIIKAKEEAIKEEEKKATAVSTEIKVLEADSYYKQIEDFEPEFGNKAKSILKTEIEGLKDQLHEIQKDRKGIEDRIKETQRDISKLERDLNIKSSEAKYDIIDIEYEEFYEKEIEALIVHVKKLEKSFKAANSAYDLKNEELKKLGYKIENQKNEFYKRYDRLYDFNIPLITVNQQLLEEKKSLKTLEEELLKSSEKLKNELTKVRNSLYELEKKNERFDFLKESVKEVAILREELNNFSYEREKYVNNLIADVEALSNNLTSSEENVNRNRNDFRNFCNSKIEDIKMRQMSLNGIDYNKGYEDVIKWQKNMQDRINRTVQMLEEDIREHDKELEQFIEHLHSYLTNIVEEMKLIPKKTRIKVEEDWKEVYIFNIPTWNETEGKSELRKHINWILNQLEQDKFKSEDGRENTNLIRKEIEKWFGTKQLLRNVLKNEEIKIRCRKVRNEGTISSTSFTWETSNSWSGGEKWSKNMTLFLGLLNYLAEKRNLISNRGKIHRTVILDNPFGKASSDHVLDPVFMIAEQLGFQIIALTAHAEGAFIRKYFPVVYSCKLRYAANGESQIISKEREIKQAFFMDKEPQSLLRLNAAEQMSLFN

SEQ ID NO: 41442 - protein, 341 aa, Clostridium homopropionicum DSM 5847
MDIIINYIKNLKRKTVNLENLENIIGGGCSYEDFARGILNLVEEGLLIPINSSNNNGKKIPLCYKYRINKEALHRDSEEEIKKYLLKMEIEINLSFYLNKDEQYWRKDFPYIIKINDYIKENGIPREDATSPERSFQIIGDEKWIDEKGGKAILERMGLWHKLRINYNPEPLMIAVNPKLFNENKKYHIIVENKSIFYLLLDLLRESVFTSLTYGCGWKIVSNINNLEKQLGIEESENEIFYFGDLDFEGIAIWNNLKDKYPVKLAEIFYEKLLLQEPLDGKTNQQKNIKALSSFLDNFQDSYKKQISQVLKQGKYYPQEALKKEDLCEILNSYKDRFGGF

SEQ ID NO: 41443 - protein, 254 aa, Clostridium sp. DMHC 10
MAYTTENIQKASALFFMLLKENIVSVKEPLAEEYSNDNEMRQIVKTMAAEADLMIIDTMENLHLVSSANGSIFANSYTQMKEKYKDLKNKKYFYLANLIICVFLSEVDKENNIRIRWEEEGISYAKLEDLVNGIINSWIAREKKEESFSQDWGIALKEIDEVWNKDFSPMKNSKTKGSIDVVNTTDNRFNFIYKALKPLADQKLIYNNTKELKLIPKLELYERLDKLYHNQDRYREFMKLIEAAKEEKSNAETN

SEQ ID NO: 41444 - protein, 1497 aa, Clostridium sp. DMHC 10
MPRLTKIRIVGNKYDNFKKCHDNSIFDLTKMGEPDHTLFTLNNGSGKGVLMQLISQIMLPNTRWGKNDGNKIAGMFLNRNNQFKPYTFHVLLEWKLDTMPDRWLMTGICITAVKKLDNKEEEKEEEKIGVKYFLYTHEHYVDDPYIVENIPLYLKDERKAVSYKALEEFLGDNKRDFRKFSESDSRSTNSEYYQYLAGLGIYRSEWSILKLINKVEGGVGEYFSKAKDNKGIFDEYIIPAISENLNSQFEENKNVLKDMFKSNISITKNLPILINREVDYKNISSLLDPLIRDAEQGIIYEDKKNSCIINGNNLYCSLNSIQNNVLNEIETWEKEKSKAETRKRELLFEKDNLEYAKQIRAKKDYEGNKAFEQKEFDYINSEIDDLNEEKKKYEINKLIIPMEKDEYKKKSTLEEIEKLMNSLALKDVHGEMNKVEEEIKDKWKITQEKWSNISSQYKAYEAFLNNKEAKLKVEIKSLNEKKQSIQVNLKAIEDKKKEFNKKEKELGTEFDPFRIVYPELLLEDIKKEKEEEDKKLLTLNSKCEKLEEKINSLKLKIAEFKMKLEQYGDSKKDITKKYNEKKEEEEKLFARVLEVCKLDPLMETYSENWLQNKAFEVKKLKEEKELQEKKLYKELWENSIDLSLNTEEYWIANNDVNSVKDKIEALGIKVIYGTQFLYALHEEQKKNMLSNYPMLPFGLVISNVNEWKTIESNIDKESFLRALVPIYVRTEMNKVESVNYKLVDHKALKFVEDYDSYVSWKESLSKKELEAKETIRVVEGSIEKIGELLNAISLALKTESSAALDQKLKQIELNINENLSEISAAETGINNSTEKLNINKKNRENVDENIKKLSYQIEKLVNFIEFKNKIDKKLKEEKEAMQELNNLVSKLSEKELEKELLDKNINDENLNYERWKVKLVEPGLKDIREVVKEAEFKEINPKDNLQCSTAPNYEASKKDEIYSSISYRKSLNTKLESKNNSIALLKKNAEDIQENIDRQIKMLKKIDLNWKNYKVENISLEFAEMEFDNLAKKIKLKEKLAKEKSQSISKLEGLIEAVIKDIEKQANKILEEHQKAANVWENLNLEEKEFKIKSGIEDNSKYLARTENILKALEVRKANINNCISEIKYFEIDPLKGKTSEYDMNKIKDNEKNEVDKWIQDFKNIDQSIKNHTTNAEENFEVFLEALKNDIKDEILKHKIKEIIGDKTNIGNFTSNKDSFKSMKEHAEREINQIKTDKLEAEEAKEQWVSRAARQAIKISECLKEMVNKMVYVNENNYAFKLVRLKGEELLPKEESDINILLNEYFIECIEKLEKKDADFDNLDNKELNELMSDKKIFSKALRGKYPSLEVYKMSEKNEFLYAKPQDYHYATWGAVNSGEGDSPEGSGGQTLSINTFIIMMLMNYKKRTLGNENPWTVLMLDNPFGKASGAHVLDPIFTIANKLNFQIIAFAAPEIIKTEISERFPVFWALKINNEEEDGNLGNVVGRVVHGGRVRG

SEQ ID NO: 41445 - protein, 207 aa, Clostridium sp. DMHC 10
MKNFLTDSDNGKKDNKVLKRLSLSLEDIKAKQYGEQFIYWNRGVSEIKTIIILENHSTFFSFKRAVQKGIKVFGIAPDALIFGYGKKIIKSFSFLDEIAKTSEVTVYYFGDMDPDGYFIYKALKDKYNDVNISLLVQAYVELIKVHKKYKSKDQQKNEECLKCILKEFEEKNYGRYKDYIVELWKENCRIPQEFITYEYLLGLEGGV

SEQ ID NO: 41446 - protein, 503 aa, Streptomyces decoyicus
MRDETWETAVRADEGLSRRAKALACTVPLHELDAHKGRLEWADAKVYLMAEIALHTIDQVAIAMDFDTGADHQHVLERVQRFVALQAPERSSAEHARVAEWVLESLVNLGDVERSFHRPYGSLDLDGVYRVYTFDFKLIEERRDDEGKLYLRASDEALNVLVGALDTDVESAQIAAEVKLENLIKRGRLADAKLVAEQARIRTIQCGEMIRAQLEATERDVQTVDWQEKVPTLLDAALEHVEERVRAERAISTNMAEARDDAEDPAYKRRAAELVDIVDDCVRRHMKLHSFLMGARDFFREQQDRQQFTHVLRPQVPDLFGELLKPVLDLAIADAGRPTDRFFTESVGPTARNVPDLAALVCLLLRPAPERSRFAGEVPDPELHPLEEQKGFTDRQWELAESLLDLPDRVRALSGLLDEAAALDPELPELVALLGLHAFSPQTGTALRRRDDHVLLAVRDDNELNSQSFLGDDLLLTTARLKPAGADQPVPEHTTWTHGGDDR

SEQ ID NO: 41447 - protein, 1488 aa, Streptomyces decoyicus
MYYELSRIRLCSVGPAGARFQDVTLDFSGVGKPITHEQDDLFGSATQTLRPSPASVVFLENGGGKSVLLKLVFSVLLPGWRPVKGANDPRLLGDYVLAQDVSHVVLEWTHSLTGQVLVTGKVMAWKNQTASQIADNLQEGWYYFLPQESLSLDSLPITDDNRYLSFDAYRRQLHDLHDEDPRLGLNWPKTQTAWTELLGKLDIDSELFQYQRVMNRDEGEAVRAFDLDSDASFVDFLLEAVAQHDGLAELAGLVAKHVHKLAQRQTLLLEQEFVERVLDMLEPLTEAARAVDGAREDVARAQGDLENFASRVKRRVQDDENLLRELDEQAVRLKGDLDAAVHLAERWRLTAAEQQVTLAAMHLTNAEADVDRTISVRKKANAVVAGWQATAVVLRHQEKSGEERALRDLVNAGEEEARPALRERDAAARAFAGGLLALVRTARSQALSEDAEAEEHEKAEDKARGEREEALKAAAGAQSETDNLNQLIQGAGSDAEQAVLAGLAGNVEGVPQAAKDALRALDDVQTKIRTLQEEEDSLSTEQSAAQGELDKAKEDEATVRGRAEGIQADLDQVVGLKAELESESRLTELLDGETPDLKRDAQALANRLGEVVTEVEREQITLRVEEARDQQARLALADGRLLPPPDLVTKACQLLLAEGIDAWPGWEHLADYPKRKREEFIARVPHLVSGILLNNPDRLAEARHLLARTAPGATAYVAVGTTKAFEDLATGQESGTDFFLPFHPALHDPDAAEAEHQAIEQRHAVRVGRLDRLTASKRADDVLRQRIIAWQEKYPAGVLAGLRELLAPATEEVVAAQKLTTDRQRTVTALIRRRTENSRNQRAAHDEFERLGEASRRLTALAERMALVPQWTDALQVGEATLRHQNDLAEKAKNDAAEHRRLAAEYKGAAGQQRRIADEAHKEWAGIPGVQELILDEGVPHTPIPLLRSAFTTACDNYAKADVPEELRRDLGRAEKEATAARTEYTALDDTTRDHAHRLLLTPEATDAVTRAEARQRAVRAQEAAEKAAGQAQLLQGKCESTLRERQHELRPLARDGLIAMPLPSQPHNIIAAQEAVARAITEHAAAATFEKESRTQHEGAERRLGLAKDAAKELAVLATTLESITPQEPATEPYGGDSAAALGEHRRLDQAKNAAQENLTKHERTLRIANDRLTRHAAKDTYESLATPVRRQILNLPSEQVTAQAPGWRIALTARLRSLADDLDQIGRHRQVIIDHLKGEVDRTLAILRSAQRVSTLPRSLGDWAEQEFLQFSFERLTKELLAARMGEVVDEAAVGRTGDGRRVQRDGLSLLLRGVHAAVPKGFKVFVLKPDIVLRTERVRVSKVKKIFSGGQQLTAAILLYCTMASLRANNQGRKRSRHAGVLFLDNPIGRANADYLLDLQRSVAEALGVQLIYTTGLFDESALGQFPLIIRLRNDADLRASLKYLIVDERIRNRLDRLDPPDGTGRLSAARVFSRDAEDPQELGR

SEQ ID NO: 41448 - protein, 272 aa, Streptomyces decoyicus
MPRWHHELHWLADQWRRATPKQRAAYIAINLWLKSDPDLFAVPIRERVLEIFATFGSETDFPMPEKTFDELKSGILFSDPERLDTVLRTFRPPPPLLTETFPLEEADGHYRRVGTGDILLVVENSTTWWSIVECLPVHHRLGYVAWGLGGTFRASVRAITAEHRISEIRYFGDLDLSGVRIPLSASRTSLGLGLPPVQPTKVLYEALLALGRPHAAKEAPASLAEAAELADWLPTTQRGEVIRLLAEGKRLAQEWVGYRFLSRSTDWYVDIR

SEQ ID NO: 41449 - protein, 501 aa, Sporosarcina globispora
MNESWEGFAQRMQRLNPLFELGRGMEVGELKPHIQTILMQVLLTIFYRELNDDDHRRKSDIKYMVEDSIKQMKLLGDEKQIERITSGLLYQGKEEYSKPFEALYYDEIRQSWETQVFRYVTMDELYTNLEMGGSIVYKLTDVSQEMIFMSREMAEEFSITIEQLYSMQLIKNGNFRKATRNLDHLISRVNRLMAKEFSFQKEMINNPKILLMEEEMQRADNRTEIEKQFEEEKNHFRTISSMIEKTKRRNEEDDLIQNELILLQEKIGHTRQLHDRFAKLVIQNISYEMKLKAENPSLFWETSLVSFREHIYENWFMKEGVSSFNHVEKVLSPLFSPKNEFILPLDWIWGEQEFDEKQLTETLAEEEEKESVTHQRVTNWNSVIKAWSYVFQYLQTYGEFSLADLSTLPLEIQDLWFEESETIDLWMMFDKKPLKVQVLHRKEETLSDEREILLYKLMQEYPQFQVFEGLKIYTEFDYRAEPFLWYQMKITPFKICVKEEK

SEQ ID NO: 41450 - protein, 248 aa, Sporosarcina globispora
MSAETIKKASAVYFTLLKDKVIDENSEHFQAYFDPDVRQTVLLLADESGTYIIESPKRIQLVVQPTGSVFATNFTHMKDRHKQVETKKHFHLMSVVIMSFLASIDRNQAAKIRTKREGISFYTLERQVNDVIMNWDSILKTKPDFGEDEKIDMKDVVTTWKYMEVDTDDYGAKKANRRTRIGLIASAMRLLETEGLIVILDREDIPKAIPKQELFERIEYLYHDYDRYEMFKELMKTEEDLHAENPSN

SEQ ID NO: 41451 - protein, 1486 aa, Sporosarcina globispora
MPKIHRIRIAGLKYDGMQKQYKDTTFNFHNEETSTNGLISMMNGGGKGVFLQTIFQILKPGTSWGKQNNRYYQQFFFNNKEQFIPYTFHVLIQWELDGSDRRHLVTGGMFSAEQRISMNEESGESNALEQEAKIVPNITFYTREFERKEEASLDHIPLYEDGELADTEGLKDYLKWNGYDVYRDTKKHYRILDTYGINRKDWDIMKDINKDEGGVGKFFEGAEDDHSLFQKRIIPTVSQVLHRTEHQKNDLVEIFKSQASIAKDLPVLLKREQAHKEFLEDILPFEESLVKGAEHKKIVEDSIKVGRQLLGALEHLKKTEEETLLELEKEIEKLTGKQVDLRFQKDNLEYAKAHREVLDWEKKLAEEQKKHLILLEAVKEKQGRKDELAFQLLLKEWHEGEQSIRALSQQIAKLEQNSGLEQVNQRMDEIKREAVQQWEKSNTAIREAVQHYSGYQKFLKKKANDLSKLDKQKTQEIAQLRTEIDFLYTQLHEFESKEENLVKEFGDRLTYDLQGFIENLNKQIETKRVALNDLQAKEKQSNEKQNQLAASHGTLAQSIQFSEEKCEQLKGKTEDQHGREARLADKLHGLLDEVPAQFTNALLSKYALQVEELLVQNREQGEEIKKALWETQLDYALNDEHFWIANNDVKELKEWIDEKTGIDVFYGSQFLQSLKPDEIANHLLAHPLLPYGLVVSRPQWEKINKQVLAGRMFKSPVPIFMREEMTDDHQQGSFVMITGTEKDLLTDKNQFTNWKIKIAKQIEEKKDTLAELEKTETSLRRILKEIDRLLSNDLAGDIEKALKREQEALLSKKTELQAIIVQEEKEKELQLGIREQLEKTKGKIENLTKNVETLEDFNHEKTLQQENKRVKQEKEKQKEAFKGIQKELGNEHQAIVDLQEKWSQTYLEWKLSAEQNIKEISFFIESAAFPAAEKAEASEEVPRLSLYILEEITGSIGELKQLQKSKEEQASELLAIQATRESEQKQQKKLEKKLQALNNEWKEASEPDEPMSILEKMVQTAAKESKAAEKEEREQEKAVTVADTSLKHAKAQRDKTAKKVAKHDKQPEEWEELDLEVKTVEITDQTKQTNTEIKKTEELKKESEQSIADYENNQLHLSVILKEEAAAFADEDIEKIKSHGKQSIISWSEKHQGIQDEGQEKHAKIEQSLRNLKLNIEGKDWEIRFKNEVLTTLDHMDTRHYEHIQNVVQKMKHFSQSGLEQLERDKERAEKAQNFWASRASMKVMSISEAIRSMIAKMKLKNERGSFPLVQLKEDILPKKAEDVEPLLKQHFVSAINKITKRFEMIDDNNLELDQEIKQLISDEQILFVSLRNRYPELLVYNMRTDNAFMYGKPQREHYSTWQTINQGSKTKSDGSGGQKLSARMVMMMMLLSVKSETDQSWVPLVCDNPFGQAASAHVLDPIFAVADKLKFQFIVVTPPELVKTEISQRFDAYYKLDFIREKGKEIVSDTIVPAFRIYQGEEVVQ

SEQ ID NO: 41452 - protein, 357 aa, Sporosarcina globispora
MNKINIIETRVRSFIEDIQHPKQKKKLNINDLEFQLRRLLNDYYEMDGYSLFYGAIQSLQGEGQLTPIHNNQYNGRTPSLPLFYWVNVKVQADKWDRLEMMKLSDMFDFSFYERHPEWQTKEEWSRIQNLYAFLQSGQEREIVSLEERSLELFGHEKFLQDGISFPEGKGFLARIGVSEEQLKVVKYGEPFVFWMKQGKEINDVQRVLIVENLSFFHTCIQLLEANQLDYEPELIIYGEGTKIERSFSFFFKISPAKSHLFYYAGDLDAAGYGIMTRLIEKYPDCCIQPALKIYRKMLECLDQRNEQKSGQLQNLKYRETFFDWFTEEERELLMQLWQENKRIPQEVLTIETWRRWM

SEQ ID NO: 41453 - protein, 470 aa, Lysinibacillus sp. FJAT-14745
MDKMDVKVPISIFTSDYQTAEFMKSMRDLASLAGVLKELSTEKMYDSPIEIIRFLNVIQLINEASLGIKDSIDNEEILYYRYQSTYSQDNKPPTLAQITRMLTILERNNWIIKQSRQIKMRDRGKNLMDGLIRMGNDALAYYLQDDIGRSLFQARRDAEISAAYDDQGISGGNKIASMIYNVEEAIKQLEERQLELLADRNALPQLEKINQLMLELETKLNERLQQFGTVEESTKMSDLMRRGTAAISKGTSLSLSLLTKYIRFVNMQLTPTADTISPEKVRQFILAMHSPEANTNIPTAHDILSFMEQNQYEQEAMDGLWVPVKFAAPIGPQDITDAVYYLQTYEPKLEKPMSHQLEHEYEETEMDVRPIKEALQDASWKMTQSLIDTERIENYLTEHGETEMEELIVESSSNKWHDAILSLLAVSALTSNNKVEQQPIEQAKDYEKQWEWIDDDDKRYTVRQYPYDDE

SEQ ID NO: 41454 - protein, 223 aa, Lysinibacillus sp. FJAT-14745
MMTNDIPFDNTLMMMNSLKGYLTTEEELAFMQLLFSSSASIKGANYGLAKKDLAKMLGINNGDDEAFHSFINRLNAALSRYFRVIYDARRDRVIVMMHVTAKHAKSTLSSEALAIMLYLFYHQEVLGHEFTLLHQILVDFGHESLNANRKLKNNIDQLKKIGAVTDYESVTEEAFMLTAIGVHMFSESFLRRTTEFAQETQLSKEEVMKFFNRYNLHIEEENE

SEQ ID NO: 41455 - protein, 1065 aa, Lysinibacillus sp. FJAT-14745
MIPYKLKIQGVRDYSPRSIYFGEPDEHILITGPNGVGKSTLTFCLGAVLHSSKVELEGLRSTNLKVNDPWYARITLVFLNDGRTKIDGPKFIAFQLTVNQDTKNSPIQREYEVLNGPDEANLTSHARYASGGTAGRTFKAYREDLRVRYKIEPDVFYLIWYQQEVNQFAAMYPEERFRKFSDMFEISDMQKEWEASLEKIKEVRMEIEYLKGIQKGAELSVNAAQTELNKYLDNKKRIFTSGQKYYTLLHQMIAYYSTSIEKASEQKANYQVEKEKLVVSRQQLKHNISGLEQQRSQLSQDVAALSQQLTQIADQLQQQQNEDTQQQKSQQQLEQQLEAIDEKRKHLRFDAETAQRKLEETKNQLEMVTNQLGELSNQQTQLRKQERELDHEKVLLQMTSSQLKDQITKAEKHKAIYVSSVQIEQKINTLSLQNERDFEQIQRLKMELKMMEQNVKQYEQKKVVSKRQQQGLLHLKRQQLEAYPLRELIELTPSAPLQLEKQLEGIKYTIFYVGKNYKPVNDLYYVSLQQLVPTESISKLPEYGLQIRSDLTEQQGNYANKALWWVKQFFLESPKIEQGLLYDTRGIRGAQEAAQYILSDVAIERLLQEVQQTYSKTKNEQQQLEQQYAENQRQLKQLQGHLHTMQLAESTLLKQTDYASYIQQLELVEQKLSALYDEQTAIEFQQDKLKSEHSEGKYNLDFYEQQWKIHEELGAFAEQQMQLQQIEQARKYLQQNIRALTTEQEIKENEITQQKRKQLRLGEQQQQFYSDLKIVESQITGYELTIKKAKEKLELDETMKSRCELDMIELEQVLPQEAQQLDDQLATNLSLTMLQAESEQAKAELRNARLEKINENAQQNYDQQKADFDKKNTDLAKSEQLLESNTIRANELEDRLETTISMHLIKINTLFQKYMDLFQFEGQVEKERIEEKSGRVNFRLYIKARKIGHQGALEDVSMKARSGKVGLGVSGGEESLSSLLFALALLQNLATSPGYIVLDEFDSALDDERKNKVFNLYAEELQRKLIIVSPKGHDETYYNCFSKVFIVEHDATIPKSTIRGIQNKK

SEQ ID NO: 41456 - protein, 503 aa, Bacillus sp. FJAT-18017
MEVNEIADITSGFKERMRRLALFDPLYELERKKVKDQLDEPIDMKGLGLLSLLFFFEQKIIRSTKAGTKDLALFLQQLTARQYTLDFQACEEIASSIILTFRPTSGKKRSYSFFDWELSREEDLEYSLLKANNFDSKTNTQYYTLDEDGLELIFATKEFYSEFQLSINQLMLRKQLEKGEFRGALRQINEMRIDVESLNERMVKLRYEIQRSIVSEDTYERYKQLLEDIHARLERENEEFTELRQFVKETKDRLYEKDYHKKEARTYAFVLEITNQLEEVHYEHSRLLEQSIELKNHTLKAAQESLYYTGIDAFNFDQDINARLISTPLPLEVMKGLLHPFLRVHQEKSWSPLTLFAEQNIREDREESVEMGFMELGDQTENDYQEKLRKNYGTIMKLTLEALDEGITELSGILGYIRKKEQNLLNKRFFYDFWLILHQRSPITKGKVESEEEGSNNSLDDAMAVLGSRTLVVLERDETLHVTERFSIQEMEFAMMEGLEDEL

SEQ ID NO: 41457 - protein, 247 aa, Bacillus sp. FJAT-18017
MNYSESKVMQTFELYMVLARDGHGGFEFLSLYIADDDIRALVDGFAHKVDCVVVPAGEKMYMIPKTKLSPFHVNNDYIKRTYLRSGATNADLYLLYFASIVLFGAFYDSYQTLEPTRDFLQLDEWARLVHERIEMLKELDMEKLKQHEQEFSYNWGQIVDKWEDMNDIKESAKKQRGNTISRLSFMDNAKRFLHAQELIEEIGNNEMVLTEKAKAIVQRFFMEVEFNKGILEFIYQWEEETEYADHQ

SEQ ID NO: 41458 - protein, 1470 aa, Bacillus sp. FJAT-18017
MPTISKIRFTNVIYEDGMKRYNDETFKFDGYNGAILLENGGGKTVFIQTALQAVIPHTSLADRKIKQTLQLDNYPAHIAIEWILSESPRQYLVTCVSLYLTKDGLDSYRYVYEYMAGDKHGIDNIPFVRKESNRPSDRGEISDYYFSMAQQYMNAHTFPTIKGFQQHIEKQYHIIPVEWESIVKINSTEGGVEAFFDECKQTNQLFDRLLIPTVEEAIAGHNSTTFADTFEKHRASFKLYKELKEQIEENKAIGEQLNRYASTYEGLFSRQQEYEQVKGRAKAILEKIKLQDENSKQELQNLIHKMKIWEEEETESKKKHLSLELYKDRLFLKEIEAEWKEAKYRLSLGEGSLDAAKKQFHSLKLAQLKKEWKEAGEALDFHKGKLTLLDQNEDIQDINDRLDENSRELKGYFEQEVEEVLKQIRDLKLEMKPIEDAIGQIDKDMLVQQEMLGRTNTTLDKNAGAMEIMESQMNKIKQQILSKPNEESVRENLPKWEQRLVYLDKEIVQLKNENKRIAGLLIEQRNKQERLESEKNNLGETHNLLKQEVERADLAQEKMKGVLAGLYPQWTLMDSLYLKQESILRQVEDELVRLERERETSLFRERIAFRRIDDYGEQNVFFADPFLEKQLRKWTGQFGFLMTGVQFIQSLEQPDREVAGRYPFWPAALVTRAADLDKVVSKIQSIEQQLQVPIHVLSIEQAGGFIRGEIPDMNVVEPDHWRHNGQIDVFQEWKRAIRSHAENARQARLEIERHIQKWKNAEDKLLAFLHEYSYEHLQGQKNQLNELSQMIQHLEVQLRETRAFISENENRLKTQEEKIKVYTDELNGLEGKLSQARDYLHTEQERDKLASQQERLSEEKIGYERLLNRYKEQREGLIEELEIKRDEAKEAAGYHTRLIDDLIFQEVKTAQALYTGKSKRILQEERDELKLQLRQISSSRNEIELKVIQVEKDITRCLKGMDDIRLENGSLDEELVFPPNGNERIVALRNRIKELELSVKQEKENYDAQNTRKIKQETAVESALNKFEQAFPLGVPLSFEGNVKETESKLKEENRQLKERRAFLKQEEVRVQGELTSLENAFHQLDRFEEAHHFKGPSVQAAVLSENELQAFAYERPAFIKEATDQLVKVKNLVGIEWERVGKAKDAFMTFCKNKISNVKLREMARQGIDSKKTYQEVLEFQGHMQKRIQTAIKYNEATIIDHDRQLEQFVTHINSHLLTIAEELSIIPKKTKVKVDDKWKEVFHFSIPEWTREEGKSRIRKHVEWILEQLDSDRYLNTDGAEDYGKVRKEIETWTHSKQLLRIVMNNESMKVTCRKVTNDNQVTTRSYSWEQTNAWSGGEKWSKNMTLFLGILNYVSEKRQHSVTKAKRHRVVIMDNPFGKASSDHVLNPVFFIAEQLGFQIIALTAHAEGKFLRDYFPVIYSCRLRKAADSNKQIMTKVKQLHQAYFQDHEPQALERLGEMEQMELFS

SEQ ID NO: 41459 - protein, 339 aa, Bacillus sp. FJAT-18017
MKNAIRNKLTGYRRKTIELSELEAMLDNINLPYDQFASLILSLEVDGVIEMVRAKGRNTRNPSLAYTYRIHAHRLKQDLHNELIKYRLLLHSSIQLDTYFSGEPSVWEDDLPYIMKIHRYIEENGFPEYEAPAPERSVDLVGDEKWITDKHGEELLKRIGLWTHMKVIPVADPLMYAINPKALCREKQLHLIVENKTTFQGLLDALPMTMFTTLIYGSGNKIIKSIEQFDRQLPLPDAEHIFYYFGDIDRSGIFIWYILNQKVPVQLYMPFYTACMTKGSLLGKTNQRSDKEAIEQFLSFFSKEEEIRLQAILDNGQYFPQEVLRTNELQEIWRQHHGS

SEQ ID NO: 41460 - protein, 471 aa, Bacillus decisifrondis
MDTVKRAPISIFNVESNTAELKTSMRDIASLAGVLNELGSQQIYESPLEILRFLNTIQLLYEESLGLAGVIEDTEMLYYRYRNTYIDDAPPTIKQLEHLIYILSRNSWLTKQTRQIKLLDRGKRMMDALIRLANDSLAYYLQDDIGRSLFQARRDAELSAAYDDNGISGGNKIASMIHNVEDAIQKLELRQLEFFADRNALPQLEIIHQLMQELEIKMQERLSQFRTVEESLVMSELVQRGTAVLSKGTALSLGMLTKYIRFVTMQDTPLSDSISPEKIRTFIVNMYNPPIDSNIPNAYDLFSFMEQAQYEDEELDGIWMPIKFAAPIGGQDIDDAIHYLETYEPKVNDPIETEAEIDFEETIVEGESVQQLFDDAAWQMTKAVINTDIIEHYLDVHGESELEEVMIESSSAEWGDAIRSLLAVSALTSKQKVNMKEVLDTKQFDKRWEWVEDDDRRFTLQRHKRTTRDNE

SEQ ID NO: 41461 - protein, 226 aa, Bacillus decisifrondis
MTTDDLHYNDINAQLATMSNLRAYLSAEEELAFMQLLFSSSASVLGSNYGLRRKDLEKLLNIKNDDKAFYSFIERVNAAVHRYFRVIYDEKRTRVIVMMRVSAKDAKSTLSKEALAILLYMFYQQEVLNHEYTLVQQILTDFGHELLNASAKLLKNIDQLKKIGAVEENEISKNEKAYSLTAIGVHIFSDSFLRRTAEFAQSTQLNKEEVLKFFKRYNLYIREDAL

SEQ ID NO: 41462 - protein, 1068 aa, Bacillus decisifrondis
MIPYRLQFSGIRDYKPTRIVFGEADDHILITGPNGTGKSTISFCMGAVLYSSKIDLEGLRSNNLPSNQKWKAMAELTFKNEGPSRIDAAPFVSFRLVIEQDANRGALQREYQVLTGETEDALTVSDIYRSGDVNQRNFTTYKEDLQFKYKIDSDLFYLIWYQQEVNQFAVMAPEERFRRFSEMHNITEIQQSWETAIEGVKELEQELAAAKTVVKQAEFNLKLAKEEFDRLKNNKARLYDAGKAHILYTMTLVQLYNNQKQELKEKQKKHTDIHQDTEEKIIQIKKQIEKAKLLLQELHKKQLKMDEEKRSKSTLLEQLFKKRETLIATEQELKAQLVHTEEQRKQLRFTEDVTKANFNDAQQKLAIIERQYKQLQQQLINLTVQKDELNENRLTLKWELEEIEKAEQEAIALLAEHTSAHQVQQKITHLEQQIQDYYKKKVSLEQALENTTIEITQRENNQIYSARQLAGLQQFKQRDIPAYTFRDLVTLAEGATIEHENRLNSIKYTIFYDAKVKVAFNDVYHVSLRSIVPERFTTSLPAQKLVVRQGLSETEQNFAVKALWWVQQFFDMQAPKIEGDLLVDESGYRGAQEKNTVILNDKMLTEQLHKMRKQRTQLEVQLTAATTQFKENQLNLQKLNSIIKDVQKAEASVVDAEFKHHKLQYKAKLDEQFVALQKQEIQMTTALQNEQEKKIAIQFELEKLKAELGIYEQLGALKKVQEQLAKTKSELTEMNRTIDESNSTVNQLKEESYKLHDVCRQKESDIRSLKRDLTDAENDVQGTKKMLVKYQEEFEVAEASILQEQLCLEELATIIPDIFAEVQEVPLVINSTVTKLKNDNTTARINFENARAEKVNPEAERNYIAVKDDFDIKKETVDQTQEYLEIHRNRALENENRLETTINMNVLKINNLFSKYMDEFQFEGKIEYERFEDKKGRTIFKLYIKARKIGHSGRLEDVGTKARHGKLGKGVSGGEESLSSLLFALALLQNLNTSPSFIVLDEFDSALDEERKEKVFDLYVNELQRKLIILSPKAHDDHYYNKFSTVVVVEHDSAVPISRTKTIRLLTH

SEQ ID NO: 41463 - protein, 412 aa, Bacillus decisifrondis
MIEQFLASNFVKNREHLEVPPKYITDTIKQYTVAKQTARTYRNVSFLKVGQLTKTMPPQGLLNYKFTKNAKRKLSEDFSTIQSWITEGWIIEEIVFAQDGRTAKAIHYRIGPSLKYYFDAQNEQQTQKLENYALQLQKSADIQPIEELQQVVQQLNELVAMPIEKLTHTTQLLSHWSIEKRLRFLHFSIGFFQLANKGVLFDFKEIGATLFDKIGGSKVFDREQKEFIEELERVFSIQTSDCGLISLGKITPVFFAGELTGTFSQYQQGVIHALTDDAILKDTYKTEASIIWLVENRAILTRMAKETSFLQCTNAFILCLDGQIRSAHKMLIRQLVTTQTVIIWTDFDVAGLTIAKHAVQMINTPYKIIARDNRTFSDIEAYKKWLLGELEIAEHEQEQQLGDVEQWMKWIQ

SEQ ID NO: 41464 - protein, 498 aa, Streptomyces sp. NRRL F-2295
MNDHGGDRKAWADEGLTRRLKALACTAPLHDLDIRKAKLPWLVGAQYQMAEVALQIIDHVAIAMDYDTGANHEQVLLRAGGFVGWQEPERPADEHIRVAGWVLDSLINVREADRGFRRFYGEVDGAGAYALRKWDFKLIEERSDSNGDLYLRASNEALNVLVGALDTDVESAQIAAEVRLRNLIGRGRLADAKAVAEQARIRTIQYAEIIRSQLDATSRNVTTVDWTDEIPDLLNEALDHVDHRLQEESAIARSVSTERDQSEDPVRRRQAADLVDILDDCVRRHTRLQTRLRGARTLFLDEQDRQQFSGTALRAPVDVYGDLLQPVLGLTLADASSPVSSFYEQSVGPTVDDQFCLATLVPALLAPSPERARFTGEDEEPELVPVVEVGGYTDEQQRVAESLLDLTDEARSLSELLEEAASIDPELPDLLVLLALRAFSPQLGAALSEEADRVLLAVSVGIPLDSQGFEGDDLLLTSAAFDRAALDADRLERNSGRS

SEQ ID NO: 41465 - protein, 1488 aa, Streptomyces sp. NRRL F-2295
MYELSRVRLRTVGPAGARFHDVILDLSGAGRPVGAEQEALFDTAVTTRRPSPASLILLENGGGKSVLLKLVFSVVLPGRRHTVGTTNTRVLEKFVMPKDVSHIVLEWMNPLTGELLLTGKVLAWRNQIASEVADNLRERWYCLQPSDEIHLSTLPMAVGAKSCTLDTYRDELQEAYAADQSLALYWTRHQRDWTNRLQLLELDPELFRYQREMNVDEGEAANWLKLDSDVKFVDFLLRAIVKSDEMDDLAALVTEHVERLAGRGLLLTEQEFVAGAIDLLSPIAQQAEAARWSRRRAEQAARDVAELGRRLRVRARNEHDVVLGRRAKLAKSQEELDELTREAERAKAVAAELRRYLADLKHQAAQRELRTREQALSRARALVEAWRETSTVHEYDDSIAQVKALTDLIGAEEEKARPALKERDDAARRLARSLWATADEAAQTASDELKQVSTLEREKSAAQERARRAYRDATTAEHEAAKFDQLVTRLREDIEAAVTDGLLHDAAALSRTVETVQEERVNAAQRVTDLEREWAELADREALAQDELRKAESEAGDLRGRRKQLSARLEEVRTQTARLETTPRLVALLGVPDIDLERDIASLLEALNAARREAERERTELRVAESIDEQARLALAAGDLLPPAQVVSDACKALEDAKVVAVAGWRYLAAIPDADRRRDIVERLPHLAAGILLHDPEDVDRAREVLTALRPQPTVFVSVATTRTFTDPEAELTDGVEVVIPPHPALYDVDAAAVEHEAIDARHAVRTARAEELTARIEQDGNLTYALTDWRTRYPEGSITVLIEEHAGVVRRLIVADAKVTERQEALEALQERRQKIKEELPPLRETRDSLTKRLVRLEELADRHGHLAEWTERAASEKERMRERQEAAGKAEDEVIELQKLVTHHQRRADEHQRTVRIVNDDRAKLPGSEDVRRSDPVPELSTALLRSMYDQAAARYLRVQVGSDLLEERERANERAAKAKQGYFKLSEELRNSSAALLRSPEGSDEAARATALSSAVHAARAAETAARNAAVAASRCADELTDAEDRATMRVVLPKYPADIDSCTEAVDEADRQQNSSARKLAGQHEVHTRLGHQLEGVEASAKTFQFIVDGFTKDVPEGEGNAADIAPYEGDADAAQDLVTRLTKERRTRETKAHTDEQALRTATERLTHHAGAEEFKDLHVRVQTQIRIAGWETVATRATEWSDALRPRLRALTEEIDQTERHRTLIVRNLKAKVDKALALLRQAQRMSRLPASLDDWAAQEFLRFRFTPAQDDTAQLHIGEVIDEAAKGHTTDGRSVRRDGMSLLLAGVRAAVPRGFRIDMLKPDAVLRNERIRVSEIKDVFSGGQHLTAAILLYCTMAALRASNRGRVRDTHSGVLFLDNPIGRANADYLLALQRKVAEALGVQLIYTTGLSDDGTLRRFPLILRLRNDADLRAGRKYLTVTDRIQATLDALPESDGTGSVTTTRIFKRETEDGHTREAQTE

SEQ ID NO: 41466 - protein, 375 aa, Streptomyces sp. NRRL F-2295
MGTPVKHRQSEFIRHLRAGATEAGWKGARRTSVVLDDIWIAFRKVNNRNPDGEFEPLLMSRLLDELEEHGLIEQMKQRTRDKVSLPLKIWLCATAPPRPSAPPMPHWHPDLYQLAREWPSATLKQRSAYVAVNHWLMSDPDPFPVPLRERALEIFGTYGSEADFPMPEKTFDTLRSGPIFGDSDRLHTTLRTFTTHPPLLTETFLTEIGDGYYQRVGGGDILLVVENSATWWSLVHSLPGNHRLGYVAWGLGGTFRASVNTLADRHGIGEIRYFGDLDLSGIRIPYAASKTASERGLPTVQPTERLYGALLELGRARGAKEKAIDAGEARALVKWMPAAHRAKVVGLLVAGQRLAQEWVGYRYLTRNTAWHADLV

SEQ ID NO: 41467 - protein, 449 aa, Nocardia sp. NRRL S-836
MIDYVVLNQASLDGSVSPAAVVDHLTQVARRMNPSDPRRPWAKVAKLVLGTVLNDGRPHQATWVEPAADDETGERAEAFRFRLLRLTDGDEGAAITATDQAIVLYLQALNTDLADRALALKLMVEIQMKAGEFAKALASSRQATRTAQGLSASLRERLEDTRRDIRAVDWRGEMPTWLTDVLAQLSTQLERDRQLRDLAERSSANPAARDTCREIVREVRRGEDVWLRLERYVQRAIPVFLAAQEVQRFQPRGLAAAIDLARDVLRPLLTADDDSFALSTHELAAGVAPPVVPSCWGLDELCSVLLRAPAIREQPDPEVDDPGDLGDAVGDSVPDDVARCAADILASAAHRPTRLSELLAVARSRAAEVDDPLRLLDVVWGASLWVFVTGDDTAPDDRPRSEDLAAALAPLVALDQGISLVDDRYRGPDLVLATSVALDRMDLDASGAA

SEQ ID NO: 41468 - protein, 1443 aa, Nocardia sp. NRRL S-836
MFRLRRLYLDSIGVPENRFSDLLVDLTDVAGEPCDAIVWLRNGAGKTTMLSLLLALILPDRRDFLATRTKKRTLEDLVQSKDTAHVVAEWADPAGNLLLTGAVYEWDGRVRPRDYNGPGKDKLRRSWWCVHPDPSVEGSTLDDLPFTLRSSGRYDRERFRSHINELAALGVNAVVADQTIGEWHNALRERNFDPDLFHYFTEVNAAEGGIDGLFAEIDSPGAFVRYLLRFVGDKQRVAPVRELLADTAAEIAKRPVYQAEKEFCTTAAPKVVALGEAHQAVVNASKNRDGVSVRAAGFKRALYQAEEVAQGRRDEAARLVEDLSSRLTDLKGGVDAARRRRDEYRRIAVDFLVRSAKTRLAEAQGEVHAAGLEVRAWAAVEDHLVLEIAKARLATTKEALLDAADQVQPLVRRAEAAKALVAGALENEIAKADRSLKTMRSALDDARGDRAKAQEALDAANERLAELKSEEDSLHDHIARFQAEKQQLVTEGIITRDESIDAAEARWREEERAARQDVERLRAAQVAALEEISAGEKRLALARTGTTKARDVHQPLAEDLRRLTRRAAELADDARLRELLQIDLVDLAHGVDDVLDALAGAVAAAELQAITVREELARDERAILGLEQTDLLPPRPEVEKVLHELNRLGVTAHSGWHYLAKHVPADEHAAVIAQLPDVVDGVVVYGDPSGAAAEVTTAVEDVVVLAPATAFVNREAPRVVLGPARAQHDPDAASAELERRRGRHTADGELLARLSEQRGHDATRIARIEAFVGELPADGIDGLRERTVAAESALAQASVHEDTVSEELRTTRERADEASGLLADRREQLARIGAVLPRVAVLAAGERDVVEPAKARLAAIPDERSETAAQAGRAHQRREDAAQIIERLVTDIRELDRRRTEWTGRREGLPRPATPTDLALEAAEAVHAEAQRQLREEFPERELRRAVEDAEREVVQVGRAWNTHPEEVQRSALELVASEASADHDLRARAAARAAERLERANQAVGAARTDLDTARRKQAEAPVSKLRGTDEIEQPTDQEHAERLAAAAEAEASEGQLRLGQTEKDRDAAADAVRKAETRAGLLRDQADKLRQVAAADQPSGTMPDNDEETRAVVGHLVAELEKVQEAYVAADRARAVAVHDLRTWAGQDRFAAVAEDEHGQAVHRLREMFRGEHVIERVAALAGELAFDLETREKAIAQQLEQVATHKNNVVVRLSDLVADALALLNRASALSELPEGIGRWEHRKFLVVEARNRPNRDQVVLRVGELVDRMVRSGRIELDAVELLWRATEASVVEGFKATVLKPSPDQPIGRTPVEEMRKWSGGENLTASLVLFCVLARLRAEQRTGAKAGSAGGVVPLDNPLGKANYLPFLELQRKVARANGVQLVFWTGIGDLGAVTTFPRIAAMHKRSSTTREGRAYVQVDDNNSQVVDVVSAVRHEP

SEQ ID NO: 41469 - protein, 255 aa, Nocardia sp. NRRL S-836
MVWHAELAWAAQLFDENLLSPAELSFLEAVNNWLPKRRAVRVPVRERSLEVLGDEKELEAWMLGSFFSPGRLTLELLETYACWPPVEQTTLGDRSWLVIENYTTYRSISDRAEQLGFDGRVVWGSGNQVGTRLAALSTMAPAPTACWYFGDIDTGGLRVAKLAESRAEVLALPPVTPARGLYRLLLHHGTPRSSNTARPTAALVAWARAWFEEPLGEAVTCPVADGRRLVQEHIGVEVLSGTTLADWFDQPESLA

SEQ ID NO: 41470 - protein, 486 aa, Pseudonocardia sp. HH130629-09
MSTISPDEGVARRLKALACTAPLHDLDARKGRLDWDATGYQMAEIGLQAIDQVTLAMDFDHGADHAEVVRRLLPFVGAQVPGAPRSEYVRVAQWVIDNLINVGSIDRGFAVEYGTTDDKGRYVRRRFDFKLLVEVAAPDGGIYLRASDEAINVLVGALDTDVESAQEAAETKLETLIVRGRLGDARLAAEQARYRTVQYAESLRRKLEATRRDVRSVDWLDAVPQLLDEALTHIEARYRAETMIKANIADARDEATEPGRRRQAAELVTVVDDCIQRHTQLQARLQEAGAAFRAEQDRQQFSGKPKRAAVDVFGQLLRPSLALTVEAAHDPVTGYFAAGAGVRNPSVPSLGGLVETLLTPPSDRDPFGAEVPEPELAPQPRERFGVETWAAADAVLPDEIEHPVRLSAALAAARAAGADLPHLVALRAVHAVGTAVATARTQGDPSVLVAVDDGTVLDDPEFGGADLLLARAGVQGGETNRRTAQT

SEQ ID NO: 41471 - protein, 1503 aa, Pseudonocardia sp. HH130629-09
MYELTRVRLFSVGPTAARYQDVALDLRGVGAPVKVAVQEDLFAPDALDRTTPRRPSPASVLFLENGGGKSVLLKLIFSVLLPGRRQVVGTTSTTVLENFVLAEDVAHVVCEWMHVGTGRLLVTGKVSEWRGHVASTDPEKLADAWYSFRPVPGMGLDDLPFTHDGRRVTLAAFRERLQTAHREHPDAELAWETGHRDWTRHLVDVGLDPELFRYQRAMNAGEGEAAEAFSFSSDEGFVDFLLRAVLDPAEPQNVAELVAGYADRLAQREELETEREFVDGTLSRLEPMVDAEATATAARDTETAARAELAATASRIAARRVAEEARSVTAAEEAAGAVEAEQSAARAAERLQDTVGELRRLTAVLTVEAAERIAAEATRERDDASAVSMARDAVEPVLAHRVAAAEAARLRARVEEEEQKSRPALAARQDAARALAAALARVAAEADAAADAAETRRADAEERAAAARREQVTRTADAARAESAAGAAREALDELDTRVAAAVDAGHLKAGSTAADVEDEATAARIDAERCAAALADADTAAAAIREERRAAETRRTAAQDAAAAARADAATAEAARSAAQADAVALAGETRPAELLGLDEIRPDTDAGLVVDTLTTAIRGAERERTTLHGDQRRDERALAALGDGGLLPDPPEIEDVLVVLESAGITAWSGRRYLAKLPAPDRETVLARLPHLAGGVLLNDARDAERARTRLDAARLLPACLVAVGTTAALRADADPAPGIDFVVPPNPALHDEEAAEQVRVRLVAETTERAARLAELETVLDDDRRLRDRFAALRGRRPTLADLTEAAEIAEAARAAAVAEHEATRAAVEDLDERADRLAADRPGLERTAGDTRRRADALAALRTELARRATHEERIRTGEADAARAREEADAAGTTADRAAREASDAQQTRDRQRGIGTTLRDEAAALPVSPEEIGDPDAEPDGTPEGSLAELREEFQRARDAYALAAVDTDLHGALERAEADARERRIAVDGLPRTVVEAATAFLHTPDGADAASRRVAAEQARAAYDEAESRRADAATELAVARRELERFTGGERPIDHGAEGRSAGCAPYDAPRDAEHGRELVARAAADLDVAGTELERRRRARTAAEDAHRTATDLARGFGLVVSSLDETPEPSGVPFDGDVEAAQAALKRHQNAVRDAAGERTRAEKKVREGVDAVARFAQDPRFATLTSPVHRHIAGVDRSEMPGLAVEWIAALRPRLRSLDDDLGNIERHRSGIVTRLSGMVGEALRTVRLAQRLSQLPEGLGDWSGQQFLRIRFEELPDAALRHELGAVVDRTATGMAGGKAKDRRDGMSMLLRGVRAAMPKGVRVEMLKPDAVLRTERLRVSAIKDVFSGGQQLTAAIVLYCTMAALRAHQRGQGRRAHAGVLFLDNPIGRASAGYLLELQFGVAQALGVQLIYTTGLFDAGALSSFPLLVRLRNDADLRAGRKYLSVDERVTRSVPDADAPGGRITAARVYRRPEAAVPAGAGDGAGSAG

SEQ ID NO: 41472 - protein, 296 aa, Pseudonocardia sp. HH130629-09
MVGSVDARRNLAAVLAELTAAGVIEPTDRADDGSPPLPNSVRLLRAAPAPAPQDRTPWHAELSWAAGLSRPSPTLLQVNEWLFRHAARAVEVPLRERALEITGDEKAFDGRLPGELSLATLRARRVVPPLHREPLPGGGPVLLVVENADTMDSLLRALRPEPGAVGGVAWGAGNAFTASVLTLREAPPSEVRYSAIRYFGDLDAAGLRIPRRAGELAVAEGLPPVRPATGLYRALLEHGRPAAASSVDHADVEWLDPALRGPVRDLFASGARLAQEAIGATHLADDPTWRAGLAPD

SEQ ID NO: 41473 - protein, 483 aa, Rhodopseudomonas sp. AAP120
MSDQRFMSADAAPRLTSHLRALSLIAPLQRAEDNKGMLHVSAKAAERVDMRYLALAAIELLIDRMGAGGTAGRAELIEYLADLARLQSRNLSDSDATALAEHVFDGLTNARDRRARFKVRLFDPDQPDGFFFEFALLRAEPLPDGTVGYRLTQEAIEIHLSLLAHDPLTATQVSEIIVGEFLKRGLYDHAVSAAERTRTNSIRLAEAIRLLMAEARRAILKVMWHEELGPKMEEARSLLDASIMREGAMLAQLSDTVADVTDETDRRHLSRIRTLLLDVQTRHRKLIVVVQKTAEEYLHLQADTLKLRPLARLPDLENEILDPLLRAPANFLIENTSGVFGAISGTLPPLVLDIAAAIAAFEPDVEEADVFDPTVEFDDPTVGLELPFDEATIARAEQFARATILATGAITLGEILSQASLDRPDDAAFQRCLFLILEQAIDPRTTDVAGGASILSTRFDAGFVEGTDVRFSRATGGGVHASE

SEQ ID NO: 41474 - protein, 1450 aa, Rhodopseudomonas sp. AAP120
MLMLKISRAYLDACGYVDGVFEELLIKPTDATGSALHHVIHAPNGVGKTTILALLFSIFEPDRRKFLRTEINRQHRIEHYFMPGRLGVVALELIKPGVNNKPVRHVIGQVFWLTPASKGDDGEPGHRRFFALQADADTSLDTLPFRGLSGDTPLRSLDDFTRWARDMRSKPTFFSTDSLTAWRKHLTSELGVELKVIEVQRRFCGTEGGIGAAFLDFKSEQQFLEKIFAFMIPADAADSVVQALETGLAKIRGLPQRKDQLKVLTQLADGFTPFISAAGALETAEAERADDFKRLGRLFSRFKIDQTKLEVEWEIVGGELAIKGQGVEDARARERKLQGEVLFLERAAADRRFSDAKAAVERAKDSSAAAGRKLQSARATDIGRKLSSAQGQREAFEAELDRIDRDLAPDRALLARAGANLHALLDQLAAEAERDADIYEQRSRDANQLAEAHAEEDRAASGRAQELKAEVERLAARVAEHDRERKELERQGAIRAAESPAAAVARIDSELKVQGDAVADTELQDEQREKEARDLEGVRTAALADSRRCAEEAVRLAKLGEAGRSLEQAILGSAALAAILAGESKDPYRPDLPERARAARALSEEMHRKLATEREAIAGELSFLDAEGVSSVPADVALVARALKEAGISDAQPAEHYLAQFKPDADEALALLRDDPACFGGVFVARLDRKRLSTLASDSRLKLKGPVVVSEATLQTTATSATETGIVFGPFSAARVNKQAAAEEKSRLADALSAKEAELVSCVAQIEAIGTLVDQLRELHKNYRDDRPDDILRRCEQFKSDKERADQQVKDAIARQKAIAQERAQFRDRLHELADVISRLKMAKQAVDQFKRRYVDISEMSARIPVATAEQQQEQDAALKSRAAAVKARAAATDYGGRAVALRADANARRSDKAHYPETDGAAADRMGTFDDLRSQYKTAEHALASKRDAQQATVSLQLSAVKESIFKLEQEYAQASQGLEPADLEPFSAVADLARAIKEADQNEQECRAAVVQVDAALTSAQSALGPVSGKIERAEKKSGLKPIPVPEFAQAPAETCANEAALREQQGEALEIEIRNMEREHSGLRTRHADIKGKLSGIQALAKRAEGHLPEASREELPDLSLNHDELEPALDQVISRIGEARATISRLDDEAEACFEQIRQLIEGESFRRLEPQVADHLRRYSHRSAGTERETLQARIIERIGIVRSEIENQMRDQNACLEQLRLHVIHADDLLLRAARCSKIPDHIAFYGGERILKIKRRLRDVPVEMVRNQLSIWLDEQVQTGRVPSDGAVLAAELLNRVHAGRALEIEILKPKRDAIQPYMRVDRMGLSGGEGVTVAMMLYTVIQKLAMDERTDGKNAASGGFLMLDNTYGMSNMMEHIVLQKTMADLLDIQLFVTTCSEDKHVLNMFPAITRLVQGERVLLDGQPKYIRVRSGDYLLKGGERAA

SEQ ID NO: 41475 - protein, 215 aa, Rhodopseudomonas sp. AAP120
MSLIVPIKERSLEIFGDEKRLDQLRGGTTNLFGQVSLSSLGCRLCPIPLPFEAGPAAARGQPILIVENNDTWASFSAWNRGVGRYAAVAYAGGGHGKSLAYDEMFIDELISRFQSEGLFYFGDLDPAGLRIASRAAERRALRGSLALQPAAALYAWLLDRGTRTSLQRTEKATVADLVWLPEYLRDPVEALFAKGHRIPQESLGTRALAVGDIHF

SEQ ID NO: 41476 - protein, 474 aa, Oceanobacillus caeni
MEELDKALISIFDTDGDKPELLQSMRDIAALSGVLSELSDKEYFQSPIHVLRFLRVLNIINQEALGITDPIENEETLFYRYRHTFGYGEEMTIGFIKHLTFVLGKYNWIAKTGKRIKMRDVGKRMMDVLIRLANDSLAYYLNDDVQRSLFQAKRDAELSEAYDDKGISGGNKLMSMIKNVEEAVSLLTERELEYLSDRNALNQVEVIHQLMKELEVKMVERLAKFETLDQELVFATVKQRGTTAISEGTKISLGTINKILKFAHLQETDFIKTIHPELFRNFIVKSFDPPIGSDIPNAHQILSFMEQGQYEDEELDGMWVPVKFASPLPPVAIDEGIEYVENYEPITEEIEETVEEDFPELEEVMEDQLEELMGDSRWQMTKQMIHTEQIEKYLDNVDEAGLDELVVQAGSDKWSDVLNGLIGVSALIANKKADIDEKANRKLDDNKTERDWRWIEDEQGTYGIRKRGRRDSKY

SEQ ID NO: 41477 - protein, 236 aa, Oceanobacillus caeni; identical to SEQ ID NO: 41279

SEQ ID NO: 41478 - protein, 436 aa, Oceanobacillus caeni; identical to SEQ ID NO: 41280

SEQ ID NO: 41479 - protein, 494 aa, Frankia sp. R43
MEEGLLHDEGLIRRAKALACTAPLHDLDANKGKVEWADAKVYQMAEIGLHTIDQVAIAMDFDTGASRRHVLDRVQRFVARQAPNRTQEEHARVARWVLDSLINHGDVEKAFHRPYGAVDADGVYRVLTFPFKLIVERRDSAGVLYLHASHEALNVLVGALDTDVESAQEAAEVKLANLIRRGRLADAKQVAEQARIRTIQYGELIHVQLEATRRNIASVDWLEKVPDLLTEALAHVQERVRAERAIAKNMAEARDEAQNLVRKRQAAELVVIVEDCIRRHTRLQQRLLEAREVFRAEQDRQQFSLKPQRSTFDLFGQLLRPALGLTVADAVVPVDCFFARATGPGTQNIPRLATLVPALLRPAPQPARFAGPVEDPQVEPLEDAARFTSEQCEMAEQLLRLPGSVRSLSSLLQEAAQLDADLPALVALLAVYAYNPDAGAAQRRGDEHVRLAVRADTVLDSAGFHGDDLWLTTAQVLPDTVGGTNQTRDGGPGK

SEQ ID NO: 41480 - protein, 1495 aa, Frankia sp. R43
MYELSRIRVCSAGPAGARFQDVILDFSGAGQPVVAAQGDLFGAGAQGLRPSPASVVFLENGGGKSVLLKLAFSVLLPGRQRVKDAPDPRLLEDYVLAKDVSHIALEWMHAITGKLLVTAKALYWKDQVVSTVAENLIERWYAFFPTETLGLDTLPVVEEGQYVALPTYRDRVNELYAQDQRLAVNWPKSQGDWTELLGQLGLDPELFRYQRAMNRDEGEAVHAFALESDGGFVDFLLEAVFDHQGLNDLAALVSKYAHKLAGRKDLALELAFVEQAMVLLEPLIDAADAVHEAQGQVQRAGTELAAFHGQVKARVRDDQDRVSMLDRQLEGLAGEFKRASRLTRRWAATVAGRRERLAQLQVERAKADAEEASRRQREAKTVADGWRATAAVERHLTRSNALRSLALLVKKGELAAAPALAARERAAGAFAQGLLALRQAAASAQEKEFEQAGVEAAAEKQARGEREAALKKAGQAEAKASGLLEQVAAARTDAEEAVAAGLAPATDLVPAAAADARRAVDLASEQIKALELEREGLDQRQIAVQETLSAAIREEEAARGRRTQAQRALDTARSRARAIEATPRLTDLLGTEVRLDLDAHALLDRLETTIAETERERVAVQIEQARDEFARLALADGRMLPPPEVVRDACRLLEQSEPRIDAWPGWEYLTEFPLQQREEMLARAPHLISGVLLNSPDDLERAREILGRAAPTAYYVTVGAVAGLLESADAPTREPWFTLPFNVALYQEKAAQTEQKVIEERWARSEERLKQLDFAHRHDGQLRQQISQWRQDYPEGALAGLQEALTTAGTVLEEAEKDAAEQQLIMNALVARRDGIRDELHDAQKDFDHWQKVSRRLTELSERLTQIPSWLQQAAAAETQQGAWQKQADEAEATADEHRRLAEGHRAAGDEQRRAAAAAGREWAALPGANDMRLDAEPPSDPVPVLRDAYEKAEANFNNADVPGKLRERLAQAEARAAEAAAEYSALDETDRATACRLLQTPESLDERSRAEAQERADRTLEAAEAAITQAVLEQGKHENALSERHREFHELTADGTATMPAAGLPDTIEGCLQSVAAAETEHAAAQAAQTGIGEQQSAVAQEAAQAKDAAGAFANLAQALADTAAEPDAAPYAGDGKTGWSDYGRLRGAAEEGKKELSRTEKVLRSATEKIKQHAAAERYAGLSIPVRQQITNLSPEKTAEHAADWLAALQPRKRNLADEIHEVDLHRQTIVDHLKGESDKALSLLRLAQRLSRLPRTLGDWAGQEFIHFSFQPQPDELLLPRLGELAEEAAAGRTTDGRKVARDGLSLLLRAVHTAVPGGFKVQVLKPDTVLRAEQVRVSKVKDVFSGGQQLTAAILLYCTMAALRANQQGRERSRHAGVLFLDNPIGRANADYLLDLQREVAQALGVQLVYTTGLYDEKALGKFPLIVRLRNDADLRAARKYLVVDDMIRRHLDALAPEDGTGQIDSARIFRREEPPHEGPEGNDGTATPRE

SEQ ID NO: 41481 - protein, 374 aa, Frankia sp. R43
MALPRRESELIAGLREWAAAHGRSPYKDAFIPLDAVWEVFRRVPHRNVAGAFEPAVLASLLNALDSAGLIRQVQRRTPDKVSLPVKVRLLPQAQPPAVPPMPRWHPALTWLAEEWATATVKQRPAYAVIDRWLKSGPDLFRIPLRERALEIFGTFGSAEDFLMPEKTLDDLKSGPLFSDQGRLDQLLHAFRPPPPLITETFPLEDEDGRYCRVGTGDVLFVVENATTWWSLVESLPSDHRLGYVAWGLGGTFRASIRAIKAKHRITQIRYFGDLDTSGLRIPLRACDTAAELGLPPVQPAEHLYRALQLLGRPRPATAKEASISAATAGELAQWLPAPCQESGRQLLLEGQRLAQEWVTYRYLRQNCDWHDDVR

SEQ ID NO: 41482 - protein, 473 aa, Paraliobacillus sp. PM-2
MEKVDQSLISIFDVTDDKPELLQSMRDIAQLSGVLTELSDKEYFQSPIHVLRFLRVLHIINQEALGIAEPIESEETLFYRYRNMYGYDEVITQSYMKHLVFVLGKFNWVAKTTKRIKMRDVGKRMMDVLIRLANDSLAYYLNDDVARSLFQAKRDAELSEAYDDKGISGGNKLASMIKNVEEAVLLLHERQLEYLADRNALTQVEVIHHLMTELEGKMAERMDKFETVDQELVFSDIKQRGTAAISDGTKISLGTINKILKFAHLQETDFNHRIQPEAFRTFIVKSFDPPLGSEIPNAHQILSFMEQGQYKDEEIDGLWAPVKFASPISPMAIDEGINYIENYEPITEEIEEKVDEEIPDTEEIMEEQLEEIMGDSKWQITKQMIHTERIEAYLEEVEEAGLDELIIRSGSSRWSDIANGLIGVSALVANKKAAIDEHANKEMYDNKDQRDWRWSEDEQGTYGIRKRGRKRER

SEQ ID NO: 41483 - protein, 235 aa, Paraliobacillus sp. PM-2
MNKEHMELENEEESANVNPLAALQSIKGFLTTEEELAFMQILFSSSATIRSGNFGLSRKEVEKIVGISDDEQAFFSFLKRVNQAISRYMKVIYDERRNQVIALMRVPAKQAKTLLNKESLAILMFIFYHQEVLQNEYTLFSQLINSFGHESLQVTRKIQANLDPLKKIGAIEVYDTNSEEEAYQLTSIGANLFSDSFLRRYTEFSQSNQLHMDDVLRFFKRYNMNGSANNDSMET

SEQ ID NO: 41484 - protein, 1066 aa, Paraliobacillus sp. PM-2
MIPWRLKFSGVRDYTPTVMDFSDKDDHILISGPNGAGKSTVTFCMGGVLYSSKVDLEGLKSNNLPKDQTWRAKIELLFKNDGKIKVDAPEFVQFRLDLEQKPGDPVKKEFYIQEGENIDRWERETKYTSGDRNFNFTEYKNQIHSKYAIDPDEFYLIWYQKEVNQFAVMHPEERFRIFSEMNGIDKIQKNWEESKELVRDTEQTLQVAESKQSLNKLHLNQKKTELDRYYSRNRRLEEGFKQYISALKWLEKHHLNKINTLRDQIKTLKSDKEEKITAKQQDVISQAEHREKLEQFQTAISQMESRERTLDDELTRLQEEITSHKDKMEAISKEIEEITNKVERIGMTEEEVNEALIHAEEKCVSINVSMEEQQQSLESNKQKLDELTQQIAELKIKIDQDSAREQEVRKLIKAYSSSQVVQREMKLNEQRLEAAKDEKGSLENKKESLDKEYDNLRNNRVYSPRQEVAIQYFKKRNIEVYPLRELVELDDTAKPNDEELFDTIKYTLFVNKKDFFAPNDLYHIPLPNVVPEKTITNLPDKHVKIKDNLSNNLYPFAVKALWWIKSFFETEKPLIQNGVLIDTKGIRGPQEEKRVILSEKVLKNYQTQVENELKSVGDKISNLSNEIIELTGRNSTLFRRHESLKDAEAFLIKENEREWQKSKYDNLINEKMELEEKRDKIQLDWNLLNEERADWKQKVETFRNYQETFTQYEKEKEKIIEATQLKHYLTELKEEKKNKNSQLEELGSLLDEKRREEKKLNRVIEDLGDAIQYKDREIDSQERQIKNRSEEYITSEENYATIKHDIQRLVDAVKQELKDFALELTELPQVTKPEADDMRESGKIQYTHAVNETGIDEAAPENYQKMKEEYDRSATEVKKSKLLLDEYTERMERLKEDLESTINSKVIGLNQKFVHYMSLFGFQGEIDWDMRIDRRNQIHYALYIKARKEGHRGKLEDVSVKARGGKVGKGVSGGEESLSSLLFALALLQTIQASPGYIVLDEFDSALDEGRKDKVFELYEHELNRKMIILTPKSHEAEYLYRFSKVYVVYHNPNIPQSKIFKVRRK

SEQ ID NO: 41485 - protein, 442 aa, Paraliobacillus sp. PM-2
MVSEALHYYLQHHIALKNESIHVNDAYEQNDIIHIPIIKRTTRTRKIVARLMVGKATDPDLHHIDTIPTKLTNGFNSPKTKKQIDLSDETYEWIRYGWIIREIRLEKDERTVKTERYRMGFVLYQLSLKIQAEAAKETRNWILDWKKCWDVAKHSTILRIKQDQRADVVSLLAIQLDKIASETDKVLTGETKLIERIHPTWRLRKQVVFLHFLIALYQLACTEKYFDWKQIGATYYRTIGGSKKFDAYKKDFIEETEKQLHRPIQLLGLASMGTITPLFFTGPMKGNHVEYSYGTVHATTDLAVFLEKFTTKADVLWLVENRGVLTRVAYEEKFLRDTKSFVLGVDGQVRSAHRQLISQLTTCVSQVIIWTDVDEAGYTIAEQLYELIQDEQVLIKWIVPPLTVETEWGTFASKYQQSIQRSKEEQEQEIGGVELWKKWINH

SEQ ID NO: 41486 - protein, 537 aa, Lachnospiraceae bacterium TF01-11
MEYDFLKQFSKRMKIVGMFSTLIKNSWQKTTWKQFGFETMDEQVNMIYAVLLFIMEYSLREQPCTIDDISVFVDDVCNRYLKKSLSYEKSRELAEFIINIVLCDEGHAMYFDCFEFEKREYKKKNISYLSNEVVYLDGDIKRTSYKLTDNGYNLVLSTLEVENNMKLTIHEMIFKMHLERATYDQALDEVKNIFNMLRIQLQKIQEAMDKIRRNALNYSIEDYEQILNENMTAISDTKHKFMEYRRVVRNRVKELEDENINIKALSDEDMEKLHNLQDIERYLSRSIDEHQKILNKHFDLKDLYSHELEQMSKMTLIKRFSIRNDLYDKIIEHPGSLVNINQFLNPLFRNNPEKVYNLNKCIQYQKPLREKNDDEEEEKLDFDAMDYEEQKERKLREKLKKYQSSMEFLVEMTMENDGEIDLASMSSLSEEQKKVFIPNAEMFKEIMVEFIKAGSIDIDELRKERRNIVAEESCSFQLNEMILKIADERKDSQIKRITVRRCDDGQTVCFNDVYNEFGDRRNIYCSNVQFRFEKEME

SEQ ID NO: 41487 - protein, 244 aa, Lachnospiraceae bacterium TF01-11; identical to SEQ ID NO: 40881

SEQ ID NO: 41488 - protein, 1476 aa, Lachnospiraceae bacterium TF01-11
MSKINTLRIVNLNYNNNSIKISDEAFQFNGESTLMSLRNGGGKTVLVQMMTAPFVHKRYRDTKDRKFESYFTTNRPTFIMVEWVLDGEAGYVLTGMMVRKNQEVSDGEAHDELEMINFVYEYTARCENDIYHIPIINETESGMTLKNWGSCKKVFEKLKREDGMHFNYYDMDMPAQSRMYFEKLKQYQINYKEWETIIKKINLKESGLSELFTDCRDEKGLVEKWFLEAIESKLNKDGNRILEFETIIKKYAKQYRDNQTKIQRMKNLRGFLEEASGIRVYADEYVDYTEKRKNKENDIAWFNVILNELNAEAEERKRLLDEDIRKKQIEISDIKYEEVSYNIHSLEAKKERLIHEYEQITLEKGQVAKEKDRLENKRAKLLCARENEEKNAALAECRKIESRLEASKKSEEQKEPERQELGKTLFKHYSRAVSECEAEIANTRENIKKQEKQEKEYNQSKSDCFKQKDDNSLQIGKCQAKISNYDVIEEQFNKKYEEKLCRNILGVYETGTLELRDDEYKKEMSKIQKDIVSLKQEKVKNDDDFVKYVRKQDDLRNEIMEKKSKLASEREICLDFEEQLKIRQDIMKHFLVSENDVYNKEVILKGADRKLKEISAAKRLLERESEQTNTEIKLLENGRLLEVSKEFDEYLSSMEIEYIYGMEWLSNNGRSMDENKKIAANNPFIPYAVIISGEDFKKLLADKNKVFTSNPVPIVKREELEDSFINDETGVVELEKISFYLKFQEELLNDSKRYEIIEQKKEKSRKIQENIERRDEEYKEYFSKQECIKNQTIESDSIESSRGLIDTLESETVKMQAELENLESLKRKITLVNEQINQNVTALNEKKNLAGIRLQDFEMLRESYNDYCDAKEEKIRLDKKNEDIDNKLNIITEKLNNLIEDIKADEKTEMKKKQELLGLQERYEYFEKFKGKSENVDKASYTLLDEEERISKEAAYNALLNDYSNEVKLLTEQYNSANRRFLKSKQELAELLAKYRIKKTDIEKTRYDKDDKAELDERISANNMELQLYDEKLNKVNTQITKKESDIEHAYKDMYRIAEKKEPISKDKISDTNFKDRIIIIQNEIRDTRLDLDGVTSLCRGYEANISALAEYSDLKVEETDEHIKKEDIFGKSVKEIDKFRGMMIRDYRELIENERKQSNVITRLLNEMARKNIFKDEFFQKPIEVLLSLTDNAVNFMKQLDILVSSYESMIEKLEVDVAIVEKERVRIVELLEEYVRDVHDELGKIDGNSTIKVHGESKKMLKITLPEWYENEEIYHLKIQDILEEVTAKTIKALEENKNPDDITGLYINTKYLYDTVAGTGNVRIKLYKIEEQKGREISWSDVAKNSGGEGFLSAFIVLSSLLYYMRKDVSDVFTNYNEGKVLVMDNPFAQTNASHLLKPLMDMAKKTNTQLICLSGLGGDSIYDRFDNIYVLNLVAASLRNGMQYLKGEHTRGDEQETMIATQIQVTQQELMF

SEQ ID NO: 41489 - protein, 521 aa, Bacillus sp. FJAT-18043
MELKKLFEGMNERYQNLVLFLPVYELNQGKNPKFKDLDLMEIGFGVLLFMLEKMLTERGNVTNEQLNQFLSQLMNEMYQEAYTHEEINELRNYIVDEKLRNNGQDFIYDYMDYQKKEIQYVRFKLIEYDNWTYADHTNKEVKLCLSDKGIELLFKTKEYFSEMQISITLLYFKQQLEKGAYSQVLSIAKELLFQIDTQIRAMDEYGERIKRNVLSAFNQKEMKARLQRSYEQTKNEREQIADLQENVDRVKMNYINGVLDKKGTKNYDIVLEIDRLLQQAAPRHERLFAKKFRLLTTLTNSIQRLIENAFSRHFHFEQEVLENWVEKKITEEKIRKILKPIMPIKVPKAYNPLLSFAPQSIRRKTEDLEEEIIELDEEEAQKQNQLVELREKQEFVLDKELLKFILLPLVDKEFYFVSDGLVSLRKTNFMAYVDLEEKHQQRFLELSIALHQSDYKKFELISEEELIWDTRETRLLCEMTRGHRGLLKIQEFEMYETNKTYTFLDGTIITDYVIRRKDEME

SEQ ID NO: 41490 - protein, 251 aa, Bacillus sp. FJAT-18043
MIYEEDVLIKAYQLHQQLMTKGEIQKKKDADLFRLYSDPDIREVLQRVFLPIDQAIIVKVEETLYFVPEVHNNAFSYTNEELREKGKFRDNKELYLAQFIWILVISEFYGDQFLLTGETRSFVKVDDILNKAKEWMGKFSQIPEEEQLELAYRYELNIPYLLNEWHNLSEVTNKVKELRKARTMDYGFLLKALGFLEKEKMLVVKEEQEIVMMEKMKHIIDHYYHQESRINEIKSLLNEVNERVPDYAESQ

SEQ ID NO: 41491 - protein, 1447 aa, Bacillus sp. FJAT-18043
MPRVNKVRLSNIRLDDKNKIITDKTFHIYGGSSLFLLENGGGKSSIIQFIHQLILPNHQMGERSMKEMVPVGQTIHIAAEWVHEDEQRFPFVTGFCFENTGKKTADSKDEYQYFNYIIEYDFEGSYRIEDLPFIIDRKVANYNVLREKLKKSKGVNLPPTNTRYQEELESYNILSTEWKNISLVNSSEGGVTDFFGKANTTQRLLEKLIIPSVLESLYPDEKERYSFKESFREYKDSLMELPKMKKNLQDYGVINNNAGGIIQVCKDYNALKQSLIESQTLLSRLYFTLLESSKANALELEGIASELIRLADTKKELDWKIRSYDVFLLEKKYKEAKEKAALDEETFTKTVVNLESEKRREKEQLAARAYQDYQTNQTKLAKKTSELEAARLEGGERQKELGNIRNTLSRQFYYLYQQNQKAERDLKEEQNRIKREWEKVQDILTETNQEMEKLGKRQAVLQHQVETYDKDLIGLKQGLIEDWKEDEHATHHHLKEKLSAVVKEEELYKAQAEQCRNRINDLDQLLEQCNTKEKLTRRDLDEAEAAYDKFSERERLLIDSTYKYVTVRVGNSLFEDRALIAIRLERLKSQYDDEATQLSIQMDEIGQIRAIIENKGYHIHQELERVKDYLVQRDNEVLLGVEWITKSTMDDTSKKELLKKNPLLPFSILVEDVQLTKVKTTLGHYKEELTIPVILINKSQMEIEPEKDSTFQLSESAHIFHHFNTRLKAEDWESYLVELEQKWGDLDLKRKEIKGKLQELQLFEHTLKDFWKEYTPHSRKDLLGRVTELRDALRKIGEEKTEHNKENEAQSTSYSEAESQRNEKEQLRIKLAGDTIRLSDFIKRYQSIPTARKELEQLTKQLEELGRIKNALNQTSQEWESAGGAVQEKITQLQKSFMLLKRDLEDYEIAEAEETTPATEVEYKDTLERYKAFREQYSSESRQLEILESTQNHYSELVKRAKEDIHKNGFTVESMERLILEYDPYLLEQIEYNISGLEEQLEKDRDRKEGSGKELASAKTEYHTRVELLGEKGIYPYGTEAKAEKELYESELTMAKSNEGRSMERQAALLKQQFGNQAAIEDLETTKDMLIASASQNLLEEGHWNRQKPIQYVRTIRYDMGVHKSGMELKRTELLKKIDELKEDVRETNNTQLLQLTFDLSKILDSSIEDYQEIIRTFENLMNYVQELEAGIELQKAELDQRSEELVEQMYDRAVTVYKNIMEIAKSSQIEEKGEITSLFQISWHKKSIEDAKMEIDRFIQRLLEDLVAMNERNAPVKEMDELFEKRVNMVDILNCYAETSRCIIKTLKHRNELLNKNDYYTWDEVCKWSGGEKHATQISLFIALINHLRRKRYAKENAWKFIILDNPFGKASADFVVKPMVSLANKTNTQLFCFTGIKEKAIQREFETVISNQYVEQRGRLLLRTEEKHKDPSMAELDTIFFVKQY

SEQ ID NO: 41492 - protein, 347 aa, Bacillus sp. FJAT-18043
MKTTIEQYIANFKKLRFEVMELELYLKNEGLRTPLFYKEMANIILELVDEGKVKPIKSSQSYSMDSRILNRYEKIKQRAKNDYLKDEMLTNYHTIISMTYYLNRPDQYKKEKSQLLAISQFLTNKRKSEPVLSVNERSYQLFGDEKLLFSKKGKKILANIGITYQHLCCYFTYEPFFYYSVTQAENNAILIVENKDTFFSLKKLLQEGNYSWNGIRFSMLVYGEGNKITRSIDYMDELQVPVETPIYYFGDFDPTGISIFCRVQSSCDREINLMTSFYREMWKRRKDGKVQKEQEWNEEAITRFLSNFDKEEQQFYLRYLKEDQYIPQESLSIEVLRGLSDGIEKTV

SEQ ID NO: 41493 - protein, 469 aa, Bacillus shackletonii
MEKMDKSLISIFNMDVDKPELLQTMRDMAALAGVLNDLSDKESFHAPRNVLRFIRILNLINQEALGMTDPIENEDTLFYRYRHTYGYDEEMTIEYVKHLTYVLGKFNWITKTAKRIKMRDLGKRMMDVLIRLANDSLAYYMNDDVARSLFQAKRDAEISEAYDDKGISGGNKLASMIKNVEEAILLLTERELEYLADRNALSQVEVIHQLMKELETKMVERLAKFETFDQELVFASIKQRGMTAISEGTKISLGTINKILKFAHLQETDFIETIQPDLLRNFIVQSFDPPIGSEIPNAHQILSFMEQGQYEGEELDGLWAPVKFASPLSPNAIDEGIDYIENYEPVTDAIEEEVEEDFQEIDEIMEDQLEEIMGDSKWQMTKQMIHTEHIEKYLDEVEEAGLDELVIQAGSDKWSDVLNGLIGVSALVANKKADIDEKANRKIKGHMEERDWRWADDKQGSYAIRKRRK

SEQ ID NO: 41494 - protein, 230 aa, Bacillus shackletonii
MQLENEENEYMNDNPLSALQSIQGFLTKEEELTFMQILFSSSATIRMGNFGLSRKEVEKLLGVNNEEAFFSFLKRVNQAVSRYFKVIYDERRNQVVALMRVPAKQARNVLNKESLAILMFIFYHQEVLQNEYTLFSQLINSFGHESLQVTRKIQVNLDPLKKIGAIEVYDTNSDEEAYQLTAIGTHLFSDSFLRRYAEFSQSNQLHMEDVLRFFKRYNMNGGVTDDSLEA

SEQ ID NO: 41495 - protein, 425 aa, Bacillus shackletonii
MINNAWKDYLYEYILLKNEELNLLDIRENNGIMDIPVVKKTARTRRTVAMLTVGVHNQNVPPDNLVKNFTSPKTKKPFELTNETYEWIRNGWIIREYRLAKDERTVKSEHYRMGLSLFQYKKQIEHDQETEKMESILEWKNQWNKIKKSPSSFNLRRKEILNRLKDILDEMVTADRINHSNSTWRFQKQLLFLHFLVAFYQISMVEHHFDWKQIGARYYRKIGGSKEFDSYKKEFIEGAEELLEYPLHLLGLSSLGTITPIYFTGPMHGESVSYDYGPIHATTDIAVFTEEFQTDAQVLWLVENRGILTRMAYEKDFLLDSKSLVLGIDGQLRSAHRRLIEQLVSNVKQVIIWTDVDEAGLTIAKNVGETVEKCQVIIKWIVPPLEVVVNVEEFKSRYEKAIQVQKEEQEQEIGGVEQWKKWISP

SEQ ID NO: 41496 - protein, 518 aa, Streptomyces sp. Root369
MIFEEPSAIYESITSRMRALAVVYPVLALDASKAKKERGWDPYRMAELALAAIDFVTLRTDMRTAVRQETVVEHVAEFAALQQPGRPGEEHRAVARWVTERLINTEERDRAFRHDVGYVTDNKFETREASFQILKEVPDHVGQAALIATDAAITVLVHAIDVDIASEQIAAEAKLEALLKRSRISEAWQAAHNARIQSVRYAKDIHGRIEAMKRNVRALDWDTEVRDTVDEALEHVRSRSAAETKHKERVNQLLEATADERKRRQLQDLEALIHECWQRHAVLIDMLMTVGPEFRRQQDRQVFVAPAIHTRVHLHEQLLQPVLELSLNACLGPLEAFTRAVMGPVRPRVMYLPDFLEGLTRVAEEAGGELVPVQNEYDWSEIDARPAFSEEQHYAVDALLAAITDQGVRLSTLLAATRQPGPGTGPESGTDELLTLRTQQLFRLIPVRQLVDGEAAVVAVDDGTVLDDVLFGGSDFLLVRTGGIGTSQEAQTNAPLPVFPAPRPPQGPDAHQLDQESA

SEQ ID NO: 41497 - protein, 1485 aa, Streptomyces sp. Root369
MYELNRILLRNFGPRDARYEDVPLDFSGAGAEVETASLIPDAGHVAQRPAPASLVILQNGGGKGVLLTGITCTTIPYRHSDLETLRNFTVSMAQPSHVVLEWADARTGRLLVTAQVLAPEHDGKLHRCFYSFHPSAALDADRLPFHREGHWTPYEDYCTELRDWEKRVEALELHIVEGQEKWEKHQRGLGLQPELFDVQRRMNAKESDAAAAFTTNTADAFVEWLLRKATDDDRYTELGTAFHGYAAAHDERALWERERQFAVEMQHACEDVASLHDTLNRHADAAKNAEKDLVHLTSAIRARHTALTATEAERNTTLKDTHRALEAAKRTSELAHSRLQHVQACSHTLELDEITAQEQETQKNRQQAQDERTAWASVPIALRHTQALDNNNRAQRALVQAELTAAPFVQALDAAAAALRAGYTRAEKEARDTIRTHKDTTAETQKQIEQWRTRSNKLLTAVGAAQEETRTLQKQTDAFALRLNAAQEHDLLAPQESAADAAARTQDHAHHSKQLLREADQVRKSVRTERDRAHTALAEQQALAWSARAAATAADEESSQLRAQAVAIRSNPLCAELLEANSDELGADDALRWLGDHAGALHQLAERRTGGLETALTRKHIDLQNDQDLLSLLDTSEGLLPAAEEVRDLCGQLSDHGIHAVPGWQWMRDNVPTTERQQVISTHPDLVGGIIVGGLDGLDTAQSIVERLRPLPSAAVTVGTGERMLSTQAASDGGRFVVEPTPALHDEEAAAHERAAVDARITEVTRELNLLGQRITAVRDLLRQIANWRDACGMRTVSDLLGQLELLETSAEEAETALAAARTAAGEQETALEVAEDECERRTEGLKAAQTIAEDLARLAEEETATDQARARIKTLAGERVARTNELELLAGQIDQAVEEILYLARAIESAEQAADRYARAREEITSTSQAQQAHDASNATLLPLPSLQHRYLQAQDELRGVEVGEDQQVRATAAQKALLASQEEWNKVPEQVRGLAMAHSRDGRAGDPVQRDAILRALAAKIDSCDVALQRLRDQSSRLAERSKHLTSAVSLNDEDAAAWTPTTVTEARELEARATGELDTAQDKERLAAAAFNTARRDQASSTKELAAFDRILPVLETAVHGLAVPPDREPYDSTAEAAAVAARQVTAAHTTCRDAARQTERSLEGSVSRLKEVPADVRFEGLDIPLRTQISALDSRHIPAMAATWTDALTSRIAALNSDLEGMAKAREALASQLSGHVTDLLQRLDQASRFSAFPEGDAPWSGQKFLNIRYKKPDLTALAAQMHESVDALAGNQRTRKLKGIDVVMRCLVAAVPRGFTAEVMKPNASQRLDRVPVEEMSRVFSGGQELTGAILLYCALAALRTSPGPRSRTRNGGLLLLDNPIGRANAGYLVDIQMEMAAALGIQLIYTTGLSDEDVISRFPMRIQLRNDAEARSGLSLIRLDEQVRNALIPAPRITPDQDVPEPVGVLTSARLYRKQGDAK

SEQ ID NO: 41498 - protein, 316 aa, Streptomyces sp. Root369
MEAFRDALPGAASGENARSTLATLLYEIAEHGIIALPTSRTKWDAGRPALPEQVRIPTAPPAKSSTPRQHVSWRPELNWAYGTRLTASQTEDLFACNRWFRDTHNQPARRAPLPLRERSHEIFRHEKRLDTLITGALFAPGRLTLEQLSTYREPPPLAHRRLGDGDTMLVVENSDTYATLHNLLKAAPGPIGYIAFGSGRAFEASVENIAELPGIHRIVYYGDLDAEGIAIPARASINGVQHGLPPIEPATGLYRLLLAREPNAGDIIANDRAHSLTAWLPEELRQAAHILLTKGQRIAQEATNRNELSVDPDWRW

SEQ ID NO: 41499 - protein, 508 aa, Paenibacillus sp. Root444D2
MDYIEIGQVVSGFRERMTKLALFDPLYELQRKRQTDRQNKPIDFMELGLLTLLYFFEQKLMRNNKAGVKDLAEFLLKVTGIFIDLDEAEFEDLARQITQVFRPTTGKKRDFTFMNWESGQSEHIYISILKANAFDLKTNTQYYTLDEDGLELIFATKEFYTEFQLSIHQLVLRKQLEKGEFEGALRQINEMRIDVEALQERMVKLEHELKRNIVSEETFGRYKGLLEDIYLRLQMENEEFEELRQFVKETKDRVQAQTVRQADQRPYELILRISNELEKVHGEHSDLFHQSMVLKSHALGAAQESLYYTGLDSFNFDQDIASLIFSTPLPLETMKGVLAPFLPVQETKAWSLLTVWAEQNMLEDGSGQERDDKFLELGGDSDENRYQTMQKKLYKLLMEQLLQMMEEQGQVELKLFIQLFKESELARLLGERAFYDFWIYLHQRSPLRADDRDKQQNEEQGTLLEDMYMLLGSRCLVIIEQEDIIKVNDRFSIQNMLISWGEQDDNWT

SEQ ID NO: 41500 - protein, 253 aa, Paenibacillus sp. Root444D2
MTIGLENGTVMRAFRIYTLLARDNAVGKERLQEYMADDVVRGLVDQFAREVDCVTVIAGEQLYMIPETRLSPFHMNNEVIKRTYLRANAVNADLYLMYVSIIVLIGAFYDSYQTMEPTRSFIGIEEWTELVNERIALLKTHPEAELREMEQEFSYNWTALIEKWSAMDDIKETAARQSGNTISRVSFMDSVRKFLVAQELVIDIGNQEITLTEKAKVVVQRYFMELEYNRGILEFLYQSNAFEEEGSEHASHL

SEQ ID NO: 41501 - protein, 1476 aa, Paenibacillus sp. Root444D2
MPAISKIRFTNVVYEDGNKRYNDELFHFDGHNGAILLENGGGKTVFIQSAIQAILPHAELAGRKMKDTLSLENGPAHIAIEWILSERPRRYVVTCISLFLTATGIDSYRYVYDYPELDADAIDRIPFVKESAGSLRAADKGEIHDYYHQMTSKRMNAKLPSSIKEYKKVLENDYHIIASEWDRIAKINSSEGGVESFFDECKTTSQLFDRLLIPTVEDAMAGYEQGEFANNFEMHRDSFKKYKELKEKIEENKKILVELDGYVLHFAKMDAKQMAYAAAQAETKAYWLLVNEHKNEEASKLSQWHRQMAECDQQLLLLARKKESLQIAKQKQEQSALETKLRLVEEDVERKEAQVRSAKQHYYSLRLADYKQQWTSAEERMNYLQRELDQFGNTQEEGDLREAWNNNSGQIRSIYSKMEQEWQVEEEKLRQELDAHQNRTALEETILRDLSSELEGLNKQLIEHRSIVQAREKDKEVLRANVLANPAVESMEGSMTDWIQRYQKLDDSNVLLVQNNKDLAFGKEESMRELERVSESLKIAYVGRASSEQNLEAFKKEHQSMLTEISAYRSSWGRLSSVYEKQSSIEERLREDLEKLHLQKEAYLLKERLAFRYIDDYSYQHTFFADTYVAGLVDKWRNQFALLETGIQYLQGLDLSERAMTHPLWSVTLITTEEEVGLLTSKLGQYAEDMQFPIQVISSQEASRLANMDTPIAVQDKAWVEPQHWRENADVAEFASWKRAISQKGEEVLTARKVKESELQRTSDLQTSFSRFTASYPLEVVQEMERQVGLKREQVRELESQEDSIRKSVRQAEQTIQQHNNIMDEQKGEMVQLQQWIEKGRTYVELGKEIAALNVAIDQLVEQAEDQQSKLDSRQRSMEQVKLQIESVKSSMNYLRTEKASLQSQDTYIETLDVQPIETNHSLDWLKTERKDLHLKLNRISQGRQQLETEWNHAKTSRTTLEKEMNKLRLEQSDLDLNEDLAFSVTGEDQMSQLLSELKDFESRLSRDKEEFTRVEKQFDALATTIKLLIEQYGAAHSGGLPVTFTESLTVVDDQVQSEETRLHQQKTGLQQQHTQIHAQLGKIEDVIQYLNQYKIMHGFENPLIQASLITQELKAEFLNNRMKMVRKSVTLLSAVMKELEAEESSVKKARVHFVEFCRKQIKDIKMRDMAEQGVEKKDNYQELMQFQQKMHSRIERVNHVAEETMRTHNQQLEQYIIHVHSHIKLIASELRDIPNKTRVKVEDQWKHIYSFQIPEWDELEAKDHLRKHLEWILAELDKGHYLDDNGQEVKSTVRKEIEKWLDTKQLLHIVLQERPMKVSCRKVTNENNVTKASFSWEQSNNWSGGEKWSKNMTLFLGLLNYVAEKRQHIQANMKRHRTVILDNPFGKASSDHVLSPVFFIAEQLGFQIIALTAHAEGKFLKDYFPVVFSCRLRQAANGSKLVMTKEKEINQAYFRDYAPISLERLGDVKQMELFI

SEQ ID NO: 41502 - protein, 341 aa, Paenibacillus sp. Root444D2
MRTYLQSYKKSKVSLKELEDIFPVQPTDEQFAGAILELEAAGILQMVPSLGRTGKRLSLAYQYNVQKNRLMQDTHKEINRARLNLHLLINLDTYYSLKSSIWEEDRPFIERIDAYLKKNMLPSTPAPEPERSFELVADEKWITEKQGKEMLIRIGLWDKLLILPVDDPLMFAVNPYVLTNSVHKHLIVENKTTYQALLQVLPDVPFATLIFGGGYRVTKSIELLPMQLPLRDAAHEFYYFGDIDKEGIHIWHLFNKRVLTLFGRPASLALPFYRACLSREFASGKENQRNFEQALQAFVSHFTEEEQIKIDRCFAAGGYFPQEILPTHELCTIWRHTAWIT

SEQ ID NO: 41503 - protein, 508 aa, Paenibacillus sp. Soil724D2
MDYIEIGQVVSGFRERMTKLALFDPLYELQRKRQTDRQNKPIDFMELGLLTLLYFFEQKLMRNNKVGVKDLAEFLLKVTGIFIDLDEAEFEDLARQITQVFRPTTGKKRDFTFMNWESGQSEHIYISILKANAFDLKTNTQYYTLDEDGLELIFATKEFYTEFQLSIHQLVLRKQLEKGEFEGALRQINEMRIDVEALQERMVKLEHELKRNIVSEETFGRYKGLLDDIYLRLQMENEEFEELRQFVKETKDRVQAQTVRQADQRPYELILRISNELEKVHGEHSDLFHESMVLKSHALGAAQESLYYTGLDSFNFDQDIASLIFSTPLPLETMKGVLAPFLPVQETKAWSLLTVWAEQNMLEDGSGQERDDKFLELGGDSDEYRYQTMQKKLYKLLMEQLLQMMEEQGQVELKLFIQLFKESELARLLGERAFYDFWIYLHQRSPLRADDRDKQQNEEQGTLLEDMYMLLGSRCLVIIEQENIIKVNDRFSIQNMLISWGEQDDNWT

SEQ ID NO: 41504 - protein, 253 aa, Paenibacillus sp. Soil724D2
MTIGLENGTVMRAFRIYTLLARDNAVGKERLQEYMADDVVRGLVDQFAREVDCVTVIAGEQLYMIPETRLSPFHMNNEVIKRTYLRANAVNADLYLMYVSIIVLIGGFYDSYQTMEPTRSFIGIEEWTELVNERIALLKTHPEAELREMEQEFSYNWTALIEKWSAMDDIKETAARQSGNTISRVSFMDSVRKFLVAQELVIDIGNQEITLTEKAKVVVQRYFMELEYNRGILEFLYQSNTFEEEGSEHASHL

SEQ ID NO: 41505 - protein, 1476 aa, Paenibacillus sp. Soil724D2
MPAISKIRFTNVVYEDGNKRYNDELFHFDGHNGAILLENGGGKTVFIQSAIQAILPHAELAGRKMKDTLSLENGPAHIAIEWILSERPRRYVVTCVSLFLTATGVDSYRYVYDYPELDADAIDRIPFVKESAGSLRAADKGEIHDYYHQMTSKRMNAKLPSSIKEYKKVLENDYHIIASEWDRIAKINSSEGGVESFFDECKTTSQLFDRLLIPTVEDAMAGYEQGEFANNFEMHRDSFKKYKELKEKIEENKKILVELDGYVLHFAKMDAKQMAYAAAQAETKAYWLLVNEHKNEEASKLSQWHRQMAECDQQLLLLARRKESLQIAKQKQDQSALETKLRLVEEDVERKEAQVRSAKQHYYSLRLADYKQQWTSAEERMNYLQRELDQFGNTQEEGDLREAWNNNSGQIRSIYSKMEQEWQVEEEKLRQELDAHQNRTALEETILRDLSSELEGLNKQLIEHRSIVQAREKDKEVLRANVLANPAVESMEGSMTDWIQRYQKLDDSNVLLVQNNKDLAFGKEESMRELERVSESLKIAYVGRASSEQNLEAFKKEHQSMLTEISAYRSSWGRLSSVYEKQSSIEERLREDLEKLHLQKEAYLLKERLAFRYIDDYSYQHTFFADTYVAGLVDKWRNQFALLETGIQYLQGLDLSERAMTHPLWSVTLITTEEEVGLLTSKLGQYAEDMQFPIQVISSQEASRLANMDTPIAVQDKAWVEPQHWRENADVAEFASWKRAISQKGEEVLTARKVKESELQRTSDLQTSFSRFTASYPLEVVQEMERQVGLKREQVRELESQEDSIRKSVRQAEQTIQQHNNIMDEQKGEMVQLQQWIEKGRTYVELGKEIAALNVAIDQLVEQAEDQQSKLDSRQRSMEQVKLQIESVKSSMNYLRTEKASLQSQDTYIETLDVQPIETNHSLDWLKTERKDLHLKLNRISQGRQQLETEWNHAKTSRTTLEKEMNKLRLEQADLDLNEDLAFSVTGEDQMSQLLSELKDLESRLSRDKEEFTRVEKQFDALATTIKLLIEQYGAAHSGGLPVTFTESLTVVDDQVQSEETRLHQQKTGLQQQHTQIQAQLGKIEDVIQYLNQYKIMHGFENSLIQASLITQELKAEFLNDRMKMVRKSVTLLSAVMKELEAEESSVKKARVHFVDFCRKQIKDIKMRDMAEQGVEKKDNYQELMQFQQKMHSRIERVNHVAEETMRTHNQQLEQYIIHVHSHIKLIASELRDIPNKTRVKVEDQWKHIYSFQIPEWDELEAKDHLRKHLEWILAELDKGHYLDDNGQEVKSTVRKEIEKWLDTKQLLHIVLQERPMKVSCRKVTNENNVTKASFSWEQSNNWSGGEKWSKNMTLFLGLLNYVAEKRQHIQANMKRHRTVILDNPFGKASSDHVLSPVFFIAEQLGFQIIALTAHAEGKFLKDYFPVVFSCRLRQAANGSKLVMTKEKEINQAYFRDYAPISLERLGDVKQMELFI

SEQ ID NO: 41506 - protein, 508 aa, Paenibacillus sp. Soil750
MDYLEIGQVISGFRERMTKLALFDPLYELQRKRQTDRQNKPIDFMELGLLTLLYFFEQKLMRNNKAGVKDLAEFLLKVTGIFIDLDEAGFEDLARQITQVFRPTTGKKRDFTFMNWESGVQEHIYISILKANAFDLKTNTQYYTLDEDGLELIFATKEFYTEFQLSIHQLVLRKQLEKGEFEGALRQINEMRIDVEALQERMIKLEHELKRNIVSEETFGRYKGLLEDIYLRLQMENEEFEELRQFVKETKDRVQAQTVRQVDQRPYELILRISNELEKVHGEHSVLFHQSMVLKSHALGAAQESLYYTGLDSFNFDQDIASLIFSTPLPPETMKGVIAPFLPVQETKMWSLLTVWAEQNLLEDSTGQEREDTFLEIGGDSDEYRYQTMQKKLYKHLMELLLQMMEEQGQVEVKLFIEQFEIREDARLLSERAFYDFWIYLHQRSPLRAVDMDQQQNEEQATLMEDMYALLGSRCLVVIEQQDIIQVNDRFSIQNMLISWGEQDDNRT

SEQ ID NO: 41507 - protein, 253 aa, Paenibacillus sp. Soil750
MTIGLENGTVMKAFRIYTLLARDNEVGKEWLQAYMADDVVRGLVDQFAREVDCVTIIAGEQLYMIPETRLSPFHMNNEVIKRTYLRANAVNADLYLMYVSIIVLIGAFYDSYQTMEPTRSFIGIEEWTALVNERIALLKTHPEAELKEMEKEFSYNWTALIEKWSAMDDIKETAARQSGNTISRVSFMDSVRKFLIAQELVIDIGNQEISLTEKAKVVVQRYFMELEYNRGILEFLYQSHAFEGEGSEHASDL

SEQ ID NO: 41508 - protein, 1476 aa, Paenibacillus sp. Soil750
MPAISRIRFTNVVYEDGNKRYNDELFHFDGHNGAILLENGGGKTVFIQSAIQAILPHEELAGRKIKDTLSLENGPAHIAIEWILSERPRRYVVTCISLFLTATGIDSYRYVYDYPVLDPDAIDRIPFVKESVGHLRAADKGEIHDYYHQMTVKRMNAKLPATMKEYRKILENDYHIIASEWERIAKINSSEGGVESFFDECKTTGQLFDRLLIPTVEDAMAGYEQGEFANNFEMHRDSFKKYKELKEKIEENKKILVELDQYVHRYATMDTKQVAYAAAQAETKAYWLLVNEQKNEETAKLSGWHQMMSTCDEQLLVLARKKESLHIAKQMQEQSVLETKLRLVEDDVEFKEKLVRSARESYYSLRLADYKQQWTSAEERMNYVQRELEQFGHTQEEDVLRNAWSQNGGQIRGIFSKMEHEWQVEQEKLSQEEAAHQNRLNLEETILRDLSSELELLNKQLIEHRSLVQAREKDRDELRANILVNPAVESMEGSMADWSQRYQKLDDSNVQLVEKNKDLALSKEESERQLASVSESLKTAFVERANIEHKLESFKKEQQSMLEEIALYRSSWGRLSSVYEKQSSIEERLSEDTAKLLLEKEAYLLKERLAFRYIDDYSSQPIFFADVYVAGLVDKWRNQFTLLETGIQYLQSLKLTERAMTQPLWSITLITTEGEVGLVTSKLQQYAEDMQYPIQVISSQEAARLAGSDTPAAAEGSAWVEPQHWRDNAEAAEFINWKHAITQKGEEVRTARKEKERDLQRTSELQAAFSRFLLQYPLEVVQEMERGVGLARDSVRELEGQEDAIKRSIRQAEQVIQQHNAVLDEQKEEMIRLGQWIEKGRKYIELGKEIMTLNGAIDQLDQQSNDQQHKLEGRRRSMELAKLQSESVKGRMSVLRTEKASLLSQDLYIELADVQPIEAKHSLDWLKTERKDLHLKLNHISQGRQQLETELKHAQASRTTLEREMNKLRLEQADLNLNEELAFSVTGEDQMSQLLSELKEHESRLMRDKEELVRVDKQFNELTARIKLLIEQYSGLHEGERPLTFTESLSVVDAQVQSEDARLQQQKLGLQQQHTQIQAQLSKIGDVIDYLNQYKILHGFENPLIQAAFITQEQKAEFLNDRMKWVRKSVASLIALMKELEVEESTVKKARLHFIDFCRKQIKDVKMRDMAEQGVENKDNYVELTQFQHKMHSRIERVNHVAEETMRTHNQQLEQYIIHVHSHLKLIASELRDIPNKTRVKVEDQWKHIFSFLIPEWDELEAKDHLRKHLEWVLTELEKGHYRDENDQEVKSTVRKELEKWLDTKQLLQIVLQEKVMKVSCRKVTNENNVTKASFSWEQSNNWSGGEKWSKNMTLFLGLLNYVAEKRQHIQANMKRHRTVILDNPFGKASSDHVLSPVFFIAEQLGFQIIALTAHAEGKFLKDYFPVVFSCRLRQAANGSKLVMTKEKEINQAYFRDHAPISLERLGDVKQIELFI

SEQ ID NO: 41509 - protein, 348 aa, Paenibacillus sp. Soil750
MNPNSIIRTYLQKVKKAKVSLHELEALFQGQPCTYEQFAQSVLELEAEEIIQMVQSKGRTGKRPSLAYQYSVQKNRLKVDTHKDIHQARMLLHPDIQLDTYYSVGAEVWEQDRPYLERIDAYLKRGKLPTTPVPAPERSFELVADEKWITEKQGKELLTRIGMWDKLLIIPVEDPLMFAVNPYSLTSVVHRHLIVENKTTYQALLQALPDVPFATLIFGGGYRITRSIELLPLQLPLRDATHEFYYFGDIDRVGIHIWHLFNERVLALFGRPANLALPFYRACLSLEFAYGKENQRGHEQALQDFLSHFTVEEQEIINQCLATGGYFPQEIVSTHELCKIWRHTAWTT

SEQ ID NO: 41510 - protein, 508 aa, Paenibacillus sp. Soil766
MDYVEIGQVISGFRERMTKLALFDPLYELQRKRQTDRQNKPIDFMELGLLTLLYFFEQKLMRNNKAGVKDLAEFLQKVTGIFIDLDEAGFEDLARQITQLFRPTTGKKRDFTFMNWESGQTEHIYISILKANAFDLKTNTQYYTLDEDGLELIFATKEFYTEFQLSIHQLVLRKQLEKGEFEGALRQINEMRIDVEALQERMVKLEHELKRNIVSEETFVRYKGLLEDIYLRLHMENEEFEELRQFVKETKDRVQAQTVRQADQRPYELILRISNELEKVHGEHSVLFHQSMVLKSHALGAAQESLYYTGLDSFNFDQDIASLIFSTPLPPETMQGVIAPFLPVQESKMWSLLTVWAQQNLLEDSSGQERDDTFLEIGGDSEEYRYQTIQKKLYKLLMELLLHMMEEQDHVEVNVFIQQFEGHEHAKLLAERAFYDFWIYLHQRSPLRAVDMDTEQNEEQGTLLEDMYALLGNRCLVVIEQQDIIKVNDRFSIQNMLITWGEQDDNRT

SEQ ID NO: 41511 - protein, 253 aa, Paenibacillus sp. Soil766
MTIGLENGTVMKAFRIYTLLARDNEVGKEWLQAYMADDVVRGLVDQFAREVDCVTIIAGEQLYMIPETRLSPFHMNNEVIKRTYLRANAVNADLYLMYVSIIVLIGAFYDSYQTMEPTRSFIGIEEWTALVNERISLLKTHPEAELKEMEKEFSYNWTALIEKWSAMDDIKETAAKQSGNTISRVSFMDSVRKFLIAQELVIDIGNQEITLTEKAKVVVQRYFMELEYNRGILEFLYQSHTFEGEGSEHASDL

SEQ ID NO: 41512 - protein, 1476 aa, Paenibacillus sp. Soil766
MPAISRIRFTNVVYEDGNKRYNDELFHFDGHNGAILLENGGGKTVFIQSAMQAILPHEELAGRKIKDTLSLENGPAHIAIEWILSERPRRYVVTCISLFLTATGIDSYRYVYDYPVLDPDAIDRIPFVKGSAGHIRAADKGEIHDYYHGMTVKRMNAKLPSTMKEYKKILENDYHIIASEWERIAKINSSEGGVESFFDECKTTGQLFDRLLIPTVEDAMAGYEQGEFANNFEMHRDSFKKYKELKEKIEENKKILVELDQYVLRYATMDTKQVAYLAAQAETKAYWLLVNEQKNEETAKLSGWHQMMSACEEQLQGLARKKESLHIAKQKQEQSVLETKLSLVEEDVEFKEKLVRSARESYYSLRLADYRQQWTSAEERMNYVQRELEQFGHTQEEDVLRKAWIQNGGQIRSIYSKMEQEWQAEEEKLRQETTAHQNRLNLEETILNELSSELEGLNKQLIAHRSLVQAREKDRDELRANSLANPAVESMEGSMADWIQRYQKLDEGNVLLVQKNKELATGKEESERQLVGVSDNLKTAFVERANAEHKLESFRKVHQSMLEEIASYKPSWGRLSSVYEKQSSIEERLHEDTEKLLLEKEAYLLKERLAFRYIDDYSAQPTFFADVYVAGLVDKWRNQFDLLETGIQYLQSLQLTERAMTHPLWSVTLITTEGEVGVVTNKLRQYAEDMQFPIQVISSQEAARLANSDTPVAAEDRAWVEPQHWRDNAEDMEFISWKHTISQKGEEVRSARREKERDLQRTSDLQASFRRFLSAYPLEIVQEMERQVGLARDSVRELEGQEDAIQKSIRQVEQTIHQHNAVMDKQKEEMVQLGQWIEKGRKYVELGKEIVALNSAIEQLAQQSDDQQNKLEGRRRSMEQAKLQSESVKGRMNALRTEKASLQSQDLYMELGDVQPIEANHSLDWLKTERKDLHLKLHHVSQGRQQLETELKHAQASRTTLEREMSKLRLEQADLNLNEELPFSVTGEDQMSQLMLELKEHELRLTRDKEELVRVGKQFNELTARIKLLVEQYRGSHEGEGPLTFTESLSAVDVHVQSEDTRLQQMKSGLQQQYAQIQVQLGKIEDVIQYLNQYKILHGFENPLIPVAFISQAQRAEFPNDRMKWVRKSVATLTALMKELEAEESTVKKARLHFIDFCRKQIKDVKMRDMAEQGVENKTNYQELTQFQHKMHSRIERVNHVAEETMRTHNQQLEQYIIHVHGHLKLIASELRDIPNKTRVRVEDQWKLIFSFLIPEWDELEAKDHLRKHLEWILTELDKGHYRDDNDQEVKTTVRKELEKWLDTKQLLQIVLQEKVMKVSCRKVTNENNVTKASFSWEQSNNWSGGEKWSKNMTLFLGLLNYVAEKRQHIQANMKRHRTVILDNPFGKASSDHVLSPVFFIAEQLGFQIIALTAHAEGKFLKDYFPVVFSCRLRQAANGSKLVMTKEKEINQAYFRDHAPISLERLGDVKQMELFI

SEQ ID NO: 41513 - protein, 348 aa, Paenibacillus sp. Soil766
MNFNSRIRTHLLSLKKVKVSIDELYALFDGQPCTYEQFAQSVLELEAEKIIQMVQSKGRTGKRPSLAYQYSVQKNRLKVDTHKDIHQARMLLHPDIQLDAYYSLGAEIWEQDKLYIAMIDTYLKEYMLPTTPVPAPERSFELVADEKWITEKRGGELLTRIGLWDKFLILLVDDPLMFAVNPYGLTNEVHRHLIVENKTTYQALLQALPDVPFATLIFGGGYRITKSIELLSMQLPLKDPVHEFYYFGDIDKKGIHIWHLLNEQVIKLFGRPAKLAFPFYRACLSRKFAKGKEYQRSHEQALQTFTSHFTEEERKIINQCLASGGYFPQEILPSHELCRIWRHTAWTT

SEQ ID NO: 41514 - protein, 508 aa, Paenibacillus sp. Soil787
MDYVEIGQVVSGFRERMTKLALFDPLYELQRKRQTDRQNKPIDFMELGLLTLLYFFEQKLMRNNKAGVKDLAEFLLKVTGIFVDLDEAGFEDLARQITQVFRPTTGKKRDFTFMNWESGNTEYIYISILRANAFDLKTNTQYYTLDEDGLELIFATKEFYTEFQLSIHQLVLRKQLEKGEFEGALRQINEMRIDVEALQERMVKLEHELKRNIVSEETFGRYKGLLEDIYLRLQMENEEFEELRQFVKETKDRVQAQTVRQADQRPYELILRISNELEKVHGEHSVLFHQSMVLKSHALGAAQESLYYTGLDSFNFDQDIASLIFSTPLPLETMKGVLAPFLPVQETKMWSLLTVWAEQNMLEDGSGQERDDKFLEIGGDSDEYRYQTMQKKLYMLLMELLLQMMEEQGQVELHAFIQLFEKSEHARLLGERAFYDFWIYLHQRSPLRADDRDKQQNEEPGTLLEDIYMLLGSRCLVIIEQEDIMKVNDRFSIQNMLISWGEQDDNRT

SEQ ID NO: 41515 - protein, 253 aa, Paenibacillus sp. Soil787
MTIGLENGTVMRAFRIYTLLARDNAVGKEWLQEYMADDVVRGLVDQFAREVDCVTIIAGEQLYMIPETRLSPFHMNNEVIKRTYLRANAVNADIYLMYVSIIVLIGAFYDSYQTMEPTRSFIGIEEWTALVNERIALLKTHPEAELREMEQEFSYNWTALIEKWSAMDDIKETAARQSGNTISRVSFMDSVRKFLIAQELVIDIGNQEITLTEKAKVVVQRYFMELEYNRGILEFLYQSDTFEGEGSEHASDL

SEQ ID NO: 41516 - protein, 1476 aa, Paenibacillus sp. Soil787
MPAISKIRFTNVVYEDGNKRYNDELFHFDGHNGAILLENGGGKTVFIQSAIQAILPHAELAGRKMKDTLSLENGPAHIAIEWILSERPRRYVVTCISLYLTATGIDSYRYVYDYPELDADAIDRIPFVKESAGSLRSADKGEIHDYYHQMTSKKMNAKLPSTLKEYKKILENDYHIIASEWDRIAKINSSEGGVESFFDECKTTSQLFDRLLIPTVEDAMAGYEQGEFANNFEMHRDSFKKYKELKEKIEENKKILVELDGYVRHFAKMDTKQMAYAAAQAETKAFWLLVNEQKNEESAKLSQWHHQMSECDQQLQVVARKKESLHIAKQEQEQSVLETKLRLVEEDVELKETLVRSAKQHYYSLRLAEYRQQLTSAEERMNYLQRELDRFGNTEEEAELREAWLNNGGQIRSIYSQMEQEWQVEDEKLSQELAAYQNRTDLEETMLRELSSELEVLNKQLIEHRSIVLAREKDKEALRANVLANPAVESMEGSMADWIQRYQKLDDSNVLLVQKNKDLAFGKEESERELESVSESLKTAYVERASSEQNLEAFKKEHQSMLAEIAAYKISWGRLSSVYEKQSSIEERLREDTEKQQLEKEAYLLKERLAFRYIDDYSYQHTFFADVYVAGLVEKWRNQFALLETGFQYLQGLELTERAMTHPLWSVTLITTEGEVGLVTSKLRQYAEDMQFPIQVISSQEAARLANSDTPAAVDDSAWVEPQHWRDNADEAEFVSWKQTISQKGEEVRATRKAKERDLQRTSDLQASFSRFITSYPLEVVQEMERQVGTNRERVRELESQGDAIRKSIRQVEQTIGQHNSVMDEQKGEMVQLQQWIEKGRKYVELGKEIDTLNGVIDQLAQQSEDRQSKWESRQRSMEQVKLQIEDVKSRMNYLRTEKASLQSQDLYIEMLDMQPIEANHSLDWLKTERKDLHLKLNHISQGRQQLEAEWSHAKSSRTTLEKEMSKLRLEQADLNLNEDLAFSVTGEEQMSQLLSELKERESRLTRDKEEFVRVEKQFDALATRIKLLIEQYSAAHSGGLPQSFTESLSVVDEQVQSEDIRLQQQKSGLQQQHAQIQAQLGKIEEVIQYLNQYKIMHGFENPLIQAAFITQEQKAEFPYDRMKMVRTSVASLSAVMKELEAEEASVKKARLHFIDFCRKQIKDVKMRDMAEQGVEKKDNYQELTQFQQKMHSRIERVNHVAEETMRTHNQQLEQYIIHVHSHIKLIASELRDIPNKTRVKAQDQWKHIYSFQIPEWDELEAKDHLRKHLEWILAELEKGHYRDDSGQEVKSTVRKEIEKWLDTKQLLHIVLQERPMKVSCRKVTNENNVTKASFSWEQSNNWSGGEKWSKNMTLFLGLLNYVAEKRQHIQANMKRHRTVILDNPFGKASSDHVLSPVFFIAEQLGFQIIALTAHAEGKFLKDYFPVVFSCRLRQAANGSKLVMTKEKEINQAYFRDYAPISLERLEDVKQMELFI

SEQ ID NO: 41517 - protein, 470 aa, Virgibacillus soli
MEKMDREVISIFKSDHELPQMSRAMRDIISLAGVMKDLSSESAFASPLEMLRFLRIIELIHEEAYGLSDPIDSAETLYYRYQARYKDGELPTKARVNQIVTILAKNNWISKQTHQIKMMSVGKRMMDALTRLANDSLAYYLEDEIGRSLFQARRDAEISEAYDDKGISGGNRIASLIHNVQGAIDMLKERELELLADRNALPQLQLIHTLMEELEGKLQERINQFQTIEDSLVLSNLMQKGAGVLAEGTSLSIGLINKYLQFMNVQQTPLQTEISPEKVRVFIEKMFNPPPESEIPNAHQLFSFMEQAQYEGEERDGIWMPVKYATPLSYLDIEKGIDFLENYEPVVADLEEVKTLEFHEENIEVDSVTELVEEASWLLTKASIDTEKIENYLQQKKEADIEETIIETSSPSWGDAIRQLLAIAALEANKNIEFRPKQEVKQYEKEWEWIEDEDRKSGIRRRDHATSKFK

SEQ ID NO: 41518 - protein, 229 aa, Virgibacillus soli
MKTENPAFEEEIMQHQNLNSFHTLRSVLTDREEQTFMSILFSSSATIRANNFGLSRKEVEKLLGVTRNDQYFFSFLSRVNQAVGRYYRLIYDEQRDQVVVLLRVPAWSARHTLSEEALAVLLYMFYQQEVLKHEYTLLSQLLEAFGHEMLKGGRRIQLALDSLRKIGAIEHDPATERKDSYCLTAIGVHMFSDSFLRRVVEFSHSNQLSKEDVMKFFSRYNLYEQEGMM

SEQ ID NO: 41519 - protein, 1071 aa, Virgibacillus soli
MIPWRLQFSGIRDYGVEEMNLENEHDHVIITGPNGTGKSTISFCMGAVLRSSKVDIDGLKSQNLPVDQTWHAQIRFLFKNVGYSRIDAPLYIEFRLYCEQLPKQPIKLRYEIHDGDEIDQLELRQTYRSGDVNKNNYSAYKRELQFKYKIHPDLYYLIWYQQEVNQFAEMVPEERFRIFSEMHGIQKIQKDWETSLEVVKEAQESLAVTTNQQKAYEFNLSVARSAKDRYEANKKRLHENGYLYACMTYQLQIGAEQDQVKMEKYIEERELELDSLIHQQIENEERIALEKDKRKDLIQEQNQKQASRKQQLENLRMNEDRQAEVDTEVNLLQNELSELREAYQKLSYSEEETKEKWLQATEQAEQLRGRDKSLREKITSMNDEMESTRQKQADLKSAIKQWEENSRSAHDLLTRYTSSYKLTEEIALLDDSIQTKKEQLEEKNKQLRTSKKELEMLERNQIESPRQREAIRELKKQGIQAYSFRYFISMIDHVDLKKETLFDTIKYTVFYDGSTCQPVNDLYHVSLKKIIPDRSLTELPQWGLRMREGLSTEDQNKAARVLWWIERFFSKETPRIEHGWLVDQQGMRGAQEQDSYILSKKALENRKQNLEQQIDFLQKELELLKEKVTKENETYQIWNADVQKIKEAEAFLSTKAEQDYRIKQLEQYRILYQQLLEDKTRLEEESQNTWKESHRLSEEVKKLETDLQVYEKFSQQTERIERLQKLEQSLKELKNEIKGLRSSITTLNNELDDVQQHLRTNQRTIDELEDEGTQNKRSIKLISNQKQEKEEERIAMSKVAVGYKEELEELRQLIPDLVEKAATNKQADESKFELQNRQNQAKVEFFTAKNEKDIDPNAVENFYTLEKEVLRKKDELLAAKNLLEENEERAIQNEKRLETAITMQVQRIHLLFEQYMGLFQFEGQIKYEKTLDKKGRPVFKLFIYVRKEGHRGKVWDVSWKARGGRVGKGVSGGEESLSSLLFALSLLQNLENRASFIVMDEFDSALDENRKAKVFELYAEELQRKLIILSPKGHEDEYYNRFSKAFIVSHDPTELRSKVKGIKLNSAKNLV

SEQ ID NO: 41520 - protein, 147 aa, Virgibacillus soli
MHTKEFIQKYICKSGETIEQLSQNEWQIQKWTARTFKTMGNVLAEEQYDQSPVEEIKGLKLKPHSRRNSLPLSEKIIQEGLYKGWIIQEIRFKKDGRTPADSVYRMGPGLFIYERLRSEKVDLEDRELKQILLKELENSKGTLPNDF

SEQ ID NO: 41521 - protein, 504 aa, Streptomyces anulatus
MNDSREPASVELSDDGLARRAKALACTAPLQALDENKGSLRWVEASVYQLAEIALHTIDQVTISMDFDSGANQQKVVDQVARLAALQAPERTAEEHRKVARHVLQRLINVGTVDRSFAEKIGSIDRSGVYRRYDFRFNLLVERAGPDGKIYLRASDEAINVLVGALDTDVESAQIAAEVKLESLIRRRRIAEAKLAAEQARYRTVQYGEMLRQLLDATSRDIRAVDWEQEVPKLLADALIHIEERYDFEHRILSNISELRDKSDEPLRKRKAAELVTIVRDCIRRHMQLQQRLLTAGALFREEQDRQQFAELPVRSVLDLHGQLLTPALGLPLGDALTVGKEFFRGATGARPPVVLELSGLVTRLLRPMPERDRLGEEIPEPDLTDTTEKPVFSLEDWAATDALLDLRDTPRQLSDLLTEAERTAPSTAALLLHRAVNAFNPHVGESIARGSSRMLVGVATGDRFDHPHFGGDGLLLYSAPIVSPPDASDAPGSELSLPEEPLR

SEQ ID NO: 41522 - protein, 1486 aa, Streptomyces anulatus
MYELSRVALQSVGPAGARYQDVLLDFSAVGRPVSDRRMSLFGAGAPARRPSPATVLFLENGGGKSVLIKLIFSVVLPGRRQIVGTSGGGVLERFVLPKDTSHVVLEWTHARSGRRLITGKVMEWKDRRESSDPRNLLERWYHFRPTATLHLDNLPFSSSNHYRTQTDYLNELAKADTADSAMEYGEFVRQGEWTERLADLNLDPELFKYQRSMNADEGEAAEAFSFTSDIAFVNFLLGAVLPTDPAKELADLLDTYAGRLHRRSVLLIEQEFAQGALSILQSLADARVTADEARVRRRITTREMATLMGRIRARAGAEAGAVRRIQGEARQLADDSARARAEHARMEAATIELERLVAELRWQDARSEANAAQEEARRAEDESAAWAVAPTVLRRLTAEQRLSSLRVVVAAAEKAAQPALAARDEAAALLIRALRDGMEELKEKSSRIEVQAVAAAEQAEADQKVHNDALGRAIGQVKEAHTAEQRVREVRGRIADAVREGLLAPEATASSALEEAQEAVAGNARRLATLEKEVKRLESEQQEAARAVETSERQLAGLHRGLDSAEQKWKAAMARRDALGVDPAFLDLLGHRPDHLETAAEALRSRLVEVRDKAAAEITDLHVAEAQDARSRFALESTELLPASSEATRVKELLVEGGITAWTGWEYLAAIPDVERRRKLVRQVPQLASGVLLNNPAQLPAAEELVNRQEPHPSVFLAVGTTEAVTRTHPDISGVGFIVEPHPALYDERSADTERRLVRQRHDQRVARLAELSERRAAAAALVARIQEWRRDFPPGRLAELQQCVEERRLLAEAGEQEARELRAFHETLSDRRLAALEEAEPVRSAQRGLDERAHRLTVLADEEARVPGWEATADLRREAGEREREAAGEADRAARRGREQAAALLRQVDGMRASASRLSEELTGLPSDVKVPGVPEGASAPLEVLRRDYVQAAETYLRVSVGDQLLADLQQTEREISLIAAELDEHQDAVVELAGKLLNGPQGTDSASRELARRIADQAAPELRLRASELSAHAASRRKEYEKFTPPLAEVDLAPFERPRHVGHGLRLLEEAKEMRNQVARTVTELDRHGQRLKESLEEAESSRKGFELLLMGSDEFAEFAPITGPAGPEPYGGDLAAAAAEHQAARTVHDEARKQETVAEDEERRFSDQLVRHAGRDRFLPLETSSRRIILEIERAELPGRAAEWVGAMRGRLRSLTDDLETIDRHRTAIVRQLSQQVAEALETLRRAERFSRLPQGLGDWSGQNFLRIRFKSVSEEALRDHMGLLVDDMAKSTIEALETGREPKRDGLSLILKGVAAGAPSGFKVTILKPDSALLAQKVPVSDIRAVFSGGQLLTTAIILYCTMAALRANDRGRVGHQHSGVLFLDNPIGRASTTYLLRLQQSVARTLGVQLIYTTGLFDTNALDTFPLVIRLRNDTDLGARRKYLSVDGVFGRYLDESLAAGAPQISASRYFVKDETADDDE

SEQ ID NO: 41523 - protein, 283 aa, Streptomyces anulatus
MPIWAGELAQIEDYWALARTTDRIRAAYEALNTRLHSGHRGMCIPQRERALQIFGLHPFFQHPDHPAEKLFDTLDAQPLFSDRERLLKLLNAFDVDPPLLSKDFRSRGLVKNHAGYHKPGKGSTLLVIENSTTYWSISHMLGHIGRIGHRIGHVAWGSGVTFQKSIGSLTARDRISDIVYFGDLDPSGLAFPARAERYVGRLRVRPAFELYDALLRLGTPSRSLPKEAWSTPERVDELVFWLDPRHHDQVRDLLLSGSRLAQEWVGFDHLSTTERWYADVRDT

SEQ ID NO: 41524 - protein, 488 aa, Salmonella enterica
  subsp. enterica serovar Itami str. SA20014991
MSLGFLEQARNESMARRELTIQSHALLVVRTLDSIYSALQRNPFDGFELDALAAIMYLFDAMLYYADRERQPGMTRKEAELCLVGHLNEAYPGQEESDYAQTASKIFAAIKDPFRLRYYDFSQRTHSEEQIVRLVRYDLLSGSDDILWSLTDEGMLFYTLRLDETPIERAAILAWRTLKTIRRGEIDKAVHQIQSTQRQLEQYLIGMRMKVRAAQSGDLSASYAHDIRPVLNDSFDKTREVLEHIQNSMSAITEMLVEGSAKLNPDKLNKLRKAQEIFAEVCAFTQRYQDCLLDVNKDFERARLKLIIPRDNTLFRETLEKGALKPLLSHSSDTVEKEIDGLTARLLAPRRQDDDRHILFDLEALLNLYLDRFEQALPHEIQDPTDQPVAIETNLRGIPESAIKKCSDWVSDRLKNWGHVSFRDVFDAYECEELSKQEQQVCLLHIGSLAANSDPAIEVEIDDAIETTLWRANNIKLLTVASLYPFEE

SEQ ID NO: 41525 - protein, 1480 aa, Salmonella enterica
  subsp. enterica serovar Itami str. SA20014991
MWLIKRVYMDGAGHEEAFYKDLTLDYIGLSQAVGSPVVEGLRSPVRNAKVVTSTYQQLVNGGGKSTYIALLLSIFEPSVSDFTQYLANHRQSEYHYRNYFYKELSVVLVEMVNESGQTLLLGHAHQRNGDDVDRTLFICDAPDSLMGAPFDEVPSYSRAERNSELRPYANSLRSFDSWLNLKAGSEGGMHWRKTTRQNEWRAFLLEQQINVDLIKTMVTFNSEEGGLTRFIEYKTEHDFLGAFFACTMSKDAAERLRELVAHEVERQGELEGIRRNESFLKDVLANWLAFLDPAKQLESIQAQQQLLDDGFREAMRDLAAFVGDAQVEQTQLEDNMDSLQTHIGQAMSLHEQLGKRRALLEYDLVQHQFNKQKAIVDALQDEADTNQRQIEITHAAIDYKAYAKALNEYRQADEDLKVFQSETERPLQVIFERTAGEALGTLEWAIDRHRQQEATLEEELGQMDRESHVLRQSYDKLQKTLGGLETERDGYKRDKFQGESQRNELCEAGVIQKGETPVAAQYRLELTLRDAKQSEELANTIHHQKEQALEAQLNVVREASIEKSEAQQKLILAEQKHQSAVDSALLLAKTYQKLPTSTRHDLDIEDTSWHSELCGLQLDKVLNANAQTLNGMKERLLQARHELDELRMTGHELVAKLVNQALEAFYAAGIARDKLWTFPHYLASVYNDDAQKIAAVIDQNPGRYLSLVALDNVTFEQVHKISEILPWKKAPIAIYLLDEAQDLRRETPELVQVVLSNPDKHGYSQAAYEARLQDLENIVASQEVSVKAAKSALKVLESFRNDWRLHYEQYGKHWGGLLDQRELALLILENADAALKQAEHDEQTLRDEKRDAQVRLNNAQQQKIQAEKAHDKLSFFVETEWAKRETAIMKLEQLAAQIQRSKDTLCTQRERLERLNEIKENKRSEKTLLNIQMGNWSNLCNEPFYSEITATEGMEGRSPEDAHEMAAQAHKKLLEAANGDQVTALKQQLKDAEQAQRYASERLTAQPTYNTYPDEVKAAAINELTVINNRIVRLKEQQKQFTQNLINSQVTLQNFSQSCEEASKAIDEDFVWEEKPIEIETIQTSLAEIVNSLHEIEYQLKLQLEQKKLQLQKMENVKERLQNAKTAQAMIQPITPTSAAGLPGRIQSITEYTDDLVTQCQKYAGLNETLKQQNIRVSTVWGKFRKRIEEELAKDPDARASQEYLRQLDSIATYHEVLGDLDRVGTGITQVFEAVQDSLEQFQRSIDLTVTHLTAHLEGAIKLLKRAMSVKIPEDCPVLPGRPIIKMTDRLNDVAADLRGFASSRLQQWIARGQIPRAPNRDALTADLIQSVFGEGELEVRLLKTNASRPQWTPVTRLEGSGGQRLTSAFLLFVTVGKVREYDTGISSAGFLLADNPLGKSNADDLMRIQTQMAKAYKIQLIYLTGISDENAQSMFDNHLFLNKVQKLRRRDLVTVDKERHALWAASLAAKPQFDPVILG

SEQ ID NO: 41526 - protein, 347 aa, Salmonella enterica
  subsp. enterica serovar Itami str. SA20014991
MIWLSRLESTANKHRLAAGKAARTVKANAVLDEVIRVHNQEALAQDAPDLLSQAVTQLLLKDWRAQPKRKASWQRYWRGMSLPSTFVYEGAIVPTKTISEVAWHPWLAQRITGQLTQPIKARLQQLNTYLFRQTEGDKSLFPGLLGHRERSLLIFGDEKALDSLPPDGWKHVILTLADMGAFRRAPPLPYKSSCCHDLPAIIVENSDVYYRLCQLNRVQTRWSLVIYGAGNKVSGQAECVSQLLEVEKVEQLLYFGDLDVAGLKIAHQLHCKLLNDYGISLHLDEWLYNELISNGLMTAEGNANNERFDFELQCGWMPQFVLREMKTLLAIHQRLPQEGVASLGLVI

SEQ ID NO: 41527 - protein, 503 aa, Streptomyces scabiei
MSSDAMNDHGGGRNVWADEGLTRRLKALACTAPLHDLDIRQANQPWLNGTQYQMAEVALQIIDHVAIAMDYDTGANHEQVLLRAAGFVGWQAPDRPADEHTRVAGWVLDSLINVRDADRGFRRFYGEVDRAGAYALRKWDFKLIEERSDSNGDLYLRASNEALNVLVGALDTDVESAQIAAEVRLRNLIGRGRLADAKAVAEQARIRTIQYAEIIRAQLDATSRNVTTVDWTDEIPDLLNEALDHVDNRLLEEAAIARSVSTERDLSEDPVRRRQAADLVEILDDCVRRHTRLQTRLRGARTLFLDEQDRQQFSGTALRAPVDVYGDLLEPVLRLTLADASLPVRSFYEQSVGPTTEDQFCLATLVPALLAPSAERARFTGEEEEPELVPVVEVRGYTDEQQRVAESLLDLADEARPLSELLEEAAALDPELPELLVLLALRAFSPQLGAALSEGADRVLLAVSAGAPLDSQGFEGDDLLLTSAAFDRAALDADRLERNSGRS

SEQ ID NO: 41528 - protein, 1488 aa, Streptomyces scabiei
MYELSRVRLRTVGPAGARFHDVTMDLSGAGRPVGAEQGALFDTTATTYRPSPASLILLENGGGKSVLLKLVFSVVLPGRRHTVGTTNTRVVEKFVMPKDVSHIVLEWMNPLTGELLLTGKVLAWRNQVASEVSDNLRERWYCLQPSDEINLDTLPMAVGTKSRTLDTYRDELQEAYAADQSLALYWTRHQGEWTNRLQLLELDPELFRYQREMNVDEGEAANWLKLDSDVKFVDFLLRAIVKADEMDDLAALVTEHVERLAGRGLLLTEREFVARALELLGPIAEQAEASRQSRRRAEEAVRDVAELGGRLRVRARNEHHVVLGQRAKLVKSEEELKKLTVTAERAKGIVLELRRHLADLKHERAQRELAVREKGLSWARDHVKAWQATSAVHEYEDSIAQVKTLTELIGAAEEKARPALEERDSAARRLARSLWATADAAAQSASDDLKQVSAREKEKSAAQDRARAAHRAATTAEHAAAQFGQLITRLRKDIEAAVSDGLLHDPAALSRTVETVQEQRDNTAQRVTDLEREWAELADREALAQDELRKAESEAGDLRGRSKELSGRLDEVRTQTARLEKNPRLVALLDVPDIDLERDVAALLEALNAARLEAERERTELRVAESIDEQARHALAAGDLLPPAQVVSDACKALEDAKVVAVPGWRYLAAIPDTDRRRDIVERLPHLAAGILLHDPSDIDRARDVLTALRPQPTVFVSVATTRTFTDPEAALTDGVEVVIPPHPALYDVDAAAAEHEAIDARHAVRSARAEELTARIEQDGNLTYGLTDWRTRYPEGSITALTEEHAGVVRELTTADATVTERKEVLETLQERRRKIKEELPPLRETRDSLIKRLDRLQELADRNGHLPEWTEQASSEKERMRERQEAAGKAENEAVELQKLVTLHQRRADEYQRTVRFVNDERARLPGSEDVLPSDPVPELSTALLRSTYDQAAERYLRVQVGSDLLEERERANERAAKAKQGYYKLSKDLRGRAAGLLMSPEGSDEAARATALESAEQAVREAERVVRDAAVAASRCADELTAAEDRVTTPVKLPEYPADIDSCAEAVEDAGRQQASSARKAAEHQEVHTRLGHQLEGAEASAKAFQFIVEGFAKDVSAGDDEAADVAPYEGDADAAQDLATRLTNERRTREANAHTDEQTLRTATERLTHHAGAEEFKDLHVRVQTQIRIAGWETVAARATEWSDALRPRLRALNEEIDQTERHRTLIVRNLKAQVDKALALLRQAQRMSRLPASLDDWAAQEFLRFRFTPAQDDTAHLHIGEVIDEAAKGRTADGRSVRRDGMSLLLAGVRAAVPRGFRIDMLKPDAVLRNERIRVSEIKDVFSGGQHLTAAILLYCTMAALRASNRGRERDTHSGVLFLDNPIGRANADYLLALQRKVAEALGVQLIYTTGLSDDGTLKRFPLILRLRNDADLRAGRKYLTVTDRIQEALDALPESDGTGIVTTIRIFKRETEDGQNREAQAE

SEQ ID NO: 41529 - protein, 371 aa, Streptomyces scabiei
MKHRQSEFIGHLRAGATDSGWNGVRRTRVVLDDVWIAFRKVNNRNPDGEFEPLLMSRMLDELEEQGLIQQMKQRTRDKVSLPLKIWLCATAPPRPPEPPMPHWHPDLYQLAREWPTATPKQRSAYVAVNKWLMSDPDLFPVPLRERALEIFGTYGSEADFPMPEKTFDTLRSGPIFGDSDRLHTTLRTFTTHPPLLTETFLTEIGDGYYQRVGGGNILFVVENSATWWSLVNSLPDNHRLGYVAWGLGGTFRASVNTLTAKHHIAEIRYFGDLDLSGIRIPHAASKTAGDRGLPAVQPTERLYGALLELGRARGAKEKAVDAEEARALAEWMPAAHRAKAVSLLVAGQRLAQEWVGYRHLTHNTAWHADLV

SEQ ID NO: 41530 - protein, 511 aa, Methanocalculus sp. 52_23
MADSLRRFKEINERMEHLKCFYPFFEAYTSRPMQGLDYDAPYLALDVLTLLIEKGRLQGRVLKSDEIRAHIEETMKEIHPDREFDCREVTRTVLGFLETNTRNELYCFQYRDPVRGRPVNHYVHLVEYDVTEDGYRITDEGLEFMISIKELPEESRITVALILFKKQIESGSFRNALETVRNLNLEVLRKKGKKQALLDRMRYGDPDVAEGFTTYTQEVIAQIRQEQELFTQVQATLRDLSKDQERIARAPESFGKEEDFIAIQELATELEYGYTLHNTLLKDYTDLPAEYEWICQVRMKSLFDRRYQFQEALENHIHANVPNEVHIVEMHPLLLPNVSRTFGLCSIFEPQRIVGRKVEDMEVKTSEEWGDRKSIEKIVEGRQDENFRIYAQLLVDALAESETIDLPAYLSVIRTCLGDEGIDHIDLIPFLIELNKGTRNGEAYEAIFDLHVPRGQNEPAVEALLSAAAQSGGESHRIRVISRPERRVLIGEEEDVYLSYLTFIGERLHEV

SEQ ID NO: 41531 - protein, 249 aa, Methanocalculus sp. 52_23
MKFDRENLGTALEMLHCMLAEGSIARKDHPKEFLRYDQEAEVREALEFCAEKHDLLVCRYNDALYLSPGVQNRVFGLSNAEIRNSLGRGFNNPEMYTVFFIIHVLITEFYHESAYDAYVEKVAKTNLLAAVEKKMQAMGAIQDLEKTSEEYQFNFKVIYDLWSSLPAVEFKKDDPDEKKQWGVSSKVTLINETIAFLEKNQLAKEHDDAVYLTPRCKAIIREVYSNREVQDAITLFIDGLGHQGGDEDA

SEQ ID NO: 41532 - protein, 486 aa, Methanocalculus sp. 52_23
MPRLRSVRVVNAQFNEGRGLYQDFRLPFYGRNGTYELGNGMGKSVLLMLILQCVLPNAAPDPNKPFKYMFAGGDRNRTTHVLAEWELDEVVDGRRYLLTGFCAKRKSDQEDEGESDEIKYFSYLHLYGEPNDLDIDKIPLCREDGADFFTQDYSETRKMLREKAKTGYDIWIAETRQQYLERLKDYYLIESEWELIKLINRQESYLKTHFHSFRDSRAFVEDLLIKMIDRCLQDRRRLKSHSGDEDPVEKALADSLYQSQEDLRKLQAEQARLHEYEHLQNEISILQTANDHLLRSYRAYEEARQRAASQHVAYVAAIASKEEEIRQLQEQILGKRAACESVHNEIERTGLKLQNVRLNLSGQRLKRAETEKVEHEQTVNTLKHRADFARAVNKYLSIREREAEIREREEIMRKMEEEHQELFARLRPLGKTLHTLVAAEKERVSGALLAGQSRAKETHAENMSLQRDLGGARKQAEGIRRRITEL

SEQ ID NO: 41533 - protein, 363 aa, Methanocalculus sp. 52_23
MERLIRTIVLEHKNKRIHLAEIESALKERGINLFADQSRHRKFIETVDTFIARGILEPLKGARPLQQYGGLPDRYTLHRDVIAGAGAPLLPEHRNELVSLSPPINIDYYVTHGDEYLRDRNYILRINDLILRRGECEVLTVNERSYELFGDEKAIAMPDEASVKGAQILKNLRLTLEDIRAKQVFEPFFWIEKDFLNLQGKAERIVLIVENKDTFWTLQQAVTDGVLAGIHLVIYGEGNAILKKFEYIETVGGVPDDRYRYFGDIDWEGISIYNRLRARYPEYDIRPATTLYAFILQKAGPAGARPLRRPQRAGTLSPFLDFFDAETGDAIRQIVTAERYLPQEVLNTTDLSRFGDGGLTPAL

SEQ ID NO: 41534 - protein, 220 aa, Methanomicrobiales archaeon 53_19
EWICQVRMKSLFDRRYQFQEALENHIHANVPNEVHIVEMHPLLLPNVSRTFGLCSIFEPQRIVGRKVEDMEVKTSEEWGDRKSIEKIVEGRQDENFRIYAQLLVDALAESETIDLPAYLSVIRTCLGDEGIDHIDLIPFLIELNKGTRNGEAYEAIFDLHVPRGQNEPAVEALLSAAAQSGGESHRIRVISRPERRVLIGEEEDVYLSYLTFIGERLHEV

SEQ ID NO: 41535 - protein, 249 aa, Methanomicrobiales archaeon 53_19
MKFDRENLGTALEMLHCMLAEGSIARKDHPKEFLRYDQEAEVREALEFCAEKHDLLVCRYNDALYLSPGVQNRVFGLSNAEIRNSLGRGFNNPEMYTVFFIIHVLITEFYHESAYDAYVEKVAKTNLLAAVEKKIQAMGAIQDLEKTSEEYQFNFKVIYDLWSSLPAVEFKKDDPDEKKQWGVSSKVTLINETIAFLEKNQLAKEHDDAVYLTPRCKAIIREVYSNREVQDAITLFIDGLGHQGGDEDA

SEQ ID NO: 41536 - protein, 1466 aa, Methanomicrobiales archaeon 53_19
MPRLRSVRVVNAQFNEGRGLYQDFRLPFYGRNGTYELGNGMGKSVLLMLILQCVLPNAAPDPNKPFKYMFAGGDRNRTTHVLAEWELDEVVDGRRYLLTGFCAKRKSDQEDEGESDEIKYFSYLHLYGEPNDLDIDKIPLCREDGADFFTQDYSETRKMLREKAKAGYDIWIAETRQQYLERLKDYYLIESEWELIKLINRQESYLKTHFHSFRDSRAFVEDLLIKMIDRCLQDRRRLKSHSGDEDPVEKALADSLYQSQEDLRKLQAEQARLHEYEHLQNEISILQTANDHLLRSYRAYEEARQRAASQHVAYVAAIASKEEEIRQLQEQILGKRAACESVHNEIERTGLKLQNVRLNLSGQRLKRAETEKVEHEQTVNTLKHRADFARAVNKYLSIREREAEIREREEIMRKMEEEHQELFARLRPLGKTLHTLVAAEKERVSGALLAGQSRAKETHAENMSLQRDLGGARKQAEGIRRRITELERQSVELEAREKELVQRHERYPKVSSWFSCSDQVEATEKRLAAEKETCNRLASEISEIERRLSTNQALEPELEKGMADLDRAIETLQREIAHFTAEKGSARQIAEIYEMDDIEACAAHLKDRSEQLHGMLAGYRSRREGLARDLESAEKYGVTLSGEYLAALERLQEKYPTAISGAEHLKGISDDERGECLANAPWLPKAVLLLKGDFEAVVRNPMALPAQVQDAAIVITSIDHLRERRVLSLGDVYISSRMPEQSLEALASDRAAEHHRKEIRAINEEMQKADEALVAITRDSDALSRFINRYPPEFEPERAANLGEHLRQMGGGTARLAALRNQLQEDRSALPRARTGLAEQETTIGLFEEKLALLTDLVKVTEEREKTLSNLQQEHRNAEETTALQRQIEAAISRCDSEFKRLEEINNQMKERLRKVEQEISEYRPYASEDVPTLPDADIDRLRSEYRSARQVVDRVVKDRESYERDNARDRKQIEDDQNDISSYRISIEEIEAGDPEERYSSEYIQEVDRSFEDAERLLKEAAGRYEDVRGKHHLLSLEMEEAERKFNAHAPEAYTRDPDLIDPEPLKADQKRLEAESLTLKAELAHLDAMRREGEKVLEGLINEHNGYELLDSTHYFIQKGAAPASELRGYRYFQEELAAAVGSTTKQKERFGAAKDQFFRNVDEINVPHYFIETVRGKIRIGESVGEATSIQQSLEGYAATVTGWAKAVQAQVEGLLEVETKIIDQALGMAITYRDYLMMVPRLSKIEIDGNPREMLQINFDDCTYRDEVARGEMHRYIQDLTAHIQDGTLSRGELEKALAPGQLVGRVMDMGRIRVKIRKIDIDTYPFQLWEKIKASEGQENTMYIILLVVLISTIRAIVVGRHDRNTAKVLFVDNPFGSTGSYYLWEKIWSILDRNNVQMICSGHKIDAKVREFFPISYLLTSEISAGGRMRIVGVRFVGAGKDLDRLERQKRGEILAWTEE

SEQ ID NO: 41537 - protein, 222 aa, Desulfotomaculum sp. 46_80
MNVEGLEFLEGFEKRMQIIAAVDSIVNRGNRKMDIEKLLEPGQLDNIIFAVLVFIMDRTLAEDEECTIEVITSFVARIIPDFGLSFPRETTRRITDYIIKDILQNGGEARYYPVMRYGKGMAPVRIRLIDDKLKDSDRGYVMNYQLTDQGYDLLLRTKEVEQEISFTIEELKLRELIRRKNYKKAIGQSGNLVLDDQAEKERYQPVHAKDKGKYLRRGHQGV

SEQ ID NO: 41538 - protein, 388 aa, Desulfotomaculum sp. 46_80
MVQLFLQPVIPCIKIQGRNIAAFFRKKKLPAYIMIEWKLDGAGGYLLTGIGIVPAEAPGMENEKNRIRYFTFTSKYTGANAFDIAHIALVDKNGGVLDVTPFREAREMLSEKERKDPFVFSFFPEDDGDRYVRRLAEFGIAQDKWKNVIAKINDGEGGLEELFQKYKNPGQLLNDWIIKTAETVRSETEGALQDIKVQEKIMQAARLVEEIRRKRSELSGIEEKLSASKEQYDTDGRIRSLEYSLKLLLEEILHHIIYHVLGFFPAYFSFFTSSSTSFSAAFLVKAMAPQPQYTQISCKNLRCFFQCLLKEIHQQGVFGLIKFSQVGLESVHIADNLEQQRKLVGCFQHAAHDGAGKNDQSCFRLDRIHHYIFNQSDTLFTDGLQLSD

SEQ ID NO: 41539 - protein, 107 aa, Desulfotomaculum sp. 46_80
MQDTGKNIIAGVPVDALLYGEGNKISKRGALEEYNAGMLGGKKDQAGRFFYFGDLDPEGIRLFFRAREANPNLDLKPFSGLYRLMLKLAEGVELLNECGGIGVPRRF

SEQ ID NO: 41540 - protein, 446 aa, Streptomyces reticuli
MDQVAESAALQVPGRAGAEYRDVGRWLVERLINTERHDRCFRHEIGNVTSDGFVVREFPFQILKDVPDEAGQAALTVTDAAITVLVHAVDVDIASEQIAAEAKLAALLKRARIGEAWQAARTAHVQSIRYAKELLDRMEEMKRNVRAIDWKADLDGPLKEAQEHVEERSRAETQLKAQVTQLLEVTEEEHKRQQLEALDALIEDCLQRHLMLIDMLLRVVPEFRRQQDRQIFVPPVVHARVHLRGQLLEPALELSIEDSERPLEAFVRRVLGPVRPRVMYLPDYFEALTRMSEQAEVELVAVGAPDDWEDTFDPPRFDDAQHAWVDRLLSAVPGEGVRLSRLLERARQWGEGRGPDDDTDHLLAMETAHRFRHVPVAELARGEEAVVVVDDGTELEDPVFGGSDFLLLPAVGEPVSDNVDAARDMQPPHSPELVPLTTNDDLEPSA

SEQ ID NO: 41541 - protein, 1485 aa, Streptomyces reticuli
MYELNRILLRNFGPLDARYEDVNLDFSGVGPLVETASLMPTPGHVTQRPSPASLVMLQNGGGKGVLLTGIICTTIPLRHHDPEELRSFVVSPAQPSHIVLEWADARTGKLLVTAQLLAPEGDGKLKRRFYSFHPGAALSADNLPFHRDGHWLPFDHYYTELCELQDTVEALELQIVDGQEKWEKHQAGLGLEPGLFDVQRKMNATESGAAEALTTSSAAAFVQWLLEKANDDDKYASLGSAFETYAGAHDQRERLLKEREFALAMEEICGRVAERYQEHTDQQREAGQAKGDLTALAAGLMRRHQILTAAAQATTGTVNTAYRAHEAAKQELDVANAHVAHVRWAVCGIELGESAEEQKRVAATAQQLEDRLAGWRSVPVAVRHAAAQERHGRMQRALSEAEETAAPYVQACDIAAAALRAGYAAAETQARAEAGNLEKEISESRSKIQQWRERSDSLHRDAGTAEGEQRQMRRQVQDFEEQLHTAREEGQVQPGESAADAASRMDGEADHHGQLCVEAKKAQDEARSRRTQAYQQLPALQERALDDRRAAEAAEAETDRLRVRAESVRRHPVTAELLELGLEDLQDGDALTWLADHYAALQNLIERKITALDGALRRTQLQHSADEELLAALDTSDGLLPATKEVRSLCADLCAQGIDAVPGWQWLRDNVPADDHQRLINDHPDLVGGIIVGGGPAALDQAQRHLERTRPLPTAAVAVGTGERMLTPVPHTSGRMVPEPTPALHDEQAAALERAEVEARLAASAQALGELDERISVTRDLGNKITYWLDEIGSVSVGARLEQLQELRTAAQASQASLEVARASAEQNDDAVTAAEEVHAQQETAHREAAEAAQAMRRLAEAEAKASQARDRITALEEEAQQRQRELEELGEKEETAHGDIARMTQAVEAAVQQAQSHAQARKKVTATPEAEQAQYAKGAPCEALTVLQHRYEQAVEDLRSVDIGEDQRQRAKEAEDALRACQDEWAQVPDQVKPFAQEYSRSPAAADDVQRDAVQRDLGQQIDDLHDQLRRLRDKESRLKERHHTLATAAQDISTQDVAQWTPHSLEEAYDLTARAEHAQAEAQQAERGAGEEYNAARRQQGQHTRELDAFGRVLARLETTIEQLGIQPAAAPYEGTADAAEPAVRQATARYDDARRKLTSTERRVEDSVSLLKDQAADVRFEQLDIPLRNQISALDRRHIPAAAREWTTALHRAAAALTTQLEGMSKAREALVSQLSGFVTELLQQVDQASRFSVFPDGPTPWSGQRFLTIRYRKPEPSVLTAHMRETIDNLAANPRTRKLKGTEVVMRCLHAVVPRFTAEVMKPNATQRIERVPVEKMGKIFSGGQELTGAILLYCALAALRTSPGPRSRTRHGGLLLLDNPIGRANAPYLVDIQTQMAAALGIQLIYTTGLSDEAVMARFPATIQLRNDAEARTGLSRIRLDDHVRNALIPTPRTTPDTHEPEANGYLSSARLYTKGEENR

SEQ ID NO: 41542 - protein, 354 aa, Streptomyces reticuli
MTAPTPEQLPRLSPGAVRLSAALHARAEKATVPRATVMEAFTAALPGTARGEGSRTALATLLEELSDAGTLRLPHGQRHKWDAGRPALPEQIRLPAITPRKPAPVTTRRSYRPELDWAHTAYLTSAHHEDLALINRWFRDTSNRPEFRVPLPLRERSYEIFQDEKRLDGLLSGALFAPGRLTLEQLGTFREPPPLAYRLLGDGDTLLVAENSDTYATLRDLLTPNPGRTRAVAFGSGRAFEASIETVKEIHGIQRIVYYGDLDAEGLSIPARASVTATQCGLPSVEPASALYDLLLSHASTPGQPVSDERAHTLTAWLPPRLRQRTHEVLLSGRRIAQEATNRNQLAGDAAWCP

SEQ ID NO: 41543 - protein, 500 aa, Streptomyces longwoodensis
MKALAVVRPLLALDSSKAKAERGWEGYRLAELALAAIDVVTLRTDMRTAVRQETVVDHVSEFAALQLPGRPAEEYRAVARWVTERLINTEERDRAFRHAIGSVTDEGFQTRMTSFQILKEVPDHVGQAALIATDAAITVLVHAIDVDIASEQIAAEAKLEALLKRARIGEAWQIAHTARLQSIRYAKDIHGRIEAMKRNVRAVDWDTEVKETVDDALEHVRSRSATEQQLKERVDQLLEVTDDAHKRRQLEGLGTLIVECMQRHSVLIDMLLKVGPEYRRQQDRQVFVAPTLHARVHMHEQLLQPVMEFSLDACLGPLEAFTRAVLGPQQPRVMYLPDYFEALARVSELAAGDLVPVAHDDDPGDGEHTAVFSNAQHEAVDVLLDTATDQGVRLSALLGSTRLPGPGIGPESGTDALLAMRVQQLFRQVPVRQLAVGEPAVVAVDDGTELVDERFGGSDFLLIRTQSQPSVPPRSSDAPTADDNRLSSVTPIPDRDQESA

SEQ ID NO: 41544 - protein, 1486 aa, Streptomyces longwoodensis
MYELNRILLRNFGPVDARYEDVTLDFSGAGPEVETASLIPAAGHVTHRPAPANLIMLQNGGGKGVLLTGITCTTIPHRHQDVETLRNFTVSLAQPSHVVLEWADARTGRLLITAQILAPDREGKLHRRFYSFHPAAALDADRLPFHRDGHWLPFEDYCTELRDVQRRVDALELRIEDGQERWEKHQRTLGLQPDLFDVQRRMNAKESDAAAAFTTTTSDAFVDWLLRKATDDDQYAELGTAFHSYAHAHDQRAAWDKERQFALTMQRACGEVAILHQTRQKTAHAAESAQQRLVHLTATVQLREQQLSDVLTVHADAITDTYRAHEEAKRAAERAEQRVHHVRHHASALELATVRAKQRGAEQAKKETEAEKSGWETVPVALRHAHAVDDHTRAQEALSQAERTAAPYLRAVHQAAADLRTGYASAEAAAQDKVRRLAEANQQTETDIEQWQHRREQLLEDTGAAQADLRTLREQIDSFTTTLGRARHDRLVEPDELAGDAAARAEAHTRHLDQLMDEAKQARQTARTGRDHAHRHLADTQRQALSDRAAADAALAQTDRLRKQATAIQSLPLCADLLEATPDELRASDALEWLHEHATVLGETAGRRIANLETTLTGTRLGLREDQDLLDVLDTSGGLHPASAAVRRLCEDLVTHGISAWPGWRWMHDNVPADAHPQVIRAHPDLVGGIIVGGADGLDAARRHMEQTRPLPATAVTVGTGERLLRPGSCDDDRFVIEPSPTLHDEDAAERERGEVTARITAATRQLQDLNARLAEARELERHLANWLEACAQMPVPDRLAQLNDLQTTAAASETAAQEARNAAEGHDAALHEAEQAYEDLVDRAGQAQRALHVLRQLADAETEAGQARDRISALTAQCQEWRTEADDLRAACKRAEAELLRRAQAIEAARQEADSHAESRRAVPAPPGGDAAIEPDTPHEPLPVLKHRYEQALDELRAVQVGEDQQQRAARAEEHLLTCQREWNQVPGPIQALAQKFSADPRATDEVQRHAILRDVAGQLTDLDERLNALRDKESELKIRTDHLKSAAAAAPLTGEEAAAWTPATLEDATALSARAGQELEEARTTERAASERYNGARRSQANSSRDLAAFRSVLPRLESAAHGLDLPAAAEPYPGTAEAAETEARQAAEEYRTCHQAARDADRALETGVSRLKEEAADVRFEGLDIPLRTQISALGGAKIPALAENWTQALGSRIAALTSDLDAMAKTRDALASQLGAHVTDLLHRLDQASRFSAFPDGDAPWAGQKFLTIRYKKPDQQTLAASMRETVDALAQNPRTRKLKGIDVVLRCLKEAVPRGFTAEVMKPNAAQRITRVPVEKMGTTFSGGQELTGAILLYCALAALRTSPGPRSRTRNGGLLLLDNPIGRANATYLVDLQFEMAAALGIQLIYTTGLSDEEVTARFPMCIPLRNDAEARAGLSLIRLDERIRHALVPSPRIVPDDSAAVPSGYLHSARLYTKETPAQ

SEQ ID NO: 41545 - protein, 322 aa, Streptomyces longwoodensis
MSRATLVEAFTAALPGLASGEHARTALATLLHELADHRLLNLPTSRAHWDAGRPRLPEQVRLPATTQATPRAPREPVSWRPELDWAYTARLTAAQTEDLLACNRWFRDSSNAPERHTPIPLRERSYEIFRDEKRLDALISGALFAPGRLTLDQLATYRQPPPLAHHQVGDGDTLLVVENSDTYATLHDLLSKQPGRTRFVAFGAGRSFEASVSRLTELSGIHRILYYGDLDADGLAIPARASLTALQHGLPPIAPATDLYRLLLGHTPTPSALVADDHAETLTAWLPPPLSTQAHDLLTAGQRLAQEATNRNQLSVDSSWRT

SEQ ID NO: 41546 - protein, 514 aa, Desulfosporosinus sp. BRH_c37
MGEELSGFAGRIQNVALFQPLFDLQRSRKYPEYDALAIGFGILLFTLENMLIGRDHCDHQDLASYVRLMIAESYNVQLSENESSEMAYYFLDALRNNGRPFDLEFKDLETGGDVRCKFALIEVANYEIHGKMRFKLTDAGLDLLFKTKEIYKELRISISQLYLRQQIEKGVFHEALRTIDDLYVQVQDVHGKIERIRKLVLRNVSDVSVGNYIALMEEVTEQLRREKEVFSSLQTLLRETADTYRFRELNVKERESFNQLITVSTRLDLVVNEHNRLFTSKLSLGSLLEEAMLDSLANTFRVKVNFEHEFVDQVITENTPLDSLRQVLNPLFKCKRTPHFNLLRVLEPQSLKSEDTEQQEMFSGPSEEDFVRAAERERLMKQQRDARTLNYLAIILGALESQSEQSLQGILATLPTETYVQVISEVEFYAFLVQLHQMGEIPLVVDEEMRSKIIDSESSNLPFLLLNYLDEHPEASRYRALKVQAGDEELIFENLSRVTDYRFSVHSEGKGHDV

SEQ ID NO: 41547 - protein, 244 aa, Desulfosporosinus sp. BRH_c37
MFESYKADTVETALKIFLELVRLGQLHQEDYPEMVQAYKTDQEVQGLFTNIIEPLADVKVLESLYVLYLSPNVDNRCFGYSNEELRDKMKLSTNRELYLAYFVILSLLAMFYGEDSLSEVSRSYVTVSDLEQFVSNRLQDLKTNPELPEVEKELEINLLSSVELWQDMPEYDPDLKSLRRSTKNRISFILKVAKFLEAEGLAHVEQDRELYATEKTEQMVRKYYSDRGRQEKLLTLLCARKETP

SEQ ID NO: 41548 - protein, 1466 aa, Desulfosporosinus sp. BRH_c37
MPQIWRARLTNIEYDSGKKIYADELFRFNSQNTLINLANGGGKTLLIQLLLQVVLPNEMLNKRSLADLLSSKKYTGHILVEWKLDNLEPTYLTTGFCFTRGNDEGDRLKYFLYTLHYREPNELDIKNLPLVQAKTPLDYTELLTLLRGARNQDARVTLFERDDKRRAYLFHLASYNIFEKEWKNIKVTNNVEGGVGEFFAVAKTAKQLLETILIPAVEETIFAGEQDARRLSQAFAQVNQNLIRLPELQKNLHDFQVLRSEGERVLEAVRSFEESQGKLIREKSRLRKLYNSAESDMRQVKQDLAKVEEQLDIWKTQRIELNYQAESIPYVRLQQQKELAEHGKLEAEEMLKSATEQYLNADFFWRQSRGYNDYLERAELLGANVALKKRRELASLGQEEQLTELDIARVSFRTILERFCIDLERDYTQISEANGTMDKRLSEVSIELTTLRQTDKGLAIRVAAIETALQNYQTKWDDLYQVYQNMAWLEDPALALRELTVILMDLREKIKALEERRLVLVEEQKIRVQRIPNLAVQLSENQTTLNTYLLDKQQAEAALLELQDYLGRYSIRCVAPYAEQNRIKAEIQAKRMEFQDKIRFEGVRIEQLKDQLSLIRESGAYVPNREILKVQRLLDELQIPAQLGSKWLEEQGVREHDRLAYLRHNPLLPYALILAEQDFKRLQNSKSFQTGVLSCPVPLLVRRAELVPSAELPPAKLMSVSGGPAYLLWHKGYDYALSPESLESVVTELETELERATRNLQSLVASEEQLRKLGELEHSFFSRYPSDYLVTLEKRLSEVQKQRELDLGEKERLEQEQSKAEAELEEIRTLSEARKDEEHLLRKDLERFTEWQKEVLEYTRNCAELKGVQEEQAKNTLDLSQRVSEQEQLNQNRIAGASKLKEVEGLRTSRRNELREVPLPNRQDIPPREVSYEEAKGCWQESENAVAKVHSELKYCEDSIKQNEREIVGLEKRIERDLKLTLAEVEDAKYKTSEEELDRLEADSQVWKKEIESNQRAVHSKDKDVVGLKGQLMEKEAQIKKTYGKKPEIAFRDLDLALAKLEKEMLSLQRQEQEWKLIQKDTVEQERILVDGMKSLATSLKLFEVLPSEEALHQEEWLTIRAKLASTIDKSTQELRELQKLVQQLREVGEKSFRGYAEILRRQGNSVVDRFVSHLLADEERRFQFEVMEQAFAKSFEMIAKFEEKASFELIEAERNKQELVELSINQAQRIAQEMQRIDNYVKVDYAGKRVNAVQIRLKEWETDKAHALMNAYIDDLIKELKRLAEQGEPEDKQEKFIDKKMSSRQLLNVLTNLEQATIRVLKPEQHPTNPYFDPWDDVQKWSGGERYAGYMAMFMAILSYTRSKLSSLHNPYKVMLADNPFGAASSPHVLNLIFQLAESNNIQMICLTALTEDTIFTYFPAVYSLRLRPFMGKDYMTSKIERGFYQIDPLEEELRKKRQIEFEWE

SEQ ID NO: 41549 - protein, 358 aa, Desulfosporosinus sp. BRH_c37
MLQEIEKLINQSKLKSLSSSKLEDQIERLLGEDYARLGGYANFESILKQLCTRGVLEPIKASGTNGRNPLLYNRYRKVMLGMEQELRLNLLNLHSLIRSEAYIKSPQAYTEDQRYILALDAFLKDPQQRESLGESIAVNERSFQIFNDEKFLFSDRGRIFLQRIGRTLTDLSCYITTEPFFYIDYRSKLVVENDPVSSYTALIVENKDTFYSIKRAWQAGKRSIGGVTFDLLIYGEGRKIVGSFAFAQEIPDLVPKTLRVYYFGDLDPEGIDIFGSLVAAFPLAAIEPFVYCYQALIHRYGRNAPLRREKDQKLRALHEETFLTYFTSELSQEIRELIHSKKYIPQEGLSYAFFVHDN

SEQ ID NO: 41550 - protein, 345 aa, Bacillus coahuilensis p1.1.43
MILMSREFEEEMDMSVEQLYTLQLIRAGRVNQAVGVLDALTLRIRRLLAKEKDYRYELERNPKVLLTNREVRKKSKEDVRNQSEEAQELYKKMLSTLKMIERGNELSRLEHIELENKIFSTSKLHLSLSDEVYKNIALELDIRKNNPLSLVYRKTANFHQEIWEKHIYQDGIPTEEIYDLILGPLFSPKQDVILPMEWIWQEQELVNEQELIETDFKEEKEEIWNKYVHEVNWAVVVTCWYPIFKELANVGEYHAKDISSFDHWNRDAIDFWPLFAQSELTVGEIQENRKYNDERFTLLQTMLKIDDDISFFEGKIIYATYEPGEEIVTEDIQMSSYVLRYKRGL

SEQ ID NO: 41551 - protein, 250 aa, Bacillus coahuilensis p1.1.43
MAAEKIKIATDIYAKLMKHKMVDRNESVLRSYFDDTQVHDLVQHIARSFGTIILEGHEKLQLISDGKESIFATSFTHLKEKYSDIENKKEFYLLCNILMIYLSEIDGDLTVRSRYELRGLSLFRLEELVTNVFSYWKEKIASEEDYEKKWSMNIREQVEFWLSKDLKDDSNKLTPSMKNKFSIMKKALNLFENEHLLNVILEGDEHIVYAYPELFERIEGLFHNYERYTMLRDVIVEAKRRKEVEVNGSN

SEQ ID NO: 41552 - protein, 1498 aa, Bacillus coahuilensis p1.1.43
MAAINKYRVVGTRYKQQTRVYKDEVFHFSSDEGPQNAIITAKNTFGKGVLLQLLFQPIIPKTPWSRGKNKVNHFFYANKGQFKPYTFYSCIDFHLDLDRHLLVGVAMTSQLNEKNDCEPLYTLFVREYGYSLYDPFTIDNIPLYNKEKGAPKPYGEFLEYLRENKKEFLTFNESSKSKFYSTLDSYGIIKKDWEQLIDINQYEGGVAHYFDDKNATTNHGLFSKMIIPAIEARLNEKGEESDLITLFKNIASITKNLPELKKNAYAYAEIKNHNEEVYLSLSELIKEREKFDIHIEKGRSILTALSNEISSLEKETNDHKEQLVELNRVKQELDWKRRNLQYVIKHYELNDANASLLSFGQKQIDKEQQKVTLTNQKDEVELQLQLKKWDEVEQELQNIRKKINAIEQSQDYRESKEQQIQLEVEIESEWNALLTEINRISTESEAYKNHILKLRESINEQVKSYNKQLLNYEVDEGIIKKSIQKFEAELEMQKEIYGEHFFYDMDKIHSQKTKELKNSDNKHLKLTKDQNEKVEELASLDRRQTTLEAEVKSDEKEVNRVKQQWERQKEKEIKIMNKVWNVLRTNPVEVEDFRKWLIGQAPVLKNRKSEWDLTLNQLNIQLYEVAFEVKQNDKPYLIPSEEVYKVKSLLVEKGVPVLYGDEYIKQQEQAKREELNKKHPLLKYGLLVPNQNRAYVDEIKKLDKEFFHIPIPIFWVNQLDKPSDMQFTILDQKAAELSIHEDKLSERKQELYSKSDEVKSEINNTKAYIDQLTTVVAELESFDHSNTSVELEKQYHTLQEQLVKKIKEKSDIKKQVEIVNKELEDISAEIVTISNMIESLKEEIENLKTWIENKNIYESEKQKQFGLSLKIQSMNSKIGTKQNELSTLNDDFEDWKELYRDWRGSKNSLVKKVNEVLPKVFVEDVKTEALQETQPNFTMDVDKLKEYMYKWKAVQQEMESRNTELVKLGVNLEHFQKAVHDEEKELYRLNNEWKKFLVPQEPLPVLKKRLEQKKESVNEIKNALLLLTSDIKHANSQKERIEKELNEMKASIFRDCGKQPEIWKQDDFSKMKIDIQHSINENKNDINDTNAILKDLENKVSNFSSIFQKLNATLNILNISSGLNPTPYVQEVVKKDPVKTGDEWIKTFMISQKNVTTKKSAVQSIHRKKKEVFERSEWVLEIKDVALKVYSDMDFEELQEVKASIEGLDLLASNEIAEAEEERNTAEEAKKEWVEHACKYALQIVEHLRKMIKAMRITNRSGLTFPLVKLKRDNMLPRETEQIKGAIDDLFDKVITEIFADFQDVNDIPQKVLKDKISIKNIILAAFNYQYPILWLYRLHEENSFLYEPPKEEFYTEWETINESSKTDPSGSGGQLFSARTLILMMLTSFKRTNEDNSNWKLLITDNPFSVAVSDHIVDPILAIAEELKFQWIVVTPPELVKVELLQKFDMYYQLSAKPITSGSDQVVSEVQYGYRNYKKSNSILKEDKVLFSVEQDN

SEQ ID NO: 41553 - protein, 502 aa, Paenibacillus sp. DMB5
MNWSDFGERNKRLNPLWSLGAGMNLGELQPYKEMIALSVLLQVYYLELESNEQRSKEDIIGLAWSSLERFRITGLGTAESVERLVDGLLWSGNGGDFEAVYYDDHTRQMTMQKYKYFTVDEDATRSSWEESGTTVYRLSEYAMELIFMSHEIIEEFQISIKLLEIQMHIKHGRVTRALQDVNELISRVRKMTQQQQEYRNALRRNPKHMFSEYGVMRHQRLEEIHQQFDEERRHFDNIHRSLARLANDEKDLIDFNELRLLSERVELSRKVHDELAEVVLGIFEAETNLRLNFPELFWGASGFNFRTNVWEEWVKSDGLPAGDSLELLVGGLFAPQQDFIYPLAWAWEEQETGFMPEEWLDEPEDTGEEPEVSYIPKTIPWAEVARLWLPVFTGLAADGRFTFAAEAFTEEEKLGWANNQNAVDLWAQFFHAEVKVQESGAESPAGTDECQRLIQYLLDSHPELEVMRGKVLRTKITGTGQQPAVKWPGLEMSPYTIIIEER

SEQ ID NO: 41554 - protein, 252 aa, Paenibacillus sp. DMB5
MSYTLEQLQQASRLFFDLLRRKVISLDDPAAAECLQDNGAYDALQYLAKEGGCRIMNSGHRLHLLVNPLGSGFATNFTQLRNKYSRIERKTHLHIINVIILVFLAEMDQDEQHFKPGQDSMSYIQLADQVSAVLKAWYEMDEEGKFSKQWRLDIQAMYKVWASLYMQTKSQEDADTLSRGSGSRIGLIHEGMKLLEDEHLVFISESEKRIFPREELYERMRYLYHDVDRYKELKALIGSTLAEKEGDAHAAH

SEQ ID NO: 41555 - protein, 1493 aa, Paenibacillus sp. DMB5
MPRIERIRIAGLKYEKMLKKYDDMVLDLCNEEGPANTLITLMNGGGKGVLLQSIFQLLIPKTSWGKDNENQVEAFFHNHKKQLKPYTFHVAIEWKLDSGDRNEYITTGIAMTANSSADQLEIKVDYLLYTLTEYDEHADLTLSTLPLYNADEGGPASFETIQQFVRERRSEIIYYGSSQSELKKYYAFLAGRDIHIGEWRNMKKINGEEGGIKGYFQKNDAFTNHNLFEKLIIPEIGSSLNDGAREEDGSLQRMFTDTATVAQRLPMLEQREKAFAEFTALAAPLHELVKQGAEAERSFQETELLGRQIYTVIYDELRSAEDNRGRQADELVRLQSEGRQLRFEADNLSYLRSKEEHDTKQEEFKAIIDNQGRARSRLDESKEQEKRLEVAQYLAKRQVHKREIGQWQKEIEAIEGSLEMKERQEVIQNAKEELRLQWDQVFRLWQQQLCGFASRQQALSAEEAGLRKERESYVLELGGLESRINELTGYIRQYSEEAGVVASRHGQEAASAPGPALQRTLMATTAIADSIAERSGQRLLAEARKLSLRTNLAELQAKLAAEQRQTDGLHNQLEAQMGRESQLWSQLVVLLELYEEHQVLGATALFEAKALIQERFIRRLEDTEQQTKRLRREFYHQQLDVELQQEAYWLPNADVLTVKDRLDALKISSMPGSSYLNDLSYLHREEELGRHPLLPYGLIVTQREADKIPPDALRNVILKSAVPVFIREEMGVAAAEPFLLLANQGPQMVLQPEQFQDWKRGIASRLKEREVELQDAENYLSKLKTARQEFERLFQGEHTVSLKAKLRELELVVNELDTAVAGLKTEISENEELLASIQKELNEYELEKTGLEQRAQALQQWEERTRKQEQDYKDKQRAVERRQTLNKEISVKDQGLVQLKAEMDSTVEQREQWIGDTRYSLFPRLQSWFPELVFPNDRKAETDWAEAELNPDAQNKMLQLLSTVESLQQSLTHNELEIRTRQGNIKRAGEQLSELEAAVYQVDRDWQQAPEPQDSPEAIAAARARQKNETVYLEEDYQSVRESYIRCQTILENLQKELRKTEKTIKEKHERPVEIWTDTLSVKEQEITEDTRENERQLNLCKQRLSAVDQWLQTLGNQRQILDTHVEGRVQLRDVPEEVQLQVRESCERTVADWLLQSKESRAQRTELTRKVKEEKNDLSAKLAKCGWNSELETKIQERLNTVHWEDFYIAGQVLDSMLQSSRDQIESIRSDKESMELSRKLWVGRAAKRVVQITDILKRMERRMIIHNENGHAFPLVRLNYKHITVPKTTDDIEPLVSDYFNRCISSLLEKYPKIEQVPAAAVKELINDGKLVYAAMQNRFPVLQVYKPVTENYFLYAAPEEFHYSDWEVINRGALDEAVGSGGQRQSVQLLVAMMIMTHKRVNRENKGWTVFLYDNPFGEMVSNNVLDPVFEISKALRFQWLIVTPPELVKNDVSVRFGVYWQLYFGGDKGEMLESTLVKGGRKMIPASLF

SEQ ID NO: 41556 - protein, 543 aa, Clostridium sp. C105KSO13
MQYEFLKHFPKRMKNVGLYAVLIQNSVQKTTWKQYGFSTSDEQLNLIFAVMLYIMEQSLKEENCTMDDIGAYIDTINVQYWHKDMNYEDCRQLGDFIVNVILSNDGRVMHFDGFNFEQDAYQIMHISYVANKIVYVEQEVKRTSYYLTDDGYNLLLGTLEIENNMKLTIHEMIFQMHLEKQSYDKAVDEIKNVFNLLRIQLQKIQEAMGKIRRNALDYSVRDYEEVLTENLETIGDTQQKFQNYREMVRSRARELEEENINVKRLSEKDEEKLNHLRIIESYLNRAIDEHQKILNNHFDLKALYTKELENLTQMSLIRRFPLRTKLYDKILEHPKALEHLDYFLRPLFNQDAEKVYNLNKAFQYQKPMRKSEEEDTQEELDFDAEAWQAQQDQKLKEKLKRYENSLGYLLKSACVNGEISLEEIGRQVEGIPGDKDRLIPNVEVFKEVMVELIKNREIDIEALKKERSEYIQDTPGEFQLNEMLLKLIEDDPRKEITLSDGNAVRRIETYRMPDGGTVTFKNVLNENGDRKTIRCSNVLIRVL

SEQ ID NO: 41557 - protein, 238 aa, Clostridium sp. C105KSO13
MAYEIEEIRTSQEIFYYLLEHHELREEEEHHLYKAYTEQEAIQNLVKSQGEAAQSDIERYGNVVYLIPHEENNTLGFSKAQLKAALCKSNATDKDYYLSQFAILTLLVEFFDGQGGSSKAREYIRVGELQNCISSRLKEGAENLGEEGEEREEIAFSNMLEAYEALRSDERGSRARTTKEGFLHHILIFLQKQGLIEYVEQDEMIKTTKKLDNFMDWNLLNQNNYQRIMQVLGVKDNE

SEQ ID NO: 41558 - protein, 1468 aa, Clostridium sp. C105KSO13
MSKINGVRLININYNNNAIRISDETFHLNGESTLLSLRNGGGKSVLVQMITAPFVHKRYRDAKDRPFESYFTTNKPSFILVEWVLDQGAGYVLTGMMVRRSQDAEDTRGDNLEMVNIISEYQEPCLQDIHHLPVVEKGKKEIILKNFAACRQMFESYKKDRSMNFFYYDMNNGAQSRQYFEKLKEYQINDKEWETIIKKVNLKESGLSDLFADCKDERGLVEKWFLDAVESKLNKDKNRMKEFQKIVEKYVGQYKDNQSKIKRRDTIRAFKEEALRIQEKAELYREADRKRLGQENRIAYFIRELNGLRSDTEAAYQDVREQLQEVSRKVSRVEYEKLSSEVHHLEEEQSFHVSNRDMIEMEQEELEREAAGIERYLHLLLCAKQQELTKEEESELLLVRQKLEVSRKKDEDLEPERNQLGYRLKSYYGIALEKNKELRQEKKTHHRQILDHISTEKEKIFKLEEDIRQKMAAEGALQSKVESYGSQEEHYNTLYKEDLVRNILGTYEPGTLEIRREAYEKALEEENREKLRKKRQFESSQNQQRGLERTLADLGREQIEKKLEKEQEEKLQSKYNRELEKRRVIMTYLELDEKSLYDTEKIIRTSERKLTEIASLRRNLEKEEDVLQKEYQSLTQGKVLDLPKEFETELQNMGIHVIYGMEWLQKNGYTEKENQELVRSHPFLPYALILSEQEMKKLTQSPGAVYTSFPIPIIVRENLEQKQNKDAAGILHFPDVSFYVLFNENLLNEEKLRSLVLEKEQQIQRKKEAIAIRQSEYEEYFERRETIKNQQVSLDKFIANEEAIKELGMQLVKLDEDVRKVSSDLAELKAELEHLEKAIQKAEQDIFHQNRRMEDYRQLCEAYKSYERNRESLEKCRRDIKRQQENQKLAQVQLERQQERQRELEAEQDQLEREGSALGERCQKYQRYEETEIQEDLTQQDVAAAEARYGAITSSMSQELQDLEDQEQRAVRRFEEAQDELEHLREKYHLKPGDWEDIHYERKEETHREVLLEDRKKKLEVKKTLWNEEDKQIAVLSQQRDDRLKQIKSECGEEEPLSRAEIQDQDFDARKNQLRYQKTEIQKQEDCLKSHLQSYDENLTALAEYNELPPGEEVVWEQNFAEMDSRNLRNFKGILIRDYNQDIRERQETKERLIQVLNRIVRMERFQEEFYKKPLESMLELTGDACQVLRQLSTTLQSYDSLMEKLEVDISLVEKEQKKIVELMEEYIREVHQNLGKIDHNSTITIRERPVKMLKIQLPEWEENENLYQMRLQDFIEEVTKKGIELFEKNENAQEYFGTHITTRNLYDAVIGVGTIQIRLYKIEEQREFPITWAEVARNSGGEGFLSAFVILSSLLYYMRKDDTDIFADRNEGKVLLMDNPFAQTNASHLLKPLMDMADKTNTQLICLTGLGGESIYNRFDNIYILNLMAASLRNGMQYLRADHLRGDDPETMVVSQIEVMEQQELVF

SEQ ID NO: 41559 - protein, 332 aa, Clostridium sp. C105KSO13
MKRISLEKLLLHQQNLSYNEQYSYIMELISTGKIKPLKAAGTNGKKPALFRGYWVLEKKKDYGELEDELKYRLLPVISVDYYLSHPDVYERDRPWVLMLNDYLKNWKEKLKVQESANERSFEIWRREKFLTREQGRHILNRCGLDLQVLNIYGTTEPLAYYSHTRSTPQNLLILENKDTFYSMRRHLLEGSNSILDTPIGTLIYGAGKGILRSFRDFDLCVEPYMKENQNKIYYFGDLDYEGIGIYESLAEMFHDRWEIIPFVSAYRAMLEKSAAAKKEDSMKQLPDTKERQNRNIQNKFFPYFSTEEVEKMKKILEQGKYIPQEILNITDF

SEQ ID NO: 41560 - protein, 488 aa, Enterobacter aerogenes; identical to SEQ ID NO: 41374

SEQ ID NO: 41561 - protein, 1478 aa, Enterobacter aerogenes; identical to SEQ ID NO: 41375

SEQ ID NO: 41562 - protein, 347 aa, Enterobacter aerogenes; identical to SEQ ID NO: 41376

SEQ ID NO: 41563 - protein, 488 aa, Enterobacter aerogenes; identical to SEQ ID NO: 41374

SEQ ID NO: 41564 - protein, 1478 aa, Enterobacter aerogenes; identical to SEQ ID NO: 41375

SEQ ID NO: 41565 - protein, 347 aa, Enterobacter aerogenes; identical to SEQ ID NO: 41376

SEQ ID NO: 41566 - protein, 488 aa, Escherichia coli; identical to SEQ ID NO: 40487

SEQ ID NO: 41567 - protein, 1478 aa, Escherichia coli; identical to SEQ ID NO: 40488

SEQ ID NO: 41568 - protein, 347 aa, Escherichia coli; identical to SEQ ID NO: 40773

SEQ ID NO: 41569 - protein, 488 aa, Escherichia coli; identical to SEQ ID NO: 40487

SEQ ID NO: 41570 - protein, 1478 aa, Escherichia coli; identical to SEQ ID NO: 40488

SEQ ID NO: 41571 - protein, 347 aa, Escherichia coli; identical to SEQ ID NO: 40773

SEQ ID NO: 41572 - protein, 488 aa, Escherichia coli; identical to SEQ ID NO: 40487

SEQ ID NO: 41573 - protein, 1478 aa, Escherichia coli; identical to SEQ ID NO: 40488

SEQ ID NO: 41574 - protein, 347 aa, Escherichia coli; identical to SEQ ID NO: 40773

SEQ ID NO: 41575 - protein, 471 aa, Burkholderia ubonensis
MLDLSRQQRNLLLLRPVFQLERYKMMLGDESGLDRSLFQGVDTHYLALSALDQMMEATTVSGGSTSTEILTYLAEVAIRMKPTLSAPQARRVAEVVLDALDNKANNHREFSFEYFDAPSGSTNSIRFRLVRFEPDAEDVYRYRPTAEGYLVYLGMLDLSPEDSQELMEKMLDLLVQRGRFDAALEIARRARKLSIEYRQLIRDRLYQAYRAPGSVNWSRDMAKRLDEARTHVCQRQAEDARMEEAVGEALLGADEPKTRESLVQLKETIRSAGLIRLQLVTDINVAPERFIEAQRAVFRARRPTGLPDLEPQLLPQLVNLPTQILSAEADVFISALYPPVWPRVYDLNSVFALLLEQRGEDAEVATDPGSIEKLEPLPDQFSKELVQRANEWLADKFSTGQRLRIDQLLDAAEDEGLDRTTRRCLVLILFRSFARSESEFKNVSVELTGDTFHLDIAQGSALEFVPQGESE

SEQ ID NO: 41576 - protein, 1465 aa, Burkholderia ubonensis
MQKISRIHLGNCGYRTAWYDGVTFELTDPDSGQPTDTLINLENGGGKTTLIGLVFSCFETAQERFLKHIQSKHNTFSQYFTHDGAPGFIIVEWLMPSRMAGGKPYRLVTGQAVAVRSHTEPPEVDRMFFSFEEHADLGLVDMPAPGLAQPTPSSMQEFSRWLHAQQKKYPGDVFISHNRQAEWQRHLKDERLIDLDMLRMQVNFSAQEGGFDTGFLDFKTEGEFLRKFLNLTSDTTKADEARKLVVAVCEKHRRKPQFQKRRDELTKFRASLNAFSESAHLYLKTLAAQRSMLIRGAQIVQALQARAVSLRLDHDREVEFEQTQRRLASAALADSKSYTKEQATVTWAWHQKRSAQAKARKEAADGQVKNLERDERLIRAARLQKEIVGVDEELKELNALAEAERANLKPTKDHVEIQGALLRRALFNEEQRLKVALQVLNERATVREGERTALRKQRAQAEADELRQVGERSKLQAAEESYTRRRQALEVDGTFLGPDETTAEALERLVTKAATAVSERDLHRASQQRCAKEAREHRQAAAAENVRAAEFAAKARVLGEFIARGEAELERLAQLPALLNAVESDRVDPLSAALPARLREVVSESARQVSVGDVRLAELRATKQAIDETGVAGYSIDVALVVETLLQAGVRSAKAYNEYISRTLPDASKARALVASDPARFLGVSVASTELDKARAVSWEARRPTRPVVVTATTLEPAAQLAERLVVPAEDDSAFNVEAAAKLGSNLEIRVSDENERRSAYRERHDQTLKAIHELDTYAKEFGDGKLGRARADKVALEEDAAAATARAESLESLSLELDEKAQGLELQAQAADSRRQAALLSSAAVCTFQNEHEAGHAERVRRLADVAQGITAAQESKSTADEGLERLQGEHDRDHGLRVSTDHELKVAGEERAGITHYDKDYPAHEQLLQNPRPVETLRRIYSDAEAAYLAEERERLGLLAHKLEDARKRRENKAKEFTREYKGVQMADLAPFLDANHEDALANVETALDAAKPEQVNAASNLQVVNGESRKWLDSNKTSLGPAVPAHEALDLDALAALMAEAENRVNAALERMRAANDAANQAADRANRKRTAAEADGKVEALLRSSMGFEDKPDPVLIAAEIGAQVGMALEVPDPDSLVLEADASNQVNALLKDYTGKNQGVSELQTKARAAFDLVKVAASEQSFREVDPDVAQQMVANEFGAACTDAKRLLEHLDDRIATTEATLRSMQADFDACVEEVLAVVRSAITTLNRATSKDKSVPVGAPYVGGKQVLKMRANFGSVPVETRRQTLSTYLDTLVDTNVFPPRGTDLIADAVARVYGRPLGLQVLKMSIEETEQYVPVERVSNSGGEGVVMAMFLYLVINQLRAENHAQVYRIAGGPLILDNPFAKATSPAMWRAQRLLAEAMNVQLIFATALQDFNALGEFQRFIRLRRAGQNSKTRRWHLEFANLKLNNVPEELA

SEQ ID NO: 41577 - protein, 344 aa, Burkholderia ubonensis
MSEFLEALLSSPRKRVPLDELRQHYFSLYPDVQNSPDRGVLLLRALKELEADGAISLPATGSWEQAGSPALPLWVTLKSSPRSKVSVNHADVIWAPELGFWPELRPSQLSALRPINDFLLRRRGAFSSVPIKERSLEIFGDEKRLDNMCAGDFLFGGRLPLSVIGCFRVPQPLPYRKIDAPGKSVLVVENHNTYWSFAEWNEATGQYTAVIYGGGENFRLTGRALRQAMQETGASSAEYFGDLDPKGLSIPLDFNRSVEPGYPTVSAALPLYRWLLANGVRREKPECATYAAGLAAAWLGAELAAKLEAVWSAGTWLPQEALGTEQLHAGAIGIMAAPTSGLGG

SEQ ID NO: 41578 - protein, 471 aa, Burkholderia ubonensis; identical to SEQ ID NO: 41575

SEQ ID NO: 41579 - protein, 1465 aa, Burkholderia ubonensis
MQKISRIHLGNCGYRTAWYDGVTFELTDPDSGQPTDTLINLENGGGKTTLIGLVFSCFETAQERFLKHIQSKHNTFSQYFTHDGAPGFIIVEWLMPSRMAGGKPYRLVTGQAVAVRSHTEPPEVDRMFFSFEEHADLGLVDMPAPGLAQPTPSSMQEFSRWLHAQQKKYPGDVFISHNRQAEWQRHLKDERLIDLDMLRMQVNFSAQEGGFDTGFLDFKTEGEFLRKFLNLTSDTTKADEARKLVVAVCEKHRRKPQFQKRRDELTKFRASLNAFSESAHLYLKTLAAQRSMLIRGAQIVQALQARAVSLRLDHDREVEFEQTQRRLASAALADSKSYTKEQATVTWAWHQKRSAQAKARKEAADGQVKNLERDERLIRAARLQKEIVGVDEELKELNALAEAERANLKPTKDHVEIQGALLRRALFNEEQRLKVALQVLNERATVREGERTALRKQRAQAEADELRQVGERSKLQAAEESYTRRRQALEVDGTFLGPDETTAEALERLVTKAATAVSERDLHRASQQRCAKEAREHRQAAAAENVRAAEFAAKARVLGEFIARGEAELERLAQLPALLNAVESDRVDPLSAALPARLREVVSESARQVSVGDVRLAELRATKQAIDETGVAGYSIDVALVVETLLQAGVRSAKAYNEYISRTLPDASKARALVASDPARFLGVSVASTELDKARAVSWEARRPTRPVVVTATTLEPAAQLAERLVVPAEDDSAFNVEAAAKLGSNLEIRVSDENERRSAYRERHDQTLKAIHELDTYAKEFGDGKLGRARADKVALEEDAAAATARAESLELLSLELDEKAQGLELQAQAADSRRQAALLSSAAVCTFQNEHEAGHAERVRRLADVAQGITAAQESKSTADEGLERLQGEHDRDHGLRVSTDHELKVAGEERAGITHYDKDYPAHEQLLQNPRPVETLRRIYSDAEAAYLAEERERLGLLAHKLEDARKRRENKAKEFTREYKGVQMADLAPFLDANHEDALANVETALDAAKPEQVNAASNLQVVNGESRKWLDSNKTSLGPAVPAHEALDLDALAALMAEAENRVNAALERMRAANDAANQAADRANRKRTAAEADGKVEALLRSSMGFEDKPDPVLIAAEIGAQVGMALEVPDPDSLVLEADASNQVNALLKDYTGKNQGVSELQTKARAAFDLVKVAASEQSFREVDPDVAQQMVANEFGAACTDAKRLLEHLDDRIATTEATLRSMQADFDACVEEVLAVVRSAITTLNRATSKDKSVPVGAPYVGGKQVLKMRANFGSVPVETRRQTLSAYLDTLVDTNVFPPRGTDLIADAVARVYGRPLGLQVLKMSIEETEQYVPVERVSNSGGEGVVMAMFLYLVINQLRAENHAQVYRIAGGPLILDNPFAKATSPAMWRAQRLLAEAMNVQLIFATALQDFNALGEFQRFIRLRRAGQNSKTRRWHLEFANLKLNNVPEELA

SEQ ID NO: 41580 - protein, 344 aa, Burkholderia ubonensis; identical to SEQ ID NO: 41577

SEQ ID NO: 41581 - protein, 471 aa, Burkholderia ubonensis; identical to SEQ ID NO: 41575

SEQ ID NO: 41582 - protein, 1465 aa, Burkholderia ubonensis; identical to SEQ ID NO: 41579

SEQ ID NO: 41583 - protein, 344 aa, Burkholderia ubonensis; identical to SEQ ID NO: 41577

SEQ ID NO: 41584 - protein, 471 aa, Burkholderia ubonensis; identical to SEQ ID NO: 41575

SEQ ID NO: 41585 - protein, 1465 aa, Burkholderia ubonensis; identical to SEQ ID NO: 41579

SEQ ID NO: 41586 - protein, 344 aa, Burkholderia ubonensis; identical to SEQ ID NO: 41577

SEQ ID NO: 41587 - protein, 471 aa, Burkholderia ubonensis; identical to SEQ ID NO: 41575

SEQ ID NO: 41588 - protein, 1465 aa, Burkholderia ubonensis; identical to SEQ ID NO: 41579

SEQ ID NO: 41589 - protein, 344 aa, Burkholderia ubonensis; identical to SEQ ID NO: 41577

SEQ ID NO: 41590 - protein, 471 aa, Burkholderia ubonensis; identical to SEQ ID NO: 41575

SEQ ID NO: 41591 - protein, 1465 aa, Burkholderia ubonensis; identical to SEQ ID NO: 41579

SEQ ID NO: 41592 - protein, 344 aa, Burkholderia ubonensis; identical to SEQ ID NO: 41577

SEQ ID NO: 41593 - protein, 533 aa, Turicibacter sp. H121
MQYDFLRHFQMRMKKVGAYAVLFKNSLAKTTWKSYGYDESYEQVNLMFSVLLYIMECSLKEEVCTMDDIANFIDQLNMQAYQKSLSYEQAKELAIFIVDVALCNEGRPMYFESYNYEESQYESIYISFVGNKVVYIDQELKRTSYYLTDEGYELMLSTLEVDSHLQLTIQEMIFKLHLEKATYDKAVDDVKNIFNLLRIQFQKIEGAMRKIRQNALLYSVDDYKEVVEQNLSIIEETKEKFLGYRENIKRRMQELEEKDITIQKLAEDERENLGHLKTIESYLNQALDEHQRILNLHFDLKSLYTKELEGLTQMGMIQRFNLRTELYEEVLKQPHTLDFMDYFLRPLFMKPLEKTYNLNKSIELQRPISKKKKEEEFFTTIEEESMETFILEQKQQRLQRYRDSLTLLLSFVFKTGSIELNEIQRQLNDAQLQQLIPTVEIFKEIMIELLQAKELDIQRLKQERSENISEQTFEFQLSTCLLDVLEAQFPLKRIETLTVTRTETKKVVTFEHVQDEEGRKKTIKCSNIKLEVK

SEQ ID NO: 41594 - protein, 240 aa, Turicibacter sp. H121
MSYQIEEVKLSQQIFYHLLSQRELNEQQDKALYYAYTGNETVMNLVKSQGEIANCVIERYGSSIYLIPKEENEVLGFSKRELKKVLCKSSGTDKDYYLSQFVILTLLVEFYDGQGQSAKGRDFMRVGELQNIIAERLKEGATYYDEEQQQQLGIAYSNMLEAFEALRSDDRGSKQKTTKEGFLHGIFKFLQEQQLIEYIEADEMITTTKKLDQLMDFNLLNQNNYTRVLHVLKEAENESN

SEQ ID NO: 41595 - protein, 1470 aa, Turicibacter sp. H121
MSRINRIRIVNLNYNNNAIRIDDECFELVNENTLLSLRNGGGKSVLIQMLTAPFVHKRYRDTSDRPFASYFTTNQPTFILVEWSLDHEAGYVLTGMMVRKNQELKEDEDHRFDLEMINFIHEYTSENDYDIQNFPLLIQESQRKTLKGFHVCRQLFEQCKQDKQLKFDYYDMNQPARSRAYFNKLEEFQIYYKEWESIIKKVNLKESGLSELFKDAKDEKGLTEKWFLEAIENKLNQQQDRMKNFETLIKKYILQYQANEGNFKKKEGILRFQEEMQPILELEKQLLKNETQVHEYEYQLAKLYAILDVLHQETTQAKEQQNQQLEQLTQQQHRLAYEQQSLVIYDLMDQITTLLKETGEQEHRLTQLEERQQITVRQQRIYEAANRYQSYKQASEDVQRCESELAVAKKSQEDLLPRLQNLGYSLSLAYEQQVEREQADLTHVRWQIKDVMQQQKHIHKQLEIKQEDRQQFSTQIGRLEQAISQFDQDEQRLSSKYDEAIQRNLEGFYAAGLLKETIDSIKHQLGELKKQKKQDLEQELHVKELQHKVNRDSEDAKEALGSLKMMINAYQQELQQLEEELKVRHRIRSYIAWPEEAVLDTDGMIEALHQKRQTVEGRLREFEREMDRLQKEKQQLQSGEVLPIPDDLKQRLADEGIQYIQGIDWLKRNQRSAEENQLLISKNPFLPYSLILNATEMKRLKRIDLQIKTPFPVPMILREQLEQAPATTYLSGYCQLDTLHFYVWFNEELLDEHRLQQLLLLKEKEIAEIQDKCATQRLHLERYEEQIGVLKYQKLSATTYDHAKKQLSDSLTQQDELQQQLLHFQAEKERLRGELDAILKQLTTRQEQIHFTQLKLQDFEQFIIAYERYVQFLKELLDVREQLNTTLSEIDEAMQQQAELHESYDRLKASEREKQARLSQSQAVLQRFEHYEEGEELRKDVEDLLAEYEAIKDQLDGVLHRSEEDLISAKKRFNFEEEQLHTLMQRYGLSDADYQHITYDKFAHEEVLHEIERLTHELREQEKVINELKISVAKYETEKKNAYDLLKRDLGETEILDKSEVVKRDFIILLSQNQAQIKTVKQCLHTLEQSLALYAREQSNLVEYNQELPETDVVIDSSYRSYDEKAWQTERGTLLRDYRQQQKMVETLKHSISDEFNRMSRLPLFEEDFFNCPLQRFAVCKHVPQSFIEQYDTMHQVFNSLMKKLDVDIEMSEKEKSNVIQLLLDYVGEIHKQLGLIDQNSSIPIRGKNIKMLRIKLPDWQSNANVYHVRMNDFVNSLTQHCLQLMQNNENIEEFIGHQVTTKQLYDQIVGTSNVEIKLYKIEEQREYQITWEQVAKNSGGEGFLSAFVILTSLLSFMRRDETDIFSSFEEGKVLLMDNPFAQTNAAHLLKPLIELAKKNNTQLICLSGLGGDSIYSRFENIYSLSLVPSSFKKGCEYLKSQHIKGEVEPHLVIPSRVYVEDAVQEALLF

SEQ ID NO: 41596 - protein, 326 aa, Turicibacter sp. H121
MDFFKHYPRKKIDLATIEEHYKLGNYQELYHFIQEALKTGVIIPIKSSGSNGKKPALYKTYRIQVTIENEATLREELLYLIHPKLKNDYYLTHLTQYSNDRQAILKLSSFFQTKSSDLEHPTAINERSFQIWQQEKFLLEEGNRLLKNVGLSMTDLNIYETAEPLAYFSACKETPQNILIIENKDTFYSLRKYLIEGHKEILGCRISTLIYGGGKKGVKGFQHFHTSVEPYLLHQDNRFYYFGDLDYEGIIIYESLCAHFYCEPLVSAYEAMLQKAANLPLPKTKEKQNRHEQGVFFSYFNEVSAMKAILENEYYIPQEILTMEDF

SEQ ID NO: 41597 - protein, 502 aa, Paenibacillus jilunlii
MNWSDFGERNKRLNPLWTLGAGMNLGELQPYKEMIALSVLLQVYYLELESNEQRAREDIVELAWSSLERFNITKLGTAESVERLVDGLLWSGSGGDFEAYYYDDLSRQMAVQKYKYFTVDEDATRTSWEESGRTVYRLSEYAMELIFMSHEIIEEFQISIKLLEIQMHIKHGRVTRAMQDVGELISRVRKMTQQQQEYRNALRRNPKHMFSEYGVLRHRRLEEIHLQFDEERRHFDNIHRSLARLANDEKDVIDFNELRQLAERVELSRRVHDELAEVVLSIFEAETNLRLNFPELFWGAGGFNFRTHIWEEWVKSEGLPDADSLELLIGGLFTPGQDFIYPLAWAWEEQEAGFLPEDVLDEPDEGGEEESSAYTPKSIPWPQVSELWLPVFKGLAEIGSFTFAAEAFTEEEQRKWSGTPDAVDLWAQFFHTEITVQAQDADSQGGAADECQKLIQQLLAANPVLEVLRGKVLRTTIQGSHRSSVTWPGLEMSPYTITIIER

SEQ ID NO: 41598 - protein, 252 aa, Paenibacillus jilunlii
MNYSLEQLQQASRLFFDLLRRKVISLDDPAAAECLQDNGAYDALQYMAKEGGCRIMNSGHRLHLLVNPLGSGFASNFTQLRNKYSRIERKTHLHIINIIILVFLAEMDQDEHHFKPGQDSMSYIQISDQVSSLFQAWVEMDSEGGFSRQWRLDIQAMHKVWTSLYMQTKSQEEADSLSRGASSRIGLIHEGMKLLEEEHLVFISENEKRIFPREELYERMRYLYHDVDRYKELKALIGRTLTEKEGEAHAAY

SEQ ID NO: 41599 - protein, 1498 aa, Paenibacillus jilunlii
MPRIERIRITGLKYEKMLKKYDDMVLDLSNEEGPANTLITLMNGGGKGVLLQSIFQLLIPKAAWGKDNENQVEAFFHNHKKQLKPYTFHVAIEWRLDNNDRNEYMTTGIAMTAHSSVDQLEIKVDYLLYALLDYEEHAELTLSTLPLYDIDAAGPVSFESIQQFVRDHRGEMASFGSHSSDLKKYYNFLAERDIHIGEWRNMRRINGEEGGIKGYFQKNDAFTNQNLFEKLIIPEIGTSLNEGLPEQEGSLQKMFMDAATVAQRLPMLEQREKAFAEFTVLAAPLHELVKQGMEAELRYRETELLGRQMYTVIHDELKTAEEGRRKKADELVQLHQEARQLRFEADNLNYLRSKEEADRKQEDFTKISDNQSRARQRLEDSKAKEKELEVAHYLARRKLQLRQMEQWQKEIEAIEGSLEMKERQEVVQAAKEELRQQWQQVSKLWQGQITAFSRRQQSLSADEAARRKERESCLLELGGLDSRIHELTASIRQYTEALGAFAARHGQEAAHSPAASLQRAIAAARGFAENIVTLNERRKAADEERFKLHTKHTQVSGKLLAHEQQEGELQEQLDIQLNRESQLWSQLVVLLELYEEHNRLGATGLFEAKAAVQERFIRRLDEAEVQTKRLRRDYYHQLLDVELQHEAYWLPNSDLLTVKDRLDALKISSMLGSAFLNDQPYLIREEELERHPLLPYSLIVTEREAAKLQPGMLKDLLLKSAVPVFIREQMAQPAEQPFLLLGGQGPQMVLQPDRFLEWKQGISARLKDQEAELQDAEGYLAKLKSARQEYERLFQSEHSVSLKGKLNALNGLQNELRISLGELNTEISENAAAMGEIMREISECEAGKVEHEEKAAALREWNERTHKQEQDYKDKQRAVDRRSELNKEITGKEQQLAQLKAELDSTALEREKWVGDTRYSLFPRLQTWFPELVFPAGPQASSTGHAEDQPEFPLDASIQDKLLQTLSTLESLQQSLSRNELEIRTRAAQIKAAAEQLAELEAAVQQIEADWRNVPEPSDTPDAIMAARTRQKSDTGMLDEDYQLVRDSFVRCQTELDNLHKQLAKAEKAIKEKHERAVELWNEPLDPKEEEIRERSRENEYALNGCKQTLASLDQWLQTLASQSKVMETHVEGRLQLRDIPEEVQLRTREDCEQAVAEWLLRSRESRSERNEISRKVKEEKTALSGKLAKSGWNAELATKIQERLNTVHWEDFSIALQVLDSMLQSSQDQIESIRSDKEGMELSRKMWVGRAAKRVVQIVDILKRMERRMIIHNENGHAFPLVRLNYKNINVPKTTEDIEPLVSEYFNRCISSLLEKFPKIEQVPAAAVKDLISDGMIVYAALQNRFPVLQVYKPVTENYFLYAAPEEYHYSDWEVINRGALDEAVGSGGQRQSVQLLVAMMIMTHKRVNRENKGWTVFLYDNPFGEMVSNNVLDPVFEISKALRFQWLIVTPPELVKNDVSVRFGVYWQLYFGGEKGDMLESTLIKGGRKLIPASLF

SEQ ID NO: 41600 - protein, 502 aa, Paenibacillus riograndensis
MNWSDFGERNKRLNPLWTLGAGMNLGELQPYKEMVALSVLLQVYYLELESIEQRSREDIVELAWNSLERFNITKLGTAESVERLVDGLLWSGSGGDFEAYYYDDLSRQMAVQKYKYFTVDEDATRTSWEESGKTVYRLSEYAMELIFMSHEIIEEFQISIKLLEIQMHIKHGRVTRAMQDVGELISRVRKMTQQQQEYRNALRRNPKHMFSEYGVLRHRRLEEIHLQFDEERRHFDNIHRSLARLANDEKDVIDFNELRQLSERVELSRRVHDELAEVVLSIFEAETNLRLNFPELFWGAGGFNFRTHIWEEWVKSEGLPDADSLELLIGGLFTPSQDFIYPLAWAWEEQEAGFLPEDVLDEPDEAGEEESIPYTPKSISWPSVSGLWLPVFKGLAEKGSFTFAAEAFTEEEQRKWSGTPDAVDLWAQFFHTEITVQLQDADSQGGAADECQKLIRHLLAANPELEVLRGKVLRTTIQGSHRPNVTWPGLEMSPYTITIIER

SEQ ID NO: 41601 - protein, 252 aa, Paenibacillus riograndensis
MNYSLEQLQQASRLFFDLLRRKVISLDDPAAAECLQDNGAYDALQYMAKEGGCRIMNSGHRLHLLVNPLGSGFASNFTQLRNKYSRIERKTHLHIINIIILVFLAEMDQDEHHFKPGQDSMSYIQISDQVSSLFQAWMEMDSEGGFSRQWRLDIQAMHKVWTSLYMQTKSQEEADSLSRGAGSRIGLIHEGMKLLEEEHLVFISENEKRIFPREELYERMRYLYHDVDRYKELKALIGRTLTEKEGEAHAAY

SEQ ID NO: 41602 - protein, 1498 aa, Paenibacillus riograndensis
MPRIERIRITGLKYEKMLKKYDDMVLDLSNEEGPANTLITLMNGGGKGVLLQSIFQLLIPKAAWGKDNENQVEAFFHNHKKQLKPYTFHVAIEWRLDNSDRNEYMTTGIAMTAHSSVDQLEIKVDYLLYALLDYEEHAELTLSTLPLYDIDAGGPVSFESIQQFVRDHRGEMASFGSHSSDLKKYYNFLAERDIHIGEWRNMRRINGEEGGIKGYFQKNDAFTNQNLFEKLIIPEIGTSLNEGLPEQEGSLQKMFMDAAIVAQRLPMLEQREKAFAEFTGLAAPLHELVKQGTEADLHYRETELLGRQMYTVIHDELKTAEEGRRKKADELVQLHQEARQLRFEADNLNYLRSKAEADRKQEDFQKISDNQIRARQRLEDSKAKEKELETAHYLARRKLQLRQMEQWQKEIEAIEGSLEMKERQEVVQAAKEELRQQWEQVYKLWQGRISAFSRRQQSLSAEEAARRKERESCLLELGGLDSRIHELTASIRQYTEALGVFAARHGQEAAHSPAASLQRAIAAAKGFAENIAALNERRKAADEDRFRLHTKHTQVSGKLLAHEQQEGELQEQLDIQLNRESQLWSQLVVLLELYEEHNRLGATGLFEAKAVVQERFIRRLDEAEAQTKRLRRDYYHQLLDVELQHEAYWLPNSDLLTVKDRLDALKISSMLGSAFLNDQPYLIREEELDRHPLLPYGLIVTEREAAKLQPGMLKDMLLKSAVPVFIREQMAQPAEQPFLLLGGQGPQMVLQPDRFLEWKQGISARLKDQEVELQDAEGYLAKLKSARQEYERLFQGEHSISLKGKLKALNGLQNELRISLGELNTEISENAAAIGVIVREISECEAGKEEHEEKAAALREWNERTHKQEQDYKDKQKAVDRRSELNKEITGKEQQLAQLKAELDSTSLEREKWVGDTRYSLFPRLQTWFPELVYPSGLQASPTGHAEDQPEFPLDASIQDKLLQTLSTLESLQQSLSRNELEIRTRAAQIKAAAEQLAELEAAVQQIEADWRNVPEPSDTPDAIMAARTRQKSDTGMLDEDYQLVRDSFVRCQTELDHLQKQLAKAEKAIKEKHERAVELWNEPLDPKEDEIRERSRENEYALNNCKQTLASLDQWLQTLASQSKVMETHVEGRLQLRDIPEEVQLRTREDCEQAVAEWLLRSKESRSERSEISRKVKEEKTSLSGKIAKSGWNAELETKIQERLNTVHWEDFSIALQVLDSMLQSSQDQIESIRSDKEGMELSRKMWVGRAAKRVVQIVDILKRMERRMIIHNENGHAFPLVRLNYKNINVPKTTEDIEPLVSDYFNRCISSLLEKFPKIEQVPAAAVKDLISDGKIVYAALQNRFPVLQVYKPVTENYFLYAAPEEYHYSDWEVINRGALDEAVGSGGQRQSVQLLVAMMIMTHKRVNRENKGWTVFLYDNPFGEMVSNNVLDPVFEISKALRFQWLIVTPPELVKNDVSVRFGVYWQLYFGGEKGDMLESTLIKGGRKLIPASLF

SEQ ID NO: 41603 - protein, 473 aa, Bacillus sp. SDLI1
MEKVDQSLISIFAVTDDKPELLQSMRDIAQLSGVLTELSDKEYFQSPIHVLRFLRVLNIINLEALGIAEPIESEETLFYRYRNVYGYDEAITQGYMKHLVFVLGKFNWVAKTAKRIKMRDVGKRMMDVLIRLANDSLAYYLNDDVARSLFQAKRDAELSEAYDDKGISGGNKLASMIKNVEEAVLLLYERELEYLADRNALTQVEVIHHLMTELEGKMAERMEKFETVDQELVFSDIKQRGTAAISDGTKISLGTINKILKFAHLQETDFNHRIKPEEFRTFIVKSFDPPLGSEIPNAHQILSFMEQGQYEDENIDGLWAPVKFASPLSPRAIDEGINYIENYEPITEEIEETVEEEFTGTEEIMENQLDEIMGDSKWQMTKQMIHTERIEAYLEEVEEAGLDELIIRSGSSKWSDVLNGLIGVSALVANKKADIDEYAKKKLLDNKDQRDWRWSEDEQGTYGIRKRGRNHER

SEQ ID NO: 41604 - protein, 235 aa, Bacillus sp. SDLI1
MNKEHMELENEEEITNVNPLATLQSIKGFLTTEEELAFMQILFSSSATIRSGNFGLSRKEVEKIIGITDDDQAFFSFLKRVNQAVSRYMKVIYDERRNQVVVLMRVPAKQAKTLLNKQSLAILMFIFYHQEVLQNEYTLFSQLINSFGHESLQVTRKIQANLDPLKKIGAIEVYDTSSEEEAYQLTSIGAHLFSNSFLRRYTEFSQSNQLHMDDILRFFKRYNMNGGTSNDSMET

SEQ ID NO: 41605 - protein, 440 aa, Bacillus sp. SDLI1
MVSVELQDYLQYHIVLKNESLHVRDASEENGIIHISVIKRTARTRRIVARLMVGINTDLQGIDKIPTKLTNSFKSPNTKKQVDLSDETYEWIRFGWIIREIRLEKDERTVKTERYRMGFILYQLSLKAELESEKESRNWISDWNKQWEVARRSNVPGFEQDQRADVVSLLAKHLDEIASETDRVLAGEAKLIKSIHPSWRLRKQVVFLHFLIALYQLSCTEKHFDWKQIGATYYRIIGGSKQFDAYKKEFIEETENLLQRPIQLLGLASMGTITPLFFTGPMQGDYVDYSYGTVHATTDLAVFSETFNTKADVLWLVENRGVLTRMAYEEEFLRGTKSFVLGVDGQVRSAHRLLISQVVTCVSQVIIWTDVDEAGYQIAEKLYKLTQDEHVLTKWIVPPLTVVTEWETFANKYQQSIQMRKEEQEQEIGGVELWKKWINH

SEQ ID NO: 41606 - protein, 488 aa, Salmonella enterica; identical to SEQ ID NO: 40981

SEQ ID NO: 41607 - protein, 1478 aa, Salmonella enterica
MWLIKRVYMDGAGHEEAFYKDLTLDYIGLSQAVGSPVVEGLRSPVRNAKVVTSTYQQLVNGGGKSTYIALLLSIFEPSVSDFTQYLANHRQSEYHYRNYFYKELSVVLVEMVNESGQTLLLGHAHQRNGDDVDRTLFICDAPDSLMGAPFDEVPSYSRAERNSELRPYANSLRSFDSWLNLKAGSEGGMHWRKTTRQNEWRAFLLEQQINVDLIKTMVTFNSEEGGLTRFIEYKTEHDFLGAFFACTMSKDAAERLRELVAHEVERQGELEGIRRNESFLKDVLANWLAFLDPAKQLESIQAQQQLLDDGFREAMRDLAAFVGDAQVEQTQLEDNMDSLQTHIGQAMSLREQLGKRRALLEYDLVQHQFDKQKAIVDALQDEADTNQRQIEITHAAIDYKAYAKALNEYRQADEDLKVFQSETERPLQVIFERTAGEALGTLEWAIDRHRQQEATLEKELGQMDRESNTLKQSYDDLQKMLGGLEADRERYKRDKRQGESQRNELCEAGLIQKGETPVAAQYRLELTLRDAQQSEELANTILHQKEQALEAQLNVVREASIEKSEAQQKLILAEQKHQSAVDSALLLAKTYQKLPTSTQHDLDIEDTSWHSELCGLQLDKVLNANAQTLNGMKERLLQARHELDELRMTGHELVAKLVNQALEAFYAAGIGRDKLWTFPHYLASVYNDDAQKIAAVIDQNPGRYLSLVALDNVTFEQVHKISEILPWKKAPIAIYLLDEAQDLRRETSELVQVVLSNPDKHGYSQAAYEARLQDLENIVASQEVSVKAAESALNVLKSFRNDWRLHYEQYGKHWAGLLDQRELALLILENADAALKQAEHDEQTLRDEKRDVQVRLNNARQQKIQAEKAHDKLSLFVETEWAKRETAIMKLEQLAAQIQRSKGTLCTQREKLERLSEIEKNKLSEKTLLNIQMGNWSNLCNEPFYSEITATEGMEGRSPEDAHEMAAQAHKKLLEAANGDQVTALKQQLKDAEQAQRYASERLTAQPTYNTYPDEVKAAAINELTVINNRIVRLNKQQKQFTQNLINSQVTLQNFSQSCEEASKAIDEDFVWEEKPIEIETIQTSLAEIVNSLHEIEYQLKLQLEQKKLQLQKMENVKERLQNAKTAQAMIQPITPTSAAGLPGRIQSITEYTDDLVTQCQKYAGLNETLKQQNIRVSTVWGKFRKRIEEELAKDPDARASQEYLRQLDSIATYHEVLGDLDRVGTGITQVFEAVQDSLEQFQRSIDLTVTHLTAHLEGAIKLLKRAMSVKIPEDCPVLPGRPIIKMTDRLNDVAADLRGFASSRLQQWIAKGQIPRAPNRDALTADLVQSVFGEGELEVRLLKTNASRPQWTPVTRLEGSGGQRLTSAFLLFVTVGKVREYDTGISSAGFLLADNPLGKSNADDLMRIQTQMAKAYKIQLIYLTGISDENAQSMFDNHLFLNKFQKLRRRDLVTVDKERHALWAASLAAKPQFAPVI

SEQ ID NO: 41608 - protein, 347 aa, Salmonella enterica; identical to SEQ ID NO: 40983

SEQ ID NO: 41609 - protein, 496 aa, Halanaerobium sp. T82-1
MDRANTGLNERLKKTKAIAELGQGMDAGSLNEYSHQISLYLLLKVFKREINNNEQRSRSDLLQLTVEILKEMRLEINMEEVERLVDGVLYSGDPKQQSYFHVKIYDETAGDFKDFKYRYLIPDREASNWQEGGSTVYRLSEISQEIIFITREILQEFGFDLEQFYTLQLIKNGNFKEAKGSVSNLIARVRNLIKKEKDWREDILRNPGLIFSAYKERRRRTEAEVREQFKEEKKVFSDIFVWRDRLDTFENADQKEGELLFEELERARSLHDYLAELTVSNLSLELQLRRENPDIFWQTSRLSFKKDFWQNTVLKSGLPQIDDLEKMLNPLFSPEQDFIFPLDWAWSEQQLYSYLEESEGEIATLEIESAPEREIDWGLVVELWQHVFTELFKKGEFKLSALNKLSPEQKEKWLSQQLNLELFMMFIITDIKLKIVEEYPGLDERLLLFNKLVKVEPELAELEGRKISARLTGSSKKVNLLDQFIISPYKIYLEED

SEQ ID NO: 41610 - protein, 259 aa, Halanaerobium sp. T82-1
MAFKQEELENGAALFFKLLENEILSVSDPLAEKYRTNSEIHNIVNTMAAEAGLRVFSTAKNVHLVSKARGSSFANSYTQMKEKYSGLKRKRYFYLANIIISVFLAEIDKESHVRIRWEEEGISYHRLSDLVTATLESWLERKKEDESFTQNWSIAVEEVAELWLTEFSEYRLNKNEKVDVTRTKGNRLSFINTALKPLSEQGLIIDQSDELKLIPKAELYERLDELYHSQKRYNKFMDLILASRKEIEEENQHAQTEQN

SEQ ID NO: 41611 - protein, 1494 aa, Halanaerobium sp. T82-1
MPRLSKIRITGNKYDGFQKQHRNSIFDLESDHSLFTLQNGSGKGVMLQLISQLLLPGTAWGKRNGNKLEGMFYDRYQVFQPYTFHVVLEWRLDGSEDKKLLTGICVSAHKQQSTTDEEGKVGLKYFLYTHEYQGSSRFSLTNLPLYTKSSDQVLGYERLEEFIDQNRADFIKYSKTAVSSLNSEYYQYLSSHGIYRSEWEIMKNINRSEGGLEKYFSQAKDNKALFDRLIIPAVSESISYYNEREKNSLLNIFVDNVKIARNLPELLSRREDLKTLSQMVDPLLSNAEQGLRLKETREMIRERGNNYLRGIADRRTFLENELRRSQREKKKTESRIRELNFESENLKYVKKLRALNELKAEQEEAEAEQQKLNKQLEKLREEELQLKLNQKYLKLEDLESEAEGKRDKINSLKERSEFKELEAEIRQLKEETAAEIDELNSKVKESAADYYSYQKYLEQKLKELEAEENKIEQKIRDEQQFKLEYEHQEQKVEAEKEKLAHFFNPLELETPKYLLQNLDNETAELDSKLEKLEENLKEQEGQKEKLQGQRQQTAVEAAAQETVVENLKEELKKQKEAEEELFSQLIKSLNLDRFEEFYSKQWLQQQQNELLKLINEKEESLQELNADQFELQLDLNLNDREYWVASLEQKRLYQKIKELDIRVYYGSEFLFELVEDRQKYLKDYPLLPYGLVVVYKADWEKIKANISLAEISHFAVPIFINHQLDGSDSELPFKLLTGKEKNFIENKNDFEQWFSGLQSKEAEIRETISILERKLKNLNQLNYRAETMLAAESAAEIKTKLEKEESKLESLQAEIKKYEQRLKNTAAKISALKQEYQIKEKKLTELKENRKQVREYLEAKRDLDKKESSYQQALAEIEHLDKLLAENKTEQKKKQKEELRLENNYENWLEAYRKFTSSLNEMLSDQQAELKSEFKKDELNISPREQYPELFAFRQHNSYQNYEKIISLQKKEEERAAELKYLEESLQKLLSEINELKTELTQLAADWEERDYDFKNRSQLKTALEEINEQLKKTEKEAQSLKEEILVRRGQLETRENELEEKAAEIKERFQRSVQSWDNVELKVKELEIKKELSENKDYLSKLEKMILNYQEKLQAHNNLANKLQYYQLEAAKGELNAGIKEELKDSPAAVIESWENDYRSIENKLKSLREKTEDNFYHFKNDVKDVVENITLKNSINEKLLHNFRASDYQYNYEMLNSFKEYINNELNTIDRNKTEAEEARQQWAERSSIHVMRLITSMKEMISNMVYHNQRGFAFPLVRLRRDDLLPDDEQEVIAELKEYFLELINKFNREEIDVEQLPDYKLKEYCGDAALFSRALRGRYPVLQVYKMTEKNEFLHARPQDYFYSDWESVIQGKGNGPEGSGGQSLSINAFMMMMLLNYKKQRFDKSNPWTVLFLDNPFGKASAAHVLDPIFKIADKLNFQLVAFAAPEIIKTEISERFPVFWALEIGDTERNQGVVQGQVIYGERRAKVD

SEQ ID NO: 41612 - protein, 369 aa, Halanaerobium sp. T82-1
MVKDEQKWIRLFKKYKRNELEDRLRFQLADLENFIKARLGGASAYQAAGGYQNLYQLLKKMEAEEKIRAIKSSDFNQRQPRLKKRWSLVKKEPAGWSDKVILKLSRQLNLSYYLKRPAQQTGELKQQLFRLAEFLNNKSEREWTSREERSLELFADEKYLSRTAGKKLLSNLKLSLADLKAQQYNHLFVYWTKDPTQINNILIMENHSAFIGAKKALAAGIDIFAQNFDTVIYGQGKKIIRSFSFLEELLGLKAADENYSQRQQLLNGLNIYYAGDLDPEGLAIYVGLENKYPDFKIKLLAEYYQLLLEESERFYPCRKRQNKNQNVLAEVLIEFEAGGYNDLAAELQRAWENDLRLPQELVTLEVYKK

SEQ ID NO: 41613 - protein, 547 aa, Clostridium perfringens
MIKLNEILDGYSNRISTIGSYYFLVSAVINRNKLNKFSEFTNEEFFNLTIQLLCFIFEKSLKRENCLKEDLYYFVESLNLNIYKKNISSDDISLLVGYLINRLTNNGKVYEFDYYDFNKETFDKYTVQLIQTEQIKLPNNNYVLSYSLTNKGYKLLLSTKEYDEMFHIELSQIIARVRIEKGDYAGAKEDIQNIIEALNIQYQKIDDYIKAIKNNIYYIKEVQSVDIFNDSMILLESEIKKYDELKKTVEGFILDKETCLNNNLIDNENYMLNIRKELSMMKSLIEGVDEAKHYSFKLINRIQAFRVEYSDIWKKLLKRGSSSKFSFKDVVQSRIESPNLNFSNLFSLYKPLFLPKVNNVFCINTPYQEQRIKNYNQNDKVIEYGFNSEDIDNSLEDNNKRIIEYNQSFYLNFIKELFYYGLKHIEFSTKEFLNYYLKEDRNKYIELTQNALLLRDLFLNICKLERVDLDIILEKIDTSTINSDRAFQIERIIDSMINCDENFIKIFKSISFKECVEEITINSEIDIENMTAIKLTVPNIKVTVEYK

SEQ ID NO: 41614 - protein, 240 aa, Clostridium perfringens
MNNLLSLEDYRVAQNIFCKLLKCGELKEKEDKKLYLAYINQSGVREALSIISEESNVNIVLIDDTIYLIPNIDNDVLGFDIKREFDNKNILGSTNDEVYLSYLIITVIFAEFSNDIAPATYIEIPDILDLVSEAMNRALAREDIAEAEVEMAFNIKSSFDIWNSKIKWDEHDKLGVNTKSTSCQIGVVRRIITFLSKQKLVNVISDEDKIVPTKRFKDLMNGYFLNDDRKKEVEELLKIR

SEQ ID NO: 41615 - protein, 1450 aa, Clostridium perfringens
MPRINKYKIVNFRYGDKHSRLLSDRTITPLGNNVQMEATNTLGKSMSILALVQAICPLSDTGRKAIDVFTCKEPVYVAIEWLLDDDTTKLLTGIALERISTADEASVSKKDDLYRFFTFAIEECSDMNIDIDNLPFIKSNGPGGKDILNSTNDFEKFLVDLKKNFKGKVNIYKQTHGRINYRNKLSEYGINQGEWKDIILKLNKDEGMLSVMFEECNTTEKLLKKEILPLIDVNLNKNQIGDIRINQLKNEVKSFIEHCLANEEKINSQKDFSMLLKFIDDIYSNTMLLKENEDKIDELKKKLSSLYYYCENSKKELENKIELKKQEVDGIVLDLTQVDYEEDSYEYIKEVLEIKELNKLIVDIDCTIEDIEKEIIKNQVVDMKIDFQSKTNELSTNREVLAKYIAKKKKLSLANEELNSQINNLGYSIKINKENEIKNIKEKQNKYKNEYEILSKDNNNLNDELINLNKDKTKLSADIKFKEMELSELDKKMNLFISKNHIVEEYINDTLMGRNINFDKLNNDTLDKLKGANEVVSDINNRINELDDKKDSNEKLIIMLTEDKFKIQSNIKELSSKRNQLLKINDLIENTFKDLGIEVHLLNTADSIKKQINLKINQLNVEEEKLNAIKFNKINELNKVENSTDINIDPSLEAALKLLNIEFEFGFNYLIDLDYSFEKKIELINKCPLLPYSVIISEKDFEKLKKNKLECHINSTTPILIRETSNNIDLEISNNIVSSKFINLIASFDYMLLDENKRAEIVKNLNDKLEKINKNIEFIGTQKRKLIKVLSVITDDFDKDNINLYEDKINSYELEINDIEMRISNCNKDNIKIKEDKFNLNNEKDKAIGLINTLENFLSDIEVICNEQDKLSHHKEYIVLLKDKMQTTENDIKNIKEKVALISENLLDLKFNLEVLVKDEKEVNKILLEFKNYVDGSLINMDINDMINEFNELKKSSNANDILELDNLISIHKERINVLENELAVLKEKIDIEDVSMLINESIIETKEEINSKINSLNNKLNEKVSKKNKILKDKHKKEGSIETLSQKICNKYNKAPIEYQLIENFNFKERKKILKDNKKEISNIINKCKNQLNNMNGWIKLLAEYKLEKDDIYNYDNIDIQKFVDESKKSLKKISIEMLKLKDSQFEVCRNINKFNVENEGKYDYITEGLSLEISINSQLERISIIKLHLETELNNLAKETESLSIERNIISNLTKEYVKDIINQLRIIDKLGKLKEDKILNIRLPKEENIYYSKIDDMMEAISNDKNISNIEYMINSFYLLNTVVGISQIKIRVMKYELNNKKSMVDWERVSREKSGGQGFCIGFVLLSILMEYKRYNPKNLTNKFTGKVLIMDNPFAKVSNPGLLKVVFELAKKFKVQIISYTHIENQSVREPFDLIYTMKVVNKLQSNGEVVIIEQLKNDINELVNTSKYEINEREVQENLFDLIM

SEQ ID NO: 41616 - protein, 339 aa, Clostridium perfringens
MLSDFKRKTISLDELKDLSQKYEHKEIVELVEKLISSNKIIPIKSSGKTVNIPNIYKKYRIVKEANFDEDLLKEISTFYFSLSTEYYRKNLKVYIKHREHVKKINDYLINKSECLKYKVSVNERSYEIFTDEKFLSSDEGKKILSNLNIDLYKFLNVYKTPEPFCYISLSNKTPQNILIVENKDTFVSLMKLLNEGINNILTKEFTTIIYGEGYKIHSSFDYIYEDVTLRFLTNKNNKFLYWGDIDKEGFAIYSLFKDKNVNLNISLFKEAYQSMIEKSNEFELGFMKKKQTKEYREVLHELPGETQVFINNILDFNKYIPQEILNSNYLRNRSMINCD

SEQ ID NO: 41617 - protein, 455 aa, Bacillus coagulans
MLQSMRDIATLSGVLSEMGSQRVFDSPAEILRFLRILQLLNEEALGIGDRIPNSDTLYYRYQNRFPDADPPSKKKVAHIVNVLVNNNWLSKQTTGLKMRDLGKRMMDVLIRLANDSLAYYLEDDIGRSLFQARRDAELSEAYDDHGISGGNKIASLIRNVENTILMLKERELELLADRNALPQLQKIHDLMAELQEKLSERFRMFETMDESLILTDLMQRGTTAMSEGTNLSLGMINKYLKFTTMQKTPLSSSIQPDLVRQFIISMFDPPIDSDIPNAYQMFSFMEQGQYEDEAMDGIWIPVKFASPISGSGISEAIDYLENYEPVTEPLSEKEETIEYAAEEGSKDEMDELLGNSNWMLTKSMIQTEKIENYLEKIHKASMEQAVIEATSGEWSDAVNALTALAALVANKKIDIQPDPGDTETKTYEKTWEWMNQQDAKQVITKRKQGEPIDQG

SEQ ID NO: 41618 - protein, 229 aa, Bacillus coagulans; identical to SEQ ID NO: 40558

SEQ ID NO: 41619 - protein, 1065 aa, Bacillus coagulans; identical to SEQ ID NO: 40559

SEQ ID NO: 41620 - protein, 433 aa, Bacillus coagulans; identical to SEQ ID NO: 40560

SEQ ID NO: 41621 - protein, 469 aa, Bacillus sporothermodurans
MEKMDQSLISIFNMDADKPELLQTMRDMAALAGVLNDLSDKESFQAPKNVLRFIRVLNLINQEALGMTDPIENEDTLFYRYRYTYGYDEEMTIEYMKHLTYVLGKFNWITKTAKRIKMRDLGKRMMDVLIRLANDSLAYYMNDDVARSLFQAKRDAEISEAYDDKGISGGNKLASMIKNVEEAILLLTERELEYLADRNALSQVEVIHQLMKELESKMIERLAKFETFDQELVFASIKQRGMTAISEGTKISLGTINKILKFAHLQETDFIETIKPDLLRNFIVQSFDPPIGSDIPNALQILSFMEQGQYEEEELDGLWVPVKFASPLSPNAIDEGINYMENYEPVTDGIEEEVEEDFQETDEIMEDMLDEIMGDSKWQMTKQMIHTEHIEKYLDEVDEAGLDELVIQAGSDKWSDVLNGLIGVSALVANKKADIDEKANRKLQGNMEERDWRWEDAEQGSYGIRKRRK

SEQ ID NO: 41622 - protein, 236 aa, Bacillus sporothermodurans
MLNKEAMELENEENENFNDNPLSALQSIQGFLTKEEELTFMQILFSSSATIRMGNFGLSRKEVEKLLGVNGDAAFFSFLKRVNQAVSRYFKVIYDERKNQVVALMRVPAKQARNVLNQESLAILMFIFYHQEVLRNEYTLFSQLINSFGHESLQVTRKIQANLDPLKKIGAIENYGTNSDEEAYQLTTIGAHLFSNSFLRRYAEFSQSNQLHMEDVLRFFKRYNMNGGVPDDTLEG

SEQ ID NO: 41623 - protein, 1065 aa, Bacillus sporothermodurans
MIPWRVRFSGIRDYIPTVLDLSGEHDHVLISGPNGAGKSTVTFCMGGVLYSSKVDVEGLKSNNLSSDQTWRAKIDLLFKNAGKIKVDAPQYVQFRLEIEQKPGDPIKREFYIEEGDEIDKWERTTKFTSGGNLNFSEYKNQVFYKYAVDPDAFYLIWYQKEVNQFAIMHPEERFRIFSEMNGIDRIQKNWEESKELVKDTEQSLQEAESKQGLNKMHLKQKKMELDRYYNRNRRREEGFNQYYRGIKWLETYYLNQIDSLKVQIEELLANKKEKMDAKRESEIHFVEKKEELEQFRILLSELQNQEDVLGQEVQKINKQLKDTNEKIDAISEQIAEITKQVDRIGLSEDEVKVRLNEAEKKYKEIDTSIKAMVTKANNLSNQLNDLISKRAELSVKIDQDKAQERKYNELIDTYHGSNAIQTEMDKNNLEIENNKDRFRVLNEKEQKIEKELTLLKNNKVYNPRQEQSIRFFKANQIEVYPLRELVELDETAGQHDEYVFDTIKYTLFVNKKVFKAPNDLYHVSLPNLIPDKTIMQLPDKHLKVKDNLDECLYPYAIKALWWVESFFKEEKPLIVNGQLVDEKGVRGPQEEKKIILSEKVLQFQQVKLEKELTQIEEEKLQLNKDIQERNNRNSILFSRKELLKEAEAFLTKENEREWRQSQYEKVKKEIEAIENENRLIQDGLNEQRTSLARWEQSLLTYRDYLEIYQQFRKEQAKIEEVQRLKSILVGLNQNKKEKNNQLEGISITLDAKRHEERQLSRKLEDEENDLIGRDREIEQMERQIKTRSEERLSNEEGYSRTRKEGQKLLETAKDLVSKWNDQMERFSELTKPQAEELRNHGKTTFEFAISETGIDEAAPENYAKMKEEYDRSENEVKKSKILLEEYIERMERFKEDLEETINMKIIGVNQKFVNYMSLFGFEGKIEWDMNTDRRGQIRYTLFIKARKEGHRGKLEDVSVKARGGKVGKGVSGGEESLSSLLFALALLQTIETSPGYIVLDEFDSALDEGRKEKVFGLYEQELQRKMIILTPKSHEEEYLYRFSKAYVVHHNPNIPKSMVFKVKRV

SEQ ID NO: 41624 - protein, 424 aa, Bacillus sporothermodurans
MINNVWKDYLYEYILLKNEELNLLDIRENNGLIDIPVVKKTARTRRTVAMLTVGINNKNVPPSNLLKDFTSPKSKKQFELTNETYEWIRNGWIIREYRLAKDERTVKSVQFRMGFSLFLYKKQIEDEKETKKTQSITEWKEQWIKIKNSSSLNLKRKEQLNRLKDILDEVVTEGKINHNSSTWRFQKQLLFLHFLTAFYQISMAEHHFDWKQIGARYYRKIGGSKEFDSYKKEFIESAEELLEYPLHLLGLSSLGTITPIYFTGPMQGVSVSYDYGPIHATTDLAVFTEDFQTDAQVLWLVENRGILTRMAYEKNFLLDSKSLVLGIDGQLRSAHRRLIEQLVSNVKQVIIWTDVDEAGLIIAKDVGETVQKYRSITKWVVPPLEVVLDVEEFQSRYKKAIQVQKEEQEQEIGGVERWKKWISP

SEQ ID NO: 41625 - protein, 253 aa, Geobacillus sp. B4113_201601
MDTPEGPKSLDKSTFLEGGKTYELVLKIARELESVHYAHSALLDKALSLKNTTLVTAQESLYYTGLHSFNFDQDIVSHIVSAPLPLEAMKGVLHPFLKVEENKVWSPMAIFAEQNITEERKEKAGPRFLEAEEAEEGDRYRAWLIAKYRELMQLFLKAYEQERAGTLAAFFDYLDDIGQSHLYEQRSFYDFWILMHQRSPVEQGMEGEEGSALLGEALALLGGRVLEVQEAGRIIRQCERFSIQDMSITVRER

SEQ ID NO: 41626 - protein, 248 aa, Geobacillus sp. B4113_201601
MRNYPEQKVMQAFQLYTALARQGAAGAQAVQLYKSDDEIRALLDAFSREVDCVIVLTSERLFLVPRTKLSPFHVSNDWIKRHYLRAGATNGDLYLLYFAVLVLFGSFYDTYQSPEPTRNFLAMDEWVRLVQERIDQLKRHDPDELKQFEQEFSYNWSLIIEKWEAMDDIKETAKRQSGATISRLSFLDAARRFLIDQELVVDIGNDEVALTEKAKTIIQRFFMEVEYNRGIFEFIYGFERERDDASDQ

SEQ ID NO: 41627 - protein, 1470 aa, Geobacillus sp. B4113_201601
MPAISKIRLTNVVYEEGRKRYNDEMFRFDGHNGAILLENGGGKTVLIQTVLQAILPHVDLADRKIKQTLQLENAPAHIAIEWLLNDKPRRYVVTAVSLFMTNNGLDSLRYVYEYNANDPHGIEGIPFVREGKGGKRPAERGEMQDYYHDMKAKSMFARTFATIKEYKAFLEEQYHIIESEWESVVKINSTEGGVEAFFDECKSTNQLFDRLLIPIVESAIVGHDAKLFADMFEKQLASFKHYKKLKETIEENKLIQQELERYVETYEEFHHQELAYTKAKQRAKGVWLETLQQKQAGENELNNNAAQWEEWRQTEAAHRQKRATYDVLVEEACLRELEREYEWALAQEKEKEEELWRLERDYDSLRLAGYKEAKKRHDEALAYIEAEMAKRKDDETLARCEEELEMARRALLGYFMEQLEKIGQEERSVRYELNPIQTQIEQWTKDIETLKRTAQEAGEKRAGIQSVIDAREKDMESIKQRLLANPSQQSVEEEMGKWIEREQWLDEEIVRLRQEMKQSKQAERAAEANKEALQKQWAKQQAASEALAQRLETLENEEQALIQTLASLRPQWAALDSVYIQEETIRMRLQEEIEKRMKEREALLVQERIVSRLHDAYGEQDVFFADPFLAEQLASWKNQFDFVATGVEYLQSLTEDERANKQAFPLWPAALMTTAKAKERLVQKVRQMNDRLQLPIVVLSTDEAARVEETGMPHEWIAPRYWEEASDPALFGAWKERIRESARDMTQRRQEKEAELRLWQDAQQAWRAFLAAHPYEAVESLRAEHAERLRSIEQLTLAIDKENARIDECRAHLERAGSLIGQYEEEWRGWRDKIKDAGQYMQYKKEVQEARKQAQALDEQLAALAKDIARLGSRLEEARAQKTELKERLRSLEAQRRAVEQNYDYRSLRSLAPIYSRESEEVIRAKIDQWKLRIQGIETTYSEWQTKREFRQNEIDRLTNEINKLKQKRPDLDETRTFPSDGAQRLERLEEQIASAQETLKRLKQRTQEALKRKERQSGVVQTKEQQFREKFPNEARWPFAAPLADIAAQLEAEQEALAKRKAFLEQERERLAKEMKSIEQAARQLEVAKEVHHFNAPPIAALSLSAEEATAFSYDRRGFIEGVTESLKAGKQAVEAAKERVERAKRSFREFCRTSIQDMKMQQMAINGIEHKETYEDIISFKKHMMKSVESATNYANEHIRQKDAELQAFINHIHTHLRTLVEELRQIPNKTRVKVGDEWKRIFTFTIPEWEEEVGKARIRNHIEWMLQQLESERFLNEHGQQDEAKVRKEIEMWLQSKQLLQIVMNNEGMKVNCRKVTNDNKVTTRSYSWEQSNVWSGGEKWSKNMTLFLGILNYVAEKKQRLQPTMKRHRTVILDNPFGKASSDHVLNPVFFIAEQLGFQIIALTAHAEGKFLRDYFPIIYSCRLRPSSDPNKQIMTQEKWIHHAYFQDHAPKSLERLGETEQLELF

SEQ ID NO: 41628 - DNA, 1632 bp, Bifidobacterium longum subsp. longum ATCC 55813
gtggccgatgtgatgcgggagctggaacggctgcgaccggtgtatgagacgggcgtcctgcggttgctgttgcgccagaacgcgatgctgtacgtgtcgctgctgcgttccacgttcgacccgctcaccggcgagctgccgcgcgagaccgtggaggagcggttcgcgcaaagtctgagcagtctggccgacgccggcgagtatgcgccgcgcgaggaccagaccttcgccgaggccgcccatcagattctcgccgacctgacccgtgaaggcgaaggcgactacgcctggctcgccaactcgcatgatgcggcctcacaccgattcctctaccgtttgacggcccgcgcccaccgcgccatcgaggcgctgagcaggctcgaagacgaatcacgcgccctgtccggcgcgcaggccaacagcatcatcatggaaatcgagcacgcgcgcatgcagctgaccgccgaccccggcgagcgcatcaaactcctcaaccgtgaaatcaaggaacgcaagcacgagatcaaacgcatccaacagggcaagcagcatgccacgctgagcgaagcccaggtggaggacgtgatcgccgtgatccacaacacgctgcgcggcgtgcccatcgacctgcgcgaactcgtgctcgacgagcgggacaacggcgacgccttgcgtcggcgcatgcaggccggcgacatcagcgtggacgagaacctgacccgctaccacgatgaataccgccgctcgttccgcgaatcagacagcggccgccgcttcgaggacgccttccaggtgatcatcaccgacgagggccgccagcaaatcgacgaagccctgcgcgccatcgccaaaaccccgtatctggccggcgaatccggcgtgctgctcggccagatccgcgacgaactggcccgcatctacgacggcatcgaagccgtgcgccgccagatgcgcgtctccgacgaggcgatcagccggctcgtgcgccagcaaaccgacactcgctaccgtacgatgctcacccgcttgaaccgactgtacgcgcgcctcaacgcggatgcgaaaacccatatgggagacgcctcgcgcccgtacgacacggccacctcggacgcgctgttcgcgccattgccgatgcgcccggccaaatccatgacccgcgccaccgcacccggcctgagcgacctcgccgccgaagccccgcagtcgactccggtggccgatctgcgggacatggtcaacagcggcggcccccgactcctgcgcatggtcagcctcatccggcgcaacccggtgaccgttgacaggtccgatgacaggcccggcgcaaccctcgtggacatcgccgccagcttcaaccggctgcccgaaagcgaacgccgcgaaagcgagatcgtcggcttcctgggcgggctgggagccgtaagcggcaacgccatcgccgacgagccgtccactgacggcgtcggcgtcggggtcgacagcgacatcgccaccgagccggctccggcgcagcgcggcgataccgcgatctggcattgcgtatcgatcgacggcgagccccggaactggatcactagaccggtgctggccgacatggacgagctgagcatcattgtggaggaaggatga

SEQ ID NO: 41629 - DNA, 675 bp, Bifidobacterium longum subsp. longum ATCC 55813
atgaccgtggccgaggaacacgaggaacacgaggagcatatggacaacgccaacccgtacgccctgttcgaaggcgacatcggcgacatgccggccgaggcacgcatggccgccatcgccctcaaacgcgaccgctatatcagcgggcccacctacgacaccgtgctcgacaaccgcgacgccgtcgtacgctccctgaacaacgacctgctcgacttggtgatcaacgaacgctaccgcatcatgtacgccacgcccgtggccggcgacgacgtgaccctgcgctcgctcaaaacccgtgtcagcctcaaacgcgaggaggccgcgctgctcgccttcctgcgcatccgcgtcctcgaatacgagaacgtgcacgccgaccccgccgactggctcgtcagctttgaggagatccgcgccgcgctcgccaccggcgccggctatctggccgcccgcaacgacgaggaaggcgtggcaaagcagatcggcgccatcgtctccgcgatgatcacctacgggtatttggtgcgcctggacgacgaagccatgtaccagatcacgccgctcgtgcccgtggtgctcgaccgcgaactggccgacacctggctcgacgtcgcggaacacggcgacggcgacacggaagatgacgatgacgacgagaagggagccgaatga

SEQ ID NO: 41630 - DNA, 3549 bp, Bifidobacterium longum subsp. longum ATCC 55813
atgatgcaggcgacagacgtgcagatgatcgcggaccggtggatgctggaatcccgccgactcatcaactggggctcctatgagggctaccacgaattccgcccctccacggaccacaagctgccggtgaccctgctcgccggtgccagcgaatccggcaaatccacgctggtcgacgcgcagatctccctgctgtacccaaccggtacgccgttcaacaaggcctcgaactccggccgctccgaacgcagcgactacacctacctgcgcggcatggtcggcgtgggcagcaccgaaaccggcgacgagccgctctacctgcgcggccgcgacgagaacggcgcaccgcaacccgtgtggggcgccatcgtggacacctatcgcaaccagaccaccggccaggtgctctcctgcgccaaattcctctacctgatgcccggcgacggccgcggcgacgtgcgccgacagtacgtggtctggggcaagcccgtggaccccaggcgcatggaccaataccgtgacgccccgttcacgccggcccagctcaaagccacctaccccgactgcctcacattccccagcgccgaagcgttccacacacacatctggagcgcaatgggcctgagcgaggccgcctgtcgactgctgcacaagatccagtccgccgacgcgccctcccggctcgacgacatcttcaaacaaggcgtgctcggcgtgcccgaagccctggacctggcccgcaccacggtcgaggactacgaacgttacgacgagaacttccacgccatggacgagaagacccgccgcatggacacgctgcgcggcatccaacaggcctacggcgaatacgccgccgcacgcggcaaggcccgcgccttcgaaccggtcaagccggccgtcgacggcacggtaccggccgtgctgcgcgactgggcattggcccgcatgcgcggcgaagtcgccgtccaactgcccgccgaccgcgccgaacaacagaacagcgaggcggaagccaagctgctgcgccgccgaaccgaagacctgcgcacccgtctcgacatgatccgcggccagatgcagggtctggacggcggcaacctgacccgactcgaactcgaactcgaccaggcccgccgcaccctcgaagacgtgcaagccaaccgaacacgaatcgaacaaacgttcgcatccatcggcgagacgctgcccggcgacgaacaggcctggaacgaacgccgcatcaacgccgtgaacttcaaacgcgaatacaacaaacgagacggcgaatgcgaggaagccctcaccgccgccatcaacgcgcgggccggcgcacgcggcgacctcgaacgactgcaacgcgacttcgaccggcaacgctcccagcgcacccgcatctcccagcagatggacgaaacccgcgccatgctctgccgcgccaccggactcacccccgccgaactgccgtacgtggccgaactcatggacgtgaacgaacacgaggaagactggcgtctcgccatgaacgtcgcctacgcgcccatcgcccagaccatcctcgtcgacaagcgccacgaacagggcttcgccgccaaagtcagcaccatcgacccgcgcaccatgccccgacgcacctggcagttcgtggacaccgcacgccactacgacgacaccggcgcgcacgcgaacatactcaccggaaaacaggacggcgactggctgtccggcaaactgcgctaccgcgacgactcgcccttcgccgactggctgcgctcgcagacccaggacgaacgattcgacgccctatgcgtcaccgccatcgacgacaccgaccgcaccaaccgtcaggtgcaggccgacggtcagatcaaatccggcgcacgcggccagcacggcaccaaagaccgcgcccaggtcatcggattcgtcaacgaaacctacctcaacgcgctcgcagcgcaggtcgacgccgcccgcaacgcgctcagccaagccgacaccgactacacggccgccaaaacacagtccgataacctccaccgcgaactcgaactggccaaccagctcgcctacacgtcctgggagcgcatcgacatcgccggcgcgcaacggaccatcacggacacgcaggacgccatcgcatccatcaaaaacgatcccaagctcgccgaactcgccaaacagcgcgacgaactgaacgccgaactcgaccgtgtggaacgccagcgcatcgaatccgaccaggccgcggcccgcgccggcagcgccgtcgaagcggcgctcatctggctgcgcgaccatgccgacaccggcacgacggacgccgccggtgccaccgccgacaatgacgatgacgccgcgtccggcccgctgccggacgaagtcacggcggcgctcgccgaatcctacgacaaccgattcgccggactggcggacgccgccatgcgcgcgcacatgatcatcggcgcgggcgcggcaggaacgcaggcgccgggggagagcttccccgaacgcaccatcgccggcatcggcaaggacatggcctcccgcatcaacctgctgaacggccaggccgatgccgcacgcaccggcgtcgaatcgaagatgagcacctacatcgcgctctacgcggccgacgatgattcgctgaccgccagcgtggaggactaccggtactatctcgacgaactcgccagcctcacccagctggccgcggttgccgccaccgacgccgaataccggcgctgcctcgaacagctgctcaggagcttcctgaccatcaaacgcgccatcgacacggatgccagcgacatccacgaccagcttgaccgcatcaacgccatgctcaaaggccagcagttcggtcccaagcacggcagcctgtccctgcacgcggacgtgcgccgtcccgagcgcaccttctgggcgcagctcatccgcgtcatcggcaccctgaacgattggaaatccgccgacgtcaacgattccgacgcctcgcgcaaggctttcgcggcctgcgcgccgatggtcgggctgctgcgcgccgaactcgcgcaggtcaaggacgcgaacggcgtgaaaagctacggcgcccgcaacctcgacccgcgctgccgctcgtccttctacgccatcgtgcatcatgccgacggcccggatgaacgcatcacctccaccggcggccgttcgggcggcgccttgcaggagctcacctcattcgtatacggcgcggcgctcatctacctgctcggcggcggcctgaccagcgagccctcgtacaccacgctgttcctcgacgaggcgctcatcaaggccgacggccgttacacgcagcgcgccctcacggtgctgccgcgcctcggattccaggtcatcgtctccgctccggaaagcaagaccggcgaaatcctcgaggtctccaccaaggcctacgtgacctacaaggaccccgacaccggcctcacctccctgcgcgaggccgtgctgcatcagaatgacatggacgatgaatcatcgtcggatatattgaaggatgacggggttgccgaatga

SEQ ID NO: 41631 - DNA, 1194 bp, Bifidobacterium longum subsp. longum ATCC 55813
atgggaactatggtcggcatgaaagacatcgctgcgatcaccacatgcgtgaagaaacatatgcgttcacatatgtacgacatcgaaccggcatggccatttcccgtgccggtgggattgccggaccaagcatttttggaaaccaatgcgattgcggtgcatgacaacaacaatgagatacggcaatgggcaagcaagaatggttgcgaaatcataaccaagcatcgcaccataggcacctctgtcgagctgatctccaaagtcgtcgttcctgacgaatcaatagccatgcgtgtggttggtcgtacgctggcggcggaatgtcgcgaagcgcgccgccgcatagcatgtctggttgctgcttgtgacgttgctccggaaacaatcgaatcggccgctcgcatgacaggccatgaacagcctgacgacttcgatctgcttgtcagcgcagttcgatatttcaggcatcatgacgtgaccggtatgacgccgcgacagattccactgacaggattcagcggcaaatggctgaatgagtcaaaaaccaatcgtcgtaaggccatttgccgactgctcggtgtcgaaacgttgggtctgtcaaaacggccgaccgaactgcggttccgttatctcgatccggtccgcgacgatgctgagctcgaacgcatcatatggtgtccgtgggaaggcgaagcgttatccggcattaaatatgctgtcatcgttgagaacaaagacacgtatcagactatgccgccgattgcgcagggcatctgcatatggggttctggtcgcgctgtaagcgatgctgtacctgcggttcctgcactgcgtgacatgcgtatcgtgtattggggtgatatggatgcggatggactggaaatactttcgacattacgtgaatcaggtatcgaatgcgactccatcctgatggattgcgatgcatacgatcggtaccacagatttggtaccgatcgtactgaacgcagcgcgaagattgctatgcgggagcctaagccgacgcccggccttcaatcggcggagcgacgtctttatgaacgactgtgtgctgacaaaacaatcgcttatcggcgtatcgaacaggaacgcattcccatgcgtgatgcagttgacgaattacgcaagcttggcatccccgtggagtccattgaaaatcaggatttgccgatttag

SEQ ID NO: 41632 - DNA, 1533 bp, Xylella fastidiosa 9a5c
atggaccatgccaccctgaccaccttgcgtgagaggcaccccgcctggcggttactgacctcaccgcatgcaccgctggtcgcaagctttctgcaccgcgtgttcgtcgcaccaaacgcgcgcatgatcagcgaaaccaagatcacccaggcactggaagacacgctgtatgcgctgcgtgaacacgaaggaccggaagcctacccgaagggcgccctggactacctcaatgactgggccgcacccgacaaaggctggctacgcaagttctacacaccaggcacggatgaagcgcagttcgacctcaccccggccactgaaaaagccatcctctggctgctatccctcacggaacgctcatttgtcggcaccgaatcgcgcttgctgacactgtttgcgctgctggagcaaatgagcaccggcaccgagaccgacccaatcaagcgcctggacgaactgcgcaagaagcgcaacgcactggacatcgaaatcgcccacgtcctggcaggggatgcaccgctgctggacgacaccgcagtcaaagaccgcttccagcaattccagcaactggcgcgtgagctgctgttcgacttccgccaagtgcaagacaacttccgccaactcgaccgcaaggtacgcgagaaaatcgcactgtgggaaggcaccaagggcgcgctgctcgacgaaatcatgggcgagcgcgatgccatcggcaattctgaccagggccgcagcttccacgccttctgggacttcctgctctccagccggcgtcgcgaggaactctccgagcggctggaccaggtgctagcactgcccgcagtggcggcgctgcatccggaaccgcgtacccgttacgtacactacgactggatagacgccggcgcacaaacccagcgcacgatcagccaactatcgcagcaattacgccactttgtggagagccgagcttttctggagaaccgccgcattctggacctgctgcacagcattgagcgcaacgcactcggcctgcgtgacataacaccctccgacacagtgatgtatctggatgcgatcggggcggacattcaactgccgctggagcgccccttattcaccccacgcgcaaagccgcgtctggctgatctggtccttgtggccggtacagacgacatcgacaccacccccttgtttaaccaaattgtgatggacaaagcacgcctgcgcttagccatccaacgcgcactgcacacccaatcgcagatctccctgcgcaccctgttgcaaaccgagccactgcaacaggggttggccgaactggtcgcctacctggagctggcccacaccagcaacagcaatgatccggacggtttgcgcggcatcgtcgacgaaacggtagaagagccgatccgctggcaggccaacaataccgtgggtgagacagtcacccgccaagcacgcttaccccgcatcatcttcgcgcggcgtgccctctcagatcatcagaaatcatcacaaggagacagagaccatgaaggacacgctgtatga

SEQ ID NO: 41633 - DNA, 3435 bp, Xylella fastidiosa 9a5c
atgcgtgagacctccacactcggcctaaatttcgttgccgacgacaagcgcgtcggcttccggctacagcacctagaagtagtgaactggggcaccttcaacacccgggtgtggtgctacaccctgggcgggcgcagcggcctgctcaccggcgacatcggttcgggcaagtccacgctgattgacgccatcaccaccctgttagtgccagcgcagcgcgtggcctacaacaaggccgccggagccgatgcccgcgaacgctcgttgcgctcctacgtgttgggctactacaagagcgagcgcaacgatgccaccggcactgctaagcccgtggcactgcgcggtacgtcgaactactccgtcatcctcggcgtcttccacaacgtcggctatgacaaggtcatcaccctggcccaggtcttctggctgaaggactcgcaaagccagcccgcccggctgttcgtggtggcagaacgcgcccttggcatcgccgcggacttcaacaacttgggcggcgacatcaagaccctacgtaagaagcttcgcggtgcagggtgcgaggtgttcgacagcttcccaccctacggggcgtggtttcgccgacgcttcggcatccaacacgagcaagcgttggagctgttccaccaaaccgtctcaatgaagtccgtgggcaatctcaccgacttcgtgtgcagccacatgctagaaccctgtgatgtgggcagccgcattgaggcgttgatctgccacttcgacgacctggaccgggcgcatcaagccgtgctcaccgccaagcagcaggtgaagttgctcgtccccctggtcgacgacgtccagaagcaccagacgcagctagccagcattcaagccttggaggctggacgcgacacactgcggccctacttcgcacagctcaagggggaactactgaagcaccgcctggacgcactggcagccgaagcggcccagctaactgtggagatccagcacctggaagaacagcgcaaggccgcagacagtgaagtcacccaactgcgacaggcactgcgagacaacggtggcgaccgcctggaagaactggcagcagagattgagcaactggagcaagccaaggcacaacgccaaaagaagtccgaccgctaccaaacgttactgaccaagattgacgagacagcgccagccgatgcaataggcttcctcacccagcaacagcgctttgcgcaacataccgaggaattaaacgcagccattgagaggttgcataacgacaagagcgaaaaggatcgtgctctctacgatgctcgggaaaagcacaccaccctattggcagaaatcaacagcctgcaacagcgccagagcaacatcagcgccgcccagatccgcatccgtcatgatctgtgtatggcattgtccattgatgcggaggcattgcctttcgcaggcgaactcatccaggtgcgtaaggaggacgcacgcaattgggaaggcgccgccgagcggttgctacatggctttggcctcaccctgctggttccggacgcgcactacaaggctgtcgccacgtgggtgaacaaccagcagttgcagggccgactggtgtacttccatatgcgtccacgcaatacgacgcaggaggcggcgttacatgcgcaggcgctggtacacaagctcatcatcaaaccggagtcaccacactacacgtggctgcaacaggaacttcagcggcgctgcaacgtcgtctgctgtgacaccatcgagcagttccattgtgaggcccgcgccatcacgcaggccggccagatcaaggaccccagtggccgccatgagaaggacgaccgccatcgcattgacgaccgcagccgctacgtcctcggctggagcaatgccgacaagctgcacaccttgaacgcgcaacggcaacacctggaagacagcatgggcatgttgggacaagacatcggcaccattcaacgggaatgccagaaacaacaggaacggctggatgcactcaacaagctgggggagtacccggagtttgcggacatcgactggatgagcctggtccgccagattgccggacgcaaaaaggaacaggaacagctccaagccacatctaacattttgcaaaccctgcaacagcaactcacagcggcgcagacgcaagtcagcgtgctggagcgcaagtgcaagaacgcgtggcacgagcagggcgaggtcaagagccaacaaaaaacggcgcagcagatgtggaatcaggcccgtagcgtttgggatgatgcgccgctgagccaagcgcagatcacgctattggctggctggcgccagcaagcgctgggggagcacgtgctatcggtcgaatcttgcgacaaccacgagcagcaagttcgccaatggctacaaaaacgtatcgatgcggagaacgctcacctgagacaactaaatgaccgtattacaggcgccatgcaccgcttcaagaatcagttcaaggctgagaccgtggagatggacgcagacctggcggcgctgccagagtatgcgcggatgctcaacgacttgcagaaggacgacctgccccgattcgaagcgcgcttcaaagcactgctgaacgtgaacaccatcaacgagatcgccagctttaacgcccaactcaaccgtgagcgggagacgatcaccgagcgcatcaaggacatcaaccaatcgctgcacggcattgactacaaccaggatcgctacatcaaccaatcactgcacggcattgactcccaaaaggggcgctacatcacgctgctggcacaacccagcccagacgctgagatccgcgacttccagcaagatctacgggcatgtaccgaaggcacgttgaccggttcggacgatgaacagtattcggacgccaaattcctccaggtcaagcgcatcattgaccgcttccggggccgtgaagggctgtcggatgccgaccggcgctggacggccaaggtcaccgacgtgcgcaattggtttgtgttttcggccagcgagcgctggcgcgccgatgaaagcgagtacgagcactacgccgactcgggcggtaaatctggcggccagaaagaaaagctggcctacaccgtgttggcggcaagcctggcctaccagtttgggctgaagtgggatgaggtgcgttcagaatcgttccgcttcgtgattattgatgaggcgttcgggcgcggctcggacgagtcagccgagtacgggctgcgcctattccaaaagctcaacctgcaattgttgatcgtgacgccgctgcagaagattcacatcattgagccgttcgtctccagcgtggggttcgtgcacaacaagggcgggtgtgactcgcagctacgctgtctgtcgattgaggagtaccagacggagaaagccaatggaagcgcggcgggaggcgccgcccgatga

SEQ ID NO: 41634 - DNA, 1206 bp, Xylella fastidiosa 9a5c
atgagttgggccacaccagccagtctgtgcgcccaggtggaacgcctgtggaagcggggcgacttgctgcgggcgctggtcacggacacccacgccatgacgtggccgcaccgcctgacgctgcagacgcccagcgctgcggatctgtccaaccgcttccaggcggtgcgtgattgggtgcagaccatcgctgacaccccgcagattcggatccaatggggggaatggaaccaccgcgtccaagggacacaacggtttcctgaggccgtctatctgaacaccctgcaagcggccttggccttcatcggtaagacgcatcaagcgcagcagtttgaagcggtgtggcagcagaccgcagccgcgcagcccgtgctcctggcgtggttgttacgacgcccgatccaggcgctgaacgtggccgaccgctgggaacgtcttttagccgtcatcgcctggcttcaggcacatcctcgtccaggcgtctacctgcgccaagtggatgtgcccggagtggacagcaaattcattgagacgcacaaaagcgtgttgaccgcgctgctggacttggcgttgccgccagagagtatcgacacggccgccagcggcgtgcgtcagttcacgcgccgcttcggcttcctcgacaagcctgtgccgatccggtttcgtctgcttgacgccgcgctgcccggcctgccgggctgggcagggctgccggacatcagcctagacgcggctcacttcgcggcactgacgctccctatcacgcgcgtcttcatcatcgagaacgaaatcagcttcctcaccttccccaaggtggccggtgcgatcgtcatcttcggcgctggctacggctgggaacagctggcacgcgccgcgtggctgcatgcctgccaactgcactactggggcgacatggatacccacggcttcgtcatccttaaccggctgcgtggctactttgggcacgtgacttctgtgctcatggaccaagacacattgttggcgcatcgcgtgcactgggacgaggaatccaagccgacacgccaggccttggagcacctcaccacggaagaggctgccgtctacgatgacctgcgatacgatcgccaccagcccaggctgcgcctggagcaggagcggattggctttcactgggtgtgcgatcggctggcctgcttgctctcagcaccaccccaggatgcgtaa

SEQ ID NO: 41635 - DNA, 1470 bp, Xanthomonas campestris pv. campestris str. ATCC 33913
atgaagcatcaggcacggattgccggctaccgccacttgcgcgaccagccggcgtggaaattgctcgccgccgatcacgcaccggagctgatcggcctgctgcagaccctgttgatggacggcgaacgccggctgccatcggcggtgctgcatgcgcgcctgcagcgccagctggatgccttgcgcggcgacgaactttcccgcgagctgccgcgcaccgcgcaggcctacctggcgcactggctggcgcagggctggctggaacgccggctgcccgaaggcgcagccgaagaagaatacgaactctcgcgtgccgccacccaggccatccgtttcatcgccggcctgcgcgagagcggcagcagcgccaccgaaagccggctgtcgctggtgatccagcagctggtgcaactggccggccagaccgaagccgaccctgacgcgcgcctggcagcactacgcgcagagcgcgagcgcatcgatgccgagatcgagcgggtggccgccggccgcgtcggtgcgctggacggcaagcgcgcgctggaacgcacccgcgacctgatccatctctccgatgaactggccgaagatttccatcgcgtgcgcgatgacttcgaacaactcaaccggcaatttcgcgaacgcatcatcgacgacgaaggcgcgcgcggcgatgtgctggagcagttgttcaacggcgtggacgtgattgccgacagcgaggccggacgcaccttcgaggcgttctggagcctgctcaacgacacccagcagagcagccagctcgatcaggcactggatgcgctgctggcacgcggtttcgcccgcaagctcgaccgccgcgaacgcgccttcctgcgcgggttgaccggcacgctgctggagcgcggcggcgaagtgcacacggtgatgcagcacttcgcacgtagcctgcgcgggttcgtgcagagccgcgggtatctggaacagcgccggctcaaccaattgctcaagcaggcacagggcgaagccttgcacctgcgcgagagcctgcacgccaccaccgccaccggctacacgcaggcattgagcggcagccgcctgcgctcgttgtcgcagtggcgcctgcacgacccgcgcctcacccaggtcgatggccgcgtgtacgcggccgacgcggcagagatctcgctggacagcgtgggcgatttggtcgcgcaatcggagatcgacgtgcgcagcctgcgccgcgatctgcacgcgctgctcggcgagcgcccgcggctcaccatcggcgatgcgttgcagcagcggccggcggtgcaggggctgggcagtgtgatcggctatctgtcgctgggcacgcgccacggcctggtgatcgatggccacatggaaacggtgcaatgggaaggcggcgacggcacgttgcggcgcgcacgcattcctttggtgtggtttacccgggagaaacgcaatgaactggtctga

SEQ ID NO: 41636 - DNA, 708 bp, Xanthomonas campestris pv. campestris str. ATCC 33913
atgaactggtctgagcaggcagcgctggatgcgcacgacgacgatgacgccgacgcacacgccagcgcgctgaggctgccggccagcgatgccgccagcgccgcgcagggcggcgcgttgttcctcggcgacaccggtacgctgccattcgatgcgcgccgcgcgctgtgccagctgttggccggccccagcatcgacgcgcagcggcacggcggtttgtggcctgcgctgctacgcaacgaggtggcagtacgccaggtgctgtgcgaactgttcctggagctggtactggaccgcgaaggcggagtggcgttcacccgccaggccgacaccgccgagctggaatcgcccaccttgctgcgcagcgcgccgctgaccttcatcgagtcggtgctgctgctgttcctgcgtcagcaactggccgaagccgatacgcgcggcgagcgcgcggtggtggacgaggcgcagttggtggaggcgttgtcggtgtacgaaaagaacgtgtccaccgacagggccgggtttacgcggcgggtgatgacggccatcggcaagatgcgcgagaaccagttgctgtcgcggttgcgcggcagcgaggagcgttacgaggtgtcgccggtgttgaagttgttgttctcggccgaggatgtgcaggcgttggtggtggcgtatcgggagttgcgcgagggggaggttgctgcggattga

SEQ ID NO: 41637 - DNA, 4017 bp, Xanthomonas campestris pv. campestris str. ATCC 33913
atgaattcccagtccaacctgtcgccggcgtcgccgggtgcttccttgtttgccgagacgctggctgagcagcgtgcgcagcagtttcgtatgcggcgtttgcaggtacacaactggggcacgttcaacgggttgaccgaggtgccgatcgcggagaagggcttcctgttcgtggggcggtccgggtctggcaagtcgacgttgctggatgcgatgtcggcattgctgacgccaccgagcatcgtggacttcaacgcagccgcgcgcgaggccgagcgcagtgggcgcgaccgtagcctggtgtcgtatgtgcgcggtgcctgggccgatcagcaggacagcgcgtccggtgagatcgccacgcagtacctgcgcaagggcgcgacctggacggcgttggtattggagtaccgcaacgcgcaaggcgaggcggtgagcctggtgcggctgttctggatcgccggcagcggcaatgccgcggcggatgtgcggcggcattacatggtggtgccgcgcgcgttcgatgtggccagcgagctggagggtttcgatctggatctgcgcaagctcaaggcgcggctgggcgaggacgtggcgcatttcgacggtttcgccggctatgcagagcgcttccggcatgcgttgggcatcggcaacgacatggcactgcggctgctgcacaagacccagtcagcgaagaacctcggcgatctcaacgccttcctgcgtggcttcatgctcgatgagccgcgcaccttcgaagcggcagaccggctggtcgaagacttcgccgagctcgatggtgcgcaccatgcagtggtcaccgcgcgacggcaggtggaaacgctcagcccggcgcgcgagcaccatgccgcgctgatggccttgcgccgcagcgttggcgaattgcgtgaattgcagctgggcgtggacagctaccgcgagcaacaacggctggccttgctggaggcgcgcctgcaggaggtcgacagccaggaccgcggcctggccggcgaagaaggccagcgccgtgagtcgttggacaaccacgaacagaaactggccgggctggagcgcgaacagcgcgccgccggcggtgagcagatcgaagaactcgaacgcgagcgcgtgcgggtggaacgcgagcgcgatgagcgcctgcgtcgccgtgcgcagatcgagcaggcctgccgccagctcggcaccgccttggcggccggcgccagtgggttcgccgcccaggtggcgcatgcgcagggagtgctcgatggcggcaagcagcacgccagcacactggacgaggccatcgccgagcgcatgggtgaacgccgcgacgatgagcgccgctttgccgagatccgtgcagaactggacgcgctaaagaaagcgccgtcgagcatgcccgcaccgatgcaggcgctgcgcgcgcggctgtgcgacgacaccggcattgccgaatccgcgctgccttttgtcggcgagctgttgcaggtgcgcgaggaccaggtggcctggcgtggcgcgatcgagcgcgtgctgcacggctttgcgcagtcgctgttggtggacgagcggcattacgcgcaggtcagcgaatgggtcaaccgcacccacatcggcacgcggctggtgtacttccgcgtgcgccgcaatgacgagctgcattcgcgccgtgtcgatcccaacgcgctgcccggcaagctgcaactgcgcgagcatgccttcaccgagtggctgcgcaacgagctcacccgtcgcttcgattacgcctgcgtggacaacgccgcagcgctgcgcaatgccgaccgcgccatcacccgcgagggccaagtcaagcatcccggcgaccgctacgaaaaggacgaccgccacgccgtcaacgaccgcaagcgctggctgctcggtcacgacaaccgcgacaagctcaaggtcttcgagcgcgaagcgcaggcgctggcccagcgcattgccagttgcgacgccgacgtggccgcgctgcgcaagcaacgcgagcaggaccaggaaaaacggctggccgcgcacaccctggtggagcgcgactgggacgagatcgacgtcggccccaagctgcaacgcctgagcgatatcgatgaacaactgcagcaactgcgcgaaggcgatagcggcctgcgcgcactgggccaggcgatcgacaccgcgcgcacgctgcgcgatcaggccaagcgcacgtatgaagacgtgcggcttgagcgcgcgcagctggcacgcgagcgcgtgcgactggaacagcagcaggccgcctgcgccggccgtgccggcaccgctgcgctcacacccacgcagttgcagggcctgcaggagcgcctggccgcgttggcgccgctgtcgctggacactctggaagcgcatttccgtgtggtcgaacgtgggctggccgagcaactggccgaaagccagggccgcgacagccggctcagcgcgcagctgctcgaatgcttccgccggtattgccagcaatggccagaagacagcggcgacttcaccgtgagcctggccagcgccgacgatttcctcgcgcggctggaccggctggaaagcgatggcttgccgcgtcacgagcaccgcttcttcgacctgctgcagacccagagcaagaacaatctgctcgccttgcagcgccacaccgccgaagcccacaagggcatcaagcagcgcatggacgaggtcaacgccagcctggagcaggtgccgttcaaccgcgacaccatcctgaccatcgaggtcagcgaccgccgtctggccgaggtgcaggaattccagcagcagctacgcgccgtgttgtcgcatcagcagaccgaagaccgcgcgctggccgaagcgcagttcgccaccttgcgcacgctggtggcgcggcttggcgcgcaggagccggaggcgcggcgctggcgcgagcaggtgctggatgtgcgcctgcatgtggaattcatcggcgtggagctggatgcacagacccgcgcgcaggtggagatctaccgcagtggcgccggcaagtccggcggccagcgccagaagctggccaccacctgcctggcggccgcgctgcggtatcagctgggtggcgaagacggcgaattgccgcgctattgcgccgtggtgctggacgaagccttcgacaaggccgacaacgaattcaccgcgctggcgatgaacatcttcgagaatttcggcttccagatggtggtggccacgccgctgaagtcggtgatgacgctggagcctttcatcggcggtgcgtgtttcgtggaaatcagcggccgccacaattccggcgtgttgttgatcgagtacgacgaacaggcgcagcgcttgaaactgccggagcgctcgcgtggggaagaagcggcggcaccgccggccgaacaggggggcgctgtggcaccaggcgagcgcgcagaacgtgctccggtgatcgctgtggagtctggccacgcggcaagcgtgcacctagcggagaccacggcagtgcttgtgcagggcgatgcagtcacggacgggcagtcgcgcggccacaagcgcacacgcgcggcggccaccgcatcgacggcggcgccagtgcctgcgcccgctggcaagcgcagcacgtctgcagctgcaacatcagcgacggccgcgccagccacgggcacggcggacgcgtcgaacgcacggcgcaaacaggctgcaacccctgacacgccaccgaagccaaccaagccggcgagcacgcggtctgggtcctccggcacgcccgctgccaagcgcacaaccaccgcgaaagccgcggccgtgctgaaggcctccaacgccacgccggccgttgcggccaagcgcacgggcaaggcgccgaaacgcgtgagcaagccagcatcagctcagcaggtggccaaaccggtatcgaaatccaagcccacggccaagcccgcgacggcggcttccgccaagagccgcgtcgcgtccacgcgcggctctgctcccaaggcgcgcagcaaacgctga

SEQ ID NO: 41638 - DNA, 1470 bp, Xanthomonas axonopodis pv. citri str. 306
atgaagcaccaggcccgtatcgccggctatcggcaactgcgcgagcagccggtatggaaactgcttgccgccgaccacgcacccgaactgatcggcctgctgcagacggtgctgatggatggcgaacgccgcctgccttcggcggtgttgcacgcgcgtttgcagcgccagctcgacgccttgcgcgccgacgagctctcgcgtgaactgccgcgcaccgcacaggcgtatcttgcgcattggttggcacagggctggttggaacgccgcctgccggaaggcgcagccgaagaagaatacgaactctcgcgtgccgcgacccaggccatccgcttcatcgtcggcctgcgcgaaagcagcagcagcgccaccgaaagccgcctgtcgctggtgatccagcaactggtgcagttggccggacagaccgaagccgatccagagctccggctggccgcgctgcgcgacgaacgtgcgcgcatcgatgccgagatcgaacgcgtggcctccggccgcgtggcggcgctggacggcaagcgcgcgctggaacgtgcacgcgacctgatccatctctccgacgagctggccgaagatttccatcgcgtgcgcgacgacttcgagcagctcaaccgccaattccgcgagcgcatcatcgacgacgaaggcgcgcgcggcgacgtgctcgaacaactgttcgacggcgtggacgtgattgcagacagcgaagccgggcgcaccttcgaggcgttctggagcctgctcaacgacacccagcaaagcagccaactcgaccaggcgctggatgcgctgcttgcccgtgggtttgcccgcaagctcgatcgccgcgaacgcgccttcttgcgcgggctgaccggcacgctgctggagcgcggtggcgaggtgcacacggtgatgcagcatttcgcgcgcagcctgcgcggtttcgtgcaaagccgtgggtatctggaacagcgccggctcaatcaattgctcaagcaggcgcagggcgaagccttgcaattgcgcgacagcctgcacgccaccaccgccaccggctatacgcagccgctcagcagcagccgcctgcgctcgttgtcgcaatggcggctgcacgatccacggctcacccaggtcgatggacgcgtgcaggccgccgacgcggccgagatctcgctggacagcgtgggcgatctggtcgcgcaatcggagatcgatgtgcgcagcctgcgcaacgacctgcatgagctgctcggccaacgcccgcggctgaccatcggcgacgccttgcaacaacgcccggccgtgcagggcctgggcagcgtgatcggatacctgtcgctgggcacgcgccacggcatggtgatcgaaggacagatggaaacggtgcaatgggaaggcagcgacggcgccgtgcggcgcgcacgcattcccttggtgtggtttacccgggagaaacgcaatgaactggtctga

SEQ ID NO: 41639 - DNA, 633 bp, Xanthomonas axonopodis pv. citri str. 306
atgccgatggcgcaaacatccagtgccgagccgcgcggcgagctgtttttgggcgacaccggcacgctgccgttcgatgcgcggcgtgcgctgtgccagttgctggcagggcccagcatcgatgcgcaacgtcacggcgcgctgtggccggcgttgttgcgcaacgaggtggcgatccgccaggtgctgtgcgaactgtttctggagttggtgctcgaccgcgagggcggggtggcctttacccgtcaggccgacaccgcagagctggaatcgcccacgctgctgcgcagtgcgccgctgacgtttatcgagtcggtgttgctgctgttcctgcgccagcaactggccgaggccgacacgcgcggcgagcgtgcagtggtggacgaggcgcagttggtggaagccttgtcggtgtacgaaaagaacgtatccaccgatcgggcgggcttcgcgcggcgggtgatgacggcgatcggcaagatgcgcgacaaccagttgctgtcgcgcttgcgcggcagcgaggagcgctatgaagtgtcgccggtgttgaagctgttattttcggcagaagatgtgcaggccttggtggtggcgtatcgggagctccgtgagggcgaggttgcgctggattga

SEQ ID NO: 41640 - DNA, 4023 bp, Xanthomonas axonopodis pv. citri str. 306
atgaattcccagtccaatctgtcgccggcgcagccgggtgcctccttgtttgccgagacgctcgccgagcaacgtgcgcagcagttccgcatgcggcgcttgcaggtgcacaactggggcaccttcaatgggctgaccgaagtgccaatcgcgcagaagggcttcctgttcgttgggcgttcgggctcgggcaagtccaccttgctggatgcgatgtcggcattgttgacgccgccgagcatcgtcgacttcaacgctgccgcgcgcgaagccgaacgcagtgggcgcgatcggagtctggtgtcgtatgtacgcggtgcgtgggccgatcagcaggacagcgcgtccggcgaaatcgccacgcaatacctgcgcaagggcgccacctggaccgcattggtgttggagtacgcgaacgcgcatggccagacggtgagcctgatccggttgttctggatcgccggcagcggtaacgcggcggccgatgtgcggcgtcactacatggtcgcgccacgccgtttcgacgtggcgaccgagctggatggcttcgatctcgacctgcgcaagctcaaggcgcgattgggcgatgaagttgcgcatttcgacggcttcgccggctatgccgaacgcttccggcatgcgctgggcatcggcaacgagatggcgctgcggctgttgcacaagacccagtcggccaagaacctgggcgatctcaatgcattcctgcgcggtttcatgctggacgagccgcggaccttcgaagcggccgaccggctggtggaagattttgccgagctcgatggcgcgcaccatgcggtggtcaccgcccggcgccaggtggaaaccctgacccctgcgcgcgagcaccacgcggcgctgatggcgctgcgccacagcgtcggcgagttgcgcgagttgcagctgggcgtggacagctaccgcgagcagcagcggctggccttgctggaggagcggctgcaggagctggacaaccaggaccgtggactggccggcgaagaaggccagcgccgcgaatcgctggataaccacgaacaaaaactggtcggcctggagcgcgagcagcgcgccgccgggggcgagcaggtcgaagaactggaacgcgaacgcgcacgcgtcgagcgcgagcgcgacgaacgcctgcgccgccgtgcacagatcgaacaggcctgccgccagctcggtaccgccctggcggccggcgccagcggctttgccgcgcagattgcgcatgcgcagaccgtgctggataacggcaagcacgacgccagcgcgctggatgacgccatcgccgagcgcatgggtgcgcggcgcgacgacgagcgccgctttgccgaaatccgcaccgaactggaggccctgaaacgcgcgccatcgagcatgccggcaccgatgcaggccttgcgcgcgcggctgtgcgaagacaccggcattgccgaggccgcgctgccgttcgttggcgagctggtgcaggtacgcgaggaccagacggcctggcgcggcgcgatcgagcgtgtgttgcacggctttgcgcaatcgctgctggtggacgagcggcattacgcgcaggtcagcgaatgggtcaaccgcacccatatcggtacgcgcctggtgtacttccgtgtgcgccgcaacgacgagctgcattcgcggcgggtcgatcccggcgcgctgcccggcaagctgcaattgcgcgagcacgcctttaccgaatggctgcgcaacgagctgacccgccgtttcgactacgcctgcgtggacaacgccgcagcgctgcgcaacgccgaccgcgcaatcacccgcgagggccaggtcaagcatcctggcgatcgctatgagaaggacgaccgccacgcggtcaacgaccgcaagcgttggctgctcggtcacgacaaccgcgacaagctcaaggtgttcgaacgcgaagcgcagacgctggctcagcgcatcgccagctgcgatgccgatgtggcagcgctgcgcaagcagcgtgagcaggaccaggaacgccaactggccgcgcacaccctggtggagcgcgactgggacgagatcgacgtcggccccaagctgcagcgcctgagcgatatcgacgaacagttggtgcagctgcgcgaaggcaacagcggcctgcgtgcgctcggccaggccatcgacaccgcacgcaccctgcgcgaacaggccaagcgcacctacgaagatgtgcggctggagcgcgcgcaactggcgcgcgagcgcgtgcggctcgaacagcagcaggcggcctgcgcgggccgcgcaggttccgccacgctcacgcccacccagttgcagggcttgcgggaacggcttgccgcattgacgccgctgtcgctggacaatctggaagcgcatttccgcgtggtcgaacgtggcctggccgagcagctggccgacagccagggccgcgacagccggctcagcgcgcagttgctggagtgcttccgcaagtattgccagcaatggcccgaagacagcggcgatttcaccgtgagccttgccagcgccgacgatttcctagcgcgtctggaccggctggaaagcgatggcctgccgcgtcacgagcatcgtttcttcgacctgttgcagacccagagcaagaacaacctgctggccttgcagcgccacaccgccgaagcccacaagggcatcaagcagcgcatggacgaggtcaacgccagtctggagcaggtgccgttcaatcgcgacaccgtgctgaccatcgaggtcggcgaccgccgcctggccgaggtgcaggaattccagcagcagttgcgcgcggtgctgtcgcatcaacagaccgaagaccgtgccctggccgaagcgcagttttccaccttgcgtgcgctggtggcacgcctgggcgcgcaggaaccggaggcacgccgctggcgcgaacaggtgctggatgtgcgcctgcatgtggagttcatcggtgtggaactggacgcacagacgcgcgcgcaggtggagatctaccgcagcggcgccggcaagtccggcggtcagcgccagaaactggcaaccacgtgcctggcggccgcgctgcgttaccagctcggcggcgaagacggcgaactgccgcgctactgcgcggtagtgctggacgaagccttcgacaaggccgacaacgaattcaccgcactggcgatgaatatcttcgagaacttcggcttccagatggtggtggccacgccgttgaagtcggtgatgaccttggagcccttcatcggtggtgcgtgctttgtcgaaatcagcggccgtcataactccggcgtgttgctgatcgaatacgacgagcaggcacagcgattgaagctgccggagcgctcgcgcggcgatgagccggcagttgccgatgccactgacgctgcgccgtcgatcgaggctgcggccgagtcagcaggagtgcagggcgctgcaagcgcagatggcatggcaaccaacggcgtcccaatgcacacggcatcgcctgcgacggaggagaccccgcccgcagcgcaggaaacgcagactggtcagcgcaagccggcagtcgcgacgacgagcaagcagaacaagaccgccaagaccgcatcttccacgcgcgctgcggcacagcctcaagcaaaacgcccgaagaaatcgccttcgcgcactcctgctctggctggcaagccggcatcggacaaacgcccagcgggcgtgccggcggtgtcgtcaggagtcgcatccaggtccaacgtgggcaagaccactcggtcttcaaaaacgccgggcaagccgattgcggccacaagcgcatccaacgccacatccaggaaggtcgccgccgcatctgcggcattgaaaactgccgcagccaagccacgtgcaacagccgcatcgactggtcagccagcgcgcggcgccggcaagacaacctcgacgcgcgcggtggctaaaccgtcaccggccacaacgcgcggcgccaaggcaggcgccccgcggtcgcgcggcaagcgctga

SEQ ID NO: 41641 - DNA, 1542 bp, Xylella fastidiosa Temecula1
gtgaccgagatggaccatgccaccctgaccaccttgcgtgagcggcaccccgcctggcggttactgacctcatcgcatgcccccctggtcgcaagctttctgcaccgcctgttcgttgcaacgaacgcgcgcctgctgagcgagaccaagatcacccaggcactggaagacacgctgtatgcgctgcgtgaacacgaaggaccggaggcctacccgaagggcgccctggactacctcaatgactggtccgcacccgacaaaggctggctacgcaagttctacacaccagacacggatgaagcgcagtttgacctcaccccggccactgaaaaagccatcctctggttgctgtcactcacggaacgctcatttgtcggcaccgaatcgcgcttgctaacactgtttgcgctgctggagcaaatgagcaccggcaccgagaccgaccccaaaaagcgcgtggaagaactgcaaaagaagcgcgacgcactggacatcgaaatcgcccacgtcctggaagggcatacaccgctgctggacgacaccgcgatcaaagaccgcttccagcaattccagcaactggcgcgtgagctgctgtccgacttccgccaagtgcaagacaacttccgccagctggaccgcaaggtacgcgagaaaatcgcactgtgggaaggcaccaagggcacgctgctggacgaaatcatgggcgagcgcgatgccatcagcgattctgaccagggccgcagcttccgcgccttctggaacttcctgctctccagccgacgtcgcgaggaactttccgagcggctgggccaggtgctggcgctgcccgcggtggcggcgctgcatccggagccgcgtacccgtcgcatccacgacgactggatagaagccggcgaacaaaccctgcgtaccatcagccaactatcgcagcaattacgccactttgtggaaagccgagcttttctggagaaccgccgcattatggacctgctacacggcattgagcgcaacgcactcggcctgcgcgacatgacaccctccggcacagtgatgcacctggatgcgatcggggcggacattcaactgccgctggaacgccccttattcaccccacacgcaaagccgcgcctggctgatctggtccttgcggccggtacagacgacatcgacaccacccccttgtttaaccaaattgtgatggacaaagcacgcctgcgcttagccatccaacgcgcactgcgcacccaatcccagatctccctgcgcaccctgttgcaaactgagccactgcaacagggtttggccgaactggtcgcctacctggagctggcccacaccagcaacagcagtgatccggacggcttgcgcggcatcgtcgacgaaacggtagaagagccgatccgctggcaggccaacaataccgtgggtgaaacagtcacccgcgaggcacgcttaccccgcatcatcttcacgcggcgtgccctctcagatcatcaggaatcatcacaaggagacagagcccatgaaggacacgctgtatga

SEQ ID NO: 41642 - DNA, 714 bp, Xylella fastidiosa Temecula1
atgaaggacacgctgtatgagagtgatgtcgtagcgaccccacgcaacgcactgccgacagtgcccaaactgtcacacctgatggtgtacttgctcaaaggggtgctgtaccgcaaccaagaagaacgcctatggtccagcttgctgcgcctacagacacaggtcagagaacacaccgccgtgctgtggctggatctagtactggacgaagccgaaggctacgccttcctaaagagccgccccgacccggacgccgccgaaggcagtgcccgcccgcctcggctgatcgtacgtcgcgcgctgccctacaaggtgagcctgatgctggcactgctgcgcaaacgcatggcggagtccgatgcgcgcggcggtgccccccggctggtgctgacacgcgaggagattgccgaactgatgcgggtgttcctgcccgacgccaccaacgaggcacggctcattgatcagctcgacacgaccatcaagagggtggtcgagctggggtttttgcgccccttgccctccccctccagcagcacaccaaaccataacaactacgaagtaagccgcatcttgaaagcctttgtagatgcccaatggctggccgaattcgatgcacgcttggaggcctatcatgccgtgccatcggacgatcaagacgatcaagacgaacctgacaccacgcctgaagcacaaggggagtcaggcgatgcgtga

SEQ ID NO: 41643 - DNA, 3432 bp, Xylella fastidiosa Temecula1
atgcgtgagacctccacacttggcctaaatttcgttgccgatgacaagcgtgtcggcttccggctacagcacctagaagtagtgaactggggcaccttcaacacccgtgtgtggtgctacaccctgggcgggcgcagcggcctgctcaccggcgacatcggttcgggcaagtccacactgattgacgcaatcaccaccctgttggtgccagcgcagcgcgtggcctacaacaaggccgctggggccgatgcccgcgaacgctcgttgcgctcctacgtgttgggctactacaagagcgaacgcaacgatgccaccggcaccgctaagcccgtagcattgcgcggcacgtcggactactccgtcatcctcggcgtcttccacaacgtcggctatgacaaggtcatcaccctggcccaggtcttctggctgaaggactcccaaagccagcctgcccgactgttcgtggtggcagaacgcgcccttggcatcgccacggacttcaacaacttgggcggcgacatcaagaccctacgtaagaagcttcgcggtgcagggtgcgagctgttcgacagcttcccaccctacggggcgtggtttcgccgacgcttcggcatccaacacgagcaagcgttggagctgttccaccaaaccgtctcaatgaagtccgtgggcaatctcaccgacttcgtgtgcagccacatgctagaaccctgtgatatgggcagccgcattgaggcgttgatctgccacttcgacgacctggaccgggcgcatcaagccgtgctcacagccaagcagcaggtgaagttgctcgcccccctggtcgaggacggcaagaagcaccagacgcagctaggcaatattcaaaccttggaggctggacgtgacacactgcggccctacttcgcacagctcaaaggggaactgctgaagcaccgcctggaggcactggcagccgaagcggcccagctaactgtggagatccagcacctggaagaacagcgcaaggccgcagacagtaaagtcacccaactgaaacaggatatgcgagacaacggcggcgaccgcctggaagcgctggcggcagagattgagcaactggagcaaaccaaggcacaacgccaaaagaagtccgaccgctaccaaacgctactgaccaagattgacgagacagcgccagccgatgcaataggcttctccacccagcaacagcgctttgcgcaacataccgaggaattaaacgcagccattgcgacgttgcataacgacaagagtgaaaaggatcgtgctctctacgatgctcgggaaaagcacaccaaactattggcagaaatcaacagtctgcaacagcgccagagcaacatcagcgccgcccagatcggcatccgtcatgatctgtgtatggcattgtccattgatgcggaggcattgcctttcgcgggcgaactcatccaggtgcgtgaggacgcacgcgattgggaaggcgccgccgagcggttgctacacagctttggcctcaccctgctggttccggacgcgtactacaaggctgtggccgagtgggtgaaccgcgagcagttgcagcgccgtctggtgtatttccatatgcgtccacgcaatacgacgcaggatgcagcgttacatgcgcagtcgctggtacacaaactcatcatcaaaccggagtcaccacactacacgtggctgcaacaggaacttcagcggcgctgcaacgtcgtctgctgtgacaccatggagcagttccatcgtgaggtccgcgccatcacgcaggcgggccagatcaaagaccccagtggccgccatgagaaggacgaccgccatcgcattgacgaccgcagccgctacgtcctcggctggagcaatgccgacaagctgcacactttgaacgcgcaacggcaacacctggaagacagcatgggcatgttgggacaagacctcggcaccattcagcgggaatgccagaaacaacaggaacggctggatgcactcaacaagctgggggagtacccggactttgtggacatcgactggatgagcctggtccgccagattgccggactcaaagaggaacacgcggagctccaaaccacatctaacattttgcaaaccctgcaacagcaactcacagaggcgcagacgcgagtcaaggtgctggaggacaagtgcaagaacgcgtggcacgaacagggcgaggtcaagagcaaacaaaaaacggcgcagcagatgtggaatcaggcccatagcgcttgggatgatgcgccgctgagccaagcgcagatcgcgctattggctggctggcgccagcaagcgctgggggagcacgtgctatcggtcgaatcttgcgacaaccacgagcagcaagttcgccaatggctacaaaaacgtattgatgcggagaacgctcacctgagacaactgaatgaccgtattacaggcgccatgcaccgcttcaaagatcagttcaaggctgagaccgtggagatggacgcagacttggcggcgctgccagagtatgaacggatgctcaacggcttgcagaaggacgacctgccccgattcgaggcgcgcttcaaagcactgctgaacgtcaacaccatcaacgagatcgccagctttaacgcccaactcaaccgtgagcgggagacgatcaccgagcgcatcaaggacatcaatcaatcgctgcacggcattgactacaaccaggatcactacatcaaccaatcactgcacggcattgactacaaaagggggcgctacatcacgctgctggcacaacccagcccggacgctgagatacgcgacttccagcaggatctacgggcatgtaccgaaggtacgttgaccggttcggacgatgaacagtattcggacgccaaattcctccaggtcaagcacatcattgaccgcttccggggccgtgaagggctgtcggatgccgaccggcgctggacggccaaggtcaccgacgtgcgcaactggtttgtgttttcggccagcgagcgctggcgcgccgatgagagcgagtacgagcactacgccgactcgggcggtaaatctggcggccagaaagaaaagctggcctacaccgtgttggcggcaagcctggcctaccagtttgggctgaagtgggatgaggtgcgttcagaatcgttccgcttcgtgattattgatgaggcgttcgggcgcggctcggacgagtcagccgagtacgggctgcgcctattccaaaagctcaacctgcaattgttgatcgtgacgccgctgcagaagattcacatcattgagccgttcgtctccagcgtgggattcgtgcacaacaagggcgggtgcgactcgcagctacgctgcctgtcgattgaggagtaccaggcggagaaaaccaatggaagcggaccgagaggcgacgcccgatga

SEQ ID NO: 41644 - DNA, 1206 bp, Xylella fastidiosa Temecula1
atgagttgggccacaccagtcagcctgcgcgcccaggtggaacgcctgtggaagcagggcgacttgctgcgggcgctggtcacggacacacacgccatgacgtggccgcaccgcctgacgctgcaggcgcccaacgctgcggatctgtccgagcgctttcaggcggtgcgtgattgggtgcaggccatcgttggcaccgcgcagattcggatccaatggcgggaatggaagcaccgcgtccaagggacacaacaggttcctgcagccgtctatctggacaccctgcaagacgcgttggctttcatcggtaagacgcatgaagcgctgcagtttgaagcggtgtggcagcagaccgcagccgcgcagccagtgctcctggcgtggctgttacgacgcccgacccaagcgctggaggtggccgaccgctgggaacgtcttttagccgtggtcgcctggcttcaggcgcatcctcgtccaggcgtttacctacgccaagtagatgtgcccggagtggacagcaaattcattgaggcgcacaaaagcgtgttgaccgcgctgctggacttggcgttgccgccagagagtatcgacacggccgccaacggcgtgcgtcagttcacgcgccgcttcggcttcctcgacaagcctgtgccgatccggtttcgtctgcttgacgccgcgctgcccggcctgccgggctgggcagggctgccggacatcagcctagacgcggctcacttcgcggcactgacgctccctatcacgcgcgtcttcatcatcgagaacgaaatcagcttcctcaccttccccaaggtggccggtgcgatcgtcatcttcggcgctggctacggctgggaacagctggcacgcgccgcgtggctgcatgcctgccaactgtactactggggtgacatggatactcacggcttcaccatcctcaaccggctgcgtggctactttgggcacgtgacttctgtgctcatggaccaagacacattgttggcgcatcgcgtgcactgggacgaggaatccaagccgacacgccaggccttggagcacctcaccacggaagaggctgccgtctacgatgacctgcgatacgatcgccaccagcccaggctgcgcctggagcaggagcggattggctttcgctgggtgtgcgatcggctggcctgcttgctctcagcaccaccccaggatgcgtaa

SEQ ID NO: 41645 - DNA, 1473 bp, Xanthomonas oryzae pv. oryzae KACC 10331
atgaaacaccgtgcccgtatcgcccgctatcgcgccctgcgcgagcagccgctgtggaaactgctggcggccgatcagtcgccggaagtgatcggcctgctgcagacgttgttgctcgacagcgagcgcggtttgcccgcggctgtcctgcatgaacgcttgcagcgcatgcttgacgatctcaatgtcgatcagctctcgcgcgagctgccgcgcactgcgcaggcctatgtagcgcactggctggcgcagggttggctggaacggcgcctgcccgagggcgcgcagcaggagcagtacgagttgtctacccaggcgatgcaggcgattcgctttgccgatggtctggagcaggcgcgtggtgccgcgaccgagagccggcttgcgctggtgatgcagcagttgtcgcagttggccgcgttgaccgaaaccaatcccgatgcgcggctgtcggcgctgcgcgacgagcgtgatcgcatcgatgcggagatcgcgcgggtggctgccggcaaggtcgcctcgttggatggcaaacgcgcgctggaacgtgcgcggcaggtgatcgcgctggccgacgagctgaccgaggattttcgccgggtacgcgacgatttcgagcagctcaatcgccagttccgtgagcgcatcatcgacgacgagggcgagcgtggcgaggtgttgacgcggctgttcgagggcgtggacgtgatcggtgacagcgaggccggacgcagttttcaagcgttctgggcgctgctcaacgatgccgaacaaagcgcacagctggatgcggcgctggagacggtgttggcgcgggcgttcgcacgcaagctcgaccgccgcgagcgcagcttcctgcgcggcttgaccggcaccatgctcgaacgcggcggtcaggtgcacgatgtaatgcagcatttcgcccgcagcctgcgcggcttcgtccaaagccgtggctatctggaacaacgccggctcaatcaattgctcaagcaggcgcaggccgaggcgttggggctgcgcgagcatctgcgtgcccagcgctcggtcgggcacgatctcaacctgaccaccagccgcttacgctcgctgtcgcaatggcgtctacacgatccgcgtcacacccaggtcgatggcagcatccagcgcaacgacgcagcggcgatctcgctggacagcgtcggcgatctggtcgcgcagtcggaaatcgacttccgcagtctgcgccgcgatctctacgaactgctgggagaacacgcacagctctctatcgcgcaggtgctggcgcagcggcaggcagagcaggggctcggcagtgtgatcggctacctgtcgctgggtacgcggcatgggcaggtggatgcgcaacgcagcgagatcgcgcgatggcgtggcggcgatggccagtggcgcggcgcacgtattccgttagtgtggttcagccaggagaaacgcaatgaattggcaggctga

SEQ ID NO: 41646 - DNA, 699 bp, Xanthomonas oryzae pv. oryzae KACC 10331
atgaattggcaggctgacaacgccgaaaccgacgcgcacgcgccgagcgcccacgccgatgcggctgtgcccgaggcggacgccgcaacaggcctgtttccgggcgatagcggtgcgttgccggtggatgcgcggcgcgtgctgtgccaattgctcgccggccccagcgtggacgtgcagcgccacagcaagttgtggccagcgttgctgcgccatgaagcggccgtgcgcagccgcctggccgatctcttcctggaattggtgctcgaccgcgacgccggcgtcgccttcacccgccaggccgacaccggcgagctcgaagcgccggtgctgctgcgctctctgccgctgaccttcatcgattcggtgttgctgctgcatctgcgtcagcaactggccgaagccgatgcgcggggtgtgcgtgcggtggtcgaagatgcgccgttgagcgaggccctggccgtctacgagaagaatctgtccaccgaccgtgccggcttcatgcgtcgggttggcaacgccattcagaagatgaaggacaaccacgtgctcacgcgcctgcgtggcgaagacaaccgctacgaggtttcgcccacgctcaagctgctgtgctcggccgaggatgtgtccgcgctggcgcagatctatcgccagctgcgcgagcagcccggcaccgtaggcgatgcagagcgcgcctga

SEQ ID NO: 41647 - DNA, 3297 bp, Xanthomonas oryzae pv. oryzae KACC 10331
atgaaatcttcttcctccagcctgtttgccgacgatctgcccgagccgcgcgtgcagcagttccgcatgcgccgcctgcaggtccataactggggcacgttcaacggcttgaccgacgtgccgatcgccgcgaagggcttcttgttcgtcggccgttccggttcgggcaaatccacgctgctggatgccatgtccgctctgttgaccccgcccaatctggtcgacttcaatgccgccgcgcgcgaggccgagcgcactggccgcgatcgcaacctggtgtcgtatgtgcgcggcgcctgggccgaccagcaggacagcgcctccggcgaaatcgccacgcaatatctgcgcaagggcagcacctggaccgcgctggtgctggaataccgcaacggcgagggacgggtgatcagcctgatacggctgttctggatcgccggcagcggtgcggcggcggccgacgtgcgcaagcattacatggtggccgagcgcagtttcgatatcgccagcgaattggtcggcttcgatctggatttgcgcaagctcaaggcgcgtctgggcgacgacatcgcccacttcgacaatttctccggctatgccgagcgcttacgccatcagttgggcatcgccaacgagatggcgttacggctgctgcacaaaacccagtccgcgaaaaatctcggcgatctcaatgtgttcctgcgcggcttcatgctcgaggcgcccaagaccttcgacgccagcgagcggctggtgggcgacttcgccgaactcgatggagcgcatctggcggtggtcaccgcacggcggcaggtcgaaacgctgctgcccgcgcgtgcgcattacgaggacttgcagtcggtgcaacgtcagcgcggccgcttgcaggaactcaagctcggcctggacccctatcgcgagcaacgccggcttgcgttgctggatgcgcgcctgcatgcactggacgtcaacgaccagggcctggccggcgaggagggccaacgccgcgctgcagtggataaccaccaacaacgcttgtccgatctggaggcccagcgccgcagccagggcggcgagcggatcgacgcgctggaacgcgagcagctccaggtccagggcgaacttgcacgccgcagcgacaagcgtgccaaggccgaacaggtctgccgccagctcgagcagactttggccgacaacgcgcatggatttgcccagcagtccgcgcaggcgcgcgccgcgctcgaggacgggcagcggctggccgccgaacaggacgaggcgatcggcgagcgtatcgccggcaagcgcgaggacagccagcgctttgcgcaggtgcgcgccgagatcgaggcgctcacccgcaatccctccaacattgctgcgccgatgcaggccctgcgtgcacgcctgagcgaagaaaccggcattcccgaagccgcgctgcccttcgtcggcgaactgatccaggtgcgtgaggaagatgccgcctggcgcggtgccatcgagcgcgtgctgcatgggtttgcgcaatcgctgctggtggacgagcgccattacgccgaactggccgagtgggtcaaccgcacgcatctgggctcgcgcctggtctattaccgggtgcgcaataacgaacaggcgttttccggccgcgaacccggcagcgcgtcgctgctgcacaagctgcaattgcgcgagcatccctttgccggctggctgcggcgcgaactgggcaagcgtttcgactacgactgcctggagagcgccaaggccttgcgcacggcagagcgcgcgatcacccgcgaaggccaggtcaagcatcccggcgaacgctatgaaaaggacgaccgtcatgcggtcggcgaccgtcggcgctggctgctgggcttcgacaaccgcgacaagctggcactgtacgagcgcgaagccattgaactggcacaacgcatcgccgcctgcgatgccgacgtggccgagctgcgtgcgcgccgcgaacgcgatgccagccggcgcctggcccagcacaccctggccaacctggcctgggaggaaatcgacgtcgccgcacagctgcaacgccgcgacgatatcgccagcgccttgcgccagctgcgcgaaggcgatgccaacctgcgcgcgctgggcgaggcgatcgagcgcacgcgcggcgacctggaacaggccaaacgcacgttcgacggtgtgcgcgaggaacggatcgcgctgggggtcgagcgcacgcgcctggaaaagcaacgcctgcactgcgccgacgccgatgcccgggtggtcacgccgctgcagcgcgaggggctggaggagcgcctggccaacctgggcgcgcttagcctggacaatctcgaagcgcattttcgccagatcggcaacgccatcgccgagcagaccagcgccagcgacagcgagcacaatcggctcgaacagttgctgctcggctgctttcgccggtatagccaacagtggcccgaagacagtggcgacttcatcatcagcctggccggcgccgaggattttcttgcccgcctgcagcgtctggaacgcgatggcctgccgcagcacgaagcgcgctttttcgagctgttgcagagccagagcaagaacaatctgctcgccttgcagcgccacaccgccgaagcacgcaaatcgatcgcccaacgcctggacgaggtcaacgccagcctggagcaggtgccgttcaaccatggcaccttgctgaccatcgaactcagcgatcggcgtttgccggaggtgatcgacttccatcaacgtctgcgtgatgtgctcggtcaccaccagaccgaccagcgtgacgtggccgaacagcaatttgccgtgctgcgcgaactggtgcgtaagctcggctcggccgatggcgaggacaagcgctggcgcgagctggtgctggatgtgcgcctgcatgtggagttcgtcggtgtcgagctggatgcggccacccgccagcaggtggagatctaccgcagcggcgccggcaagtccggcggccagcggcagaaactggcaaccacctgcctggccgccgcgctgcggtatcaacttggcggcgaagacggcgaattgccgcgctacgcggccgtggtactggacgaagccttcgacaaggccgacaacgaattcaccgccttggcgatgaacatcttcgagaatttcggcttccagatggtggtggccacgccgctcaagtcggtgatgacgctggagccgtttatcggcggcgcctgctttgtcgaaatagcggccgtcacgactcgggcgtattgctga

SEQ ID NO: 41648 - DNA, 1185 bp, Xanthomonas oryzae pv. oryzae KACC 10331
ttgatggcccccgccgcgcccatgatgttgcctgccgctgcgctgctggccttgcgcgggcagtggcagcgcgcacgcgggcagtggctgatcggcgagggcgcaccgcaggcgatcggattgcgggcgccgacccaggcacaggccatcgcgcggttcgatgccttcggtgcgtggttgcaggagtggagccgcacaggcctgccggggcgggtggagtatcgcgcggtgagctggacgcagctggggccgcagcgcctgccgcagacctgggtgctggacgatgcgggccaggccgccggcgcgcttggcgagggcgagcgctgggcgcgtgcccgccaacgcagcgctgccttgcaggcgcgctggccgcaggcggtcgcgctggcggcgcggctacgccgtcaattcgatctgctggccgactggccggaggtcgagttcgcacgcttggtggcggtggtggagtggctgcaccagcatcgcgacagtggactgttcctgcgccagcttcccatcgccggcatcgacagcaaatggatcgaaccgcatcgcggcgtcatcgccgactggcttgccggcctgcgcggcatcgccgagccgcgcagctttgccagcctgtccggcctgcgcaacgcgccggatcgggtgcgcttgcgattgctcgacccggccctgcgccaccacatcggcggcctggaggacatcaccgcaccgatcgcgcagatcgccgcgctgcgtctgcctgtgcgccgcgtgctgatcgtggaaaaccgcgaaaccggtctggcctgcgaatcgctgccgggcacgctggtgctgatggcgcgcgggtacgccgtcgaatacgtgagcaatatcgggtggctgcgcgaattgccgctgtactactggggcgacatcgacacccacggcctggcgatcctgcaccgcctgcgcacgcacgctccgcacaccaccgcggtgttgatgaatgaggccaccctgcaggccactccgcgcgcgttgtgggggcacgaacgcaggccgcaccgcgcccaacgcctggctgcgctcagcatccaggagcagcgcctgtatgcggacctgcgtgtcggccggttcggtccgtcgccgcgcctggagcaggaacgtatcgcctgggactatgcctggccgcgcatccaggccgcattggcggactga

SEQ ID NO: 41649 - DNA, 1632 bp, Bifidobacterium longum NCC2705
gtggccgatgtgatgcgggagctggaacggctgcgaccggtgtatgagacgggcgtcctgcggttgctgttgcgccagaacgcgatgctgtacgtgtcgctgctgcgttccacgttcgacccgctcaccggcgagctgccgcgcgagaccgtggaggagcggttcgcgcaaagtctgagcagtctggccgacgccggcgagtatgcgccgcgcgaggaccagaccttcgccgaggccgcccatcagatcctcgccgacctgacccgtgaaggcgaaggcgactacgcctggctcgccaactcgcatgatgcggcctcacaccgattcctctaccgtttgacggcccgcgcccaccgcgccatcgaggcgctgagcaggctcgaagacgaatcacgcgccctgtccggcgcgcaggccaacagcatcatcatggaaatcgagcacgcgcgcatgcagctgaccgccgaccccggcgagcgcatcaaactcctcaaccgtgaaatcaaggaacgcaagcacgagatcaaacgcatccaacagggcaagcagcatgccacgctgagcgaagcccaggtggaggacgtgatcgccgtgatccacaacacgctgcgcggcgtgcccatcgacctgcgcgaactcgtgctcgacgagcgggacaacggcgacgccttgcgtcggcgcatgcaggccggcgacatcagcgtggacgagaacctgacccgctaccacgatgaataccgccgctcgttccgcgaatcagacagcggccgccgcttcgaggacgccttccaggtgatcatcaccgacgagggccgccagcaaatcgacgaagccctgcgcgccatcgccaaaaccccgtatctggccggcgaatccggcgtgctgctcggccagatccgcgacgaactggcccgcatctacgacggcatcgaagccgtgcgccgccagatgcgcgtctccgacgaggcgatcagccggctcgtgcgccagcaaaccgacactcgctaccgtacgatgctcacccgcttgaaccgactgtacgcgcgcctcaacgcggatgcgaaaacccatatgggagacgcctcgcgcccgtacgacacggccacctcggacgcgctgttcgcgccattgccgatgcgcccggccaaatccatgacccgcgccaccgcacccggcctgagcgacctcgccgccgaagccccgcagtcgactccggtggccgatctgcgggacatggtcaacagcggcggcccccgactcctgcgcatggtcagcctcatccggcgcaacccggtgaccgttgacaggtccgatgacaggcccggcgcaaccctcgtggacatcgccgccagtttcaaccggctgcccgaaagcgaacgccgcgaaagcgagatcgtcggcttcctgggcgggctgggagccgtaagcggcaacgccatcgccgacgagccgtccactgacggcgtcggcgtcggggtcgacagcgacatcgccaccgagccggctccggcgcagcgcggcgatactgcgacctggcattgcgtatcgatcgacggcgagccccggaactggatcactagaccggtgctggccgacatggacgagctgagcatcattgtggaggaaggatga

SEQ ID NO: 41650 - DNA, 669 bp, Bifidobacterium longum NCC2705
gtggccgaggaacacgaggaacacgaggagcatatggacaacgccaacccgtacgccctgttcgaaggcgacatcggcgacatgccggccgaggcacgcatggccgccatcgccctcaaacgcgaccgctatatcagcgggcccacctacgacaccgtgctcgacaaccgcgacgccgtcgtacgctccctgaacaacgacctgctcgacttggtgatcaacgaacgctaccgcatcatgtacgccacgcccgtggccggcgacgacgtgaccctgcgctcgctcaaaacccgtgtcagcctcaaacgcgaggaggccgcgctgctcgccttcctgcgcatccgcgtcctcgaatacgagaacgtgcacgccgaccccgccgactggctcgtcagctttgaggagatccgcgccgcgctcgccaccggcgccggctatctggccgcccgcaacgacgaggaaggcgtggcaaagcagatcggcgccatcgtctccgcgatgatcacctacgggtatttggtgcgcctggacgacgaagccatgtaccagatcacgccgctcgtgcccgtggtgctcgaccgcgaactggccgacacctggctcgacgtcgcggaacacggcgacggcgacacggaagatgacgatgacgacgagaagggagccgaatga

SEQ ID NO: 41651 - DNA, 3546 bp, Bifidobacterium longum NCC2705
atgcaggcgacagacgtgcagatgatcgcggaccggtggatgctggaatcccgccgactcatcaactggggctcctatgagggctaccacgaattccgcccctccacggaccacaagctgccggtgaccctgctcgccggcgccagcgaatccggcaaatccacgctggtcgacgcgcagatctccctgctgtacccaaccggtacgccgttcaacaaggcctcgaactccggccgctccgaacgcagcgactacacctacctgcgcggcatggtcggcgtgggcagcaccgaaaccggcgacgagccgctctacctgcgcggccgcgacgagaacggcgcaccgcaacccgtgtggggcgccatcgtggacacctatcgcaaccagaccaccggccaggtgctctcctgcgccaaattcctctacctgatgcccggcgacggccgcggcgacgtgcgccgacagtacgtggtctggggcaagcccgtggaccccaggcgcatggaccaataccgtgacgccccgttcacgccggcccagctcaaagccacctaccccgactgcctcacattccccagcgccgaagcgttccacacacacatctggagcgcaatgggcctgagcgaggccgcctgtcgactgctgcacaagatccagtccgccgacgcgccctcccggctcgacgacatcttcaaacaaggcgtgctcggcgtgcccgaagccctggacctggcccgcaccacggtcgaggactacgaacgttacgacgagaacttccacgccatggacgagaagacccgccgcatggacacgctgcgcggcatccaacaggcctacggcgaatacgccgccgcacgcggcaaggcccgcgccttcgaaccggtcaagccggccgtcgacggcacggtaccggccgtgctgcgcgactgggcattggcccgcatgcgcggcgaagtcgccgtccaactgcccgccgaccgcgccgaacaacagaacagcgaggcggaagccaagctgctgcgccgccgaaccgaagacctgcgcacccgtctcgacatgatccgcggccagatgcagggtctggacggcggcaacctgacccgactcgaactcgaactcgaccaggcccgccgcaccctcgaagacgtgcaagccaaccgaacacgaatcgaacaaacgttcgcatccatcggcgagacgctgcccggcgacgaacaggcctggaacgaacgccgcatcaacgccgtgaacttcaaacgcgaatacaacaaacgagacggcgaatgcgaggaagccctcaccgccgccatcaacgcgcgggccggcgcacgcggcgacctcgaacgactgcaacgcgacttcgaccggcaacgctcccagcgcacccgcatctcccagcagatggacgaaacccgcgccatgctctgtcgcgccaccggactcacccccgccgaactgccgtacgtggccgaactcatggacgtgaacgaacacgaggaagactggcgtctcgccatgaacgtcgcctacgcgcccatcgcccagaccatcctcgtcgacaagcgccacgaacagggcttcgccgccaaagtcagcaccatcgacccgcgcaccatgccccgacgcacctggcagttcgtggacaccgcacgccactacgacgacaccggcgcgcacgcgaacatactcaccggagaacaggacggcgactggctgtccggcaaactgcgctaccgcgacgactcgcccttcgccgactggctgcgctcgcagacccaggacgaacgattcgacgccctatgcgtcaccgccatcgacgacaccgaccgcaccaaccgtcaggtgcaggccgacggtcagatcaaatccggcgcacgcggccagcacggcaccaaagaccgcgcccaggtcatcggattcgtcaacgaaacctacctcaacgcgctcgcagcgcaggtcgacgccgcccgcaacgcgctcagccaagccgacaccgactacacggccgccaaaacacagtccgataacctccaccgcgaactcgaactggccaaccagctcgcctacacgtcctgggagcgcatcgacatcgccggcgcgcaacggaccatcacggacacgcaggacgccatcgcatccatcaaaaacgatcccaagctcgccgaactcgccaaacagcgcgacgaactgaacgccgaactcgaccgtgtggaacgccagcgcatcgaatccgaccaggccgcggcccgcgccggcagcgccgtcgaagcggcgctcatctggctgcgcgaccatgccgacaccggcacgacggacgccgccggtgccaccgccgacaatgacgatgacgccgcgtccggcccgctgccggacgaagtcacggcggcgctcgccgaatcctacgacaaccgattcgccggactggcggacgccgccatgcgcgcgcacatgatcatcggcgcgggcgcggcaggaacgcaggcgccgggggagagcttccccgaacgcaccatcgccggcatcggcaaggacatggcctcccgcatcaacctgctgaacggccaggccgatgccgcacgcaccggcgtcgaatcgaaaatgagcacctacatcgcgctctacgcggccgacgatgattcgctgaccgccagcgtggaggactaccggtactatctcgacgaactcgccagcctcacccagctggccgcggttgccgccaccgacgccgaataccggcgctgcctcgaacagctgctcaggagcttcctgaccatcaaacgcgccatcgacacggatgccagcgacatccacgaccagcttgaccgcatcaacgccatgctcaaaggccagcagttcggtcccaagcacggcagcctgtccctgcacgcggacgtgcgccgtcccgagcgcaccttctgggcgcagttcatccgcgtcatcggcaccctgaacgattggaaatccgccgacgtcaacgattccgacgcctcgcgcaaggctttcgcggcctgcgcgccgatggtcgggctgctgcgcgccgaactcgcgcaggtcaaggacgcgaacggcgtgaaaagctacggcgcccgcaacctcgacccgcgttgccgctcgtccttctacgccatcgtgcatcatgccgacggcccggatgaacgcatcacctccaccggcggccgttcgggcggcgccttgcaggagctcacctcattcgtatacggcgcggcgctcatctacctgctcggcggcggcctgaccagcgagccctcgtacaccacgctgttcctcgacgaggcgctcatcaaggccgacggccgttacacgcagcgcgccctcacggtgctgccgcgcctcggattccaggtcatcgtctccgccccggaaagcaagaccggcgaaatcctcgaggtctccaccaaggcctacgtgacctacaaggaccctgacaccggcctcacctccctgcgcgaggccgtgctgcatcagaatgacatggacgatgaatcatcgtcggatatattgaaggatgacggggttgccgaatga

SEQ ID NO: 41652 - DNA, 1185 bp, Bifidobacterium longum NCC2705
gtggccggcatgaaagacatcgctgcgatcaccacatgcgtgaagaaacatatgcgttcacatatgtacgacatcgaaccggcatggccatttcccgtgccggtgggattgccggaccaagcatttttggaaaccaatgcgattgcggtgcatgacaacaacaatgagatacggcaatgggcaagcaagaatggttgcgaaatcataaccaagcatcgcaccataggcacctctgtcgagctgatctccaaagtcgtcgttcctgacgaatcaatagccatgcgtgtggttggtcgtacgctggcggcggaatgtcgcgaagcgcgccgccgcatagcatgtctggttgctgcttgtgacgttgctccggaaacaatcgaatcggccgctcgcatgacaggccatgaacagcctgacgacttcgatctgcttgtcagcgcagttcgatatttcaggcatcatgacgtgaccggtatgacgccgcgacagattccactgacaggattcagcggcaaatggctgaatgagtcaaaaaccaatcgtcgtaaggccatttgccgactgctcggtgtcgaaacgttgggtctgtcaaaacggccgaccgaactgcggttccgttatctcgatccggtccgcgacgatgctgagctcgaacgcatcatatggtgtccgtgggaaggcgaagcgttatccggcattaaatatgctgtcatcgttgagaacaaagacacgtatcagactatgccgccgattgcgcagggcatctgcatatggggttctggtcgcgctgtaagcgatgctgtacctgcggttcctgcactgcgtgacatgcgtatcgtgtattggggtgatatggatgcggatggactggaaatactttcgacattacgtgaatcaagtatcgaatgcgactccatcctgatggattgcgatgcatacgatcggtaccacagatttggtaccgatcgtactgaacgcagcgcgaagattgctatgcgggagcctaagccgacgcccggccttcaatcggcggagcgacgtctttatgaacgactgtgtgctgacaaaacaatcgcttatcggcgtatcgaacaggaacgcattcccatgcgtgatgcagttgacgaattacgcaagcttggcatccccgtggagtccattgaaaatcaggatttgccgatttag

SEQ ID NO: 41653 - DNA, 1500 bp, Pseudomonas putida KT2440
atggaagacgacctcctatcgagggcggagcattacagtacgctccgcactcaccatcctgcgtggttattgttagcgtcactgtatgcgcccttggttctcagcagtctgcgaacgttgttcgaacatggccaagagggcatcgacctcgacgacgctctacattcgttagcccaagcaattgccaacaatgctgatcaagagcaaagccaaaccgagcctggcacagcgttacagcaagcgaaccgcgagctaggtgaatggataaaacgacggttgatcgttgagcgcagcgggcgcctttacgctaccgatgctctggagtcggcctttcgctttgttgattcacttgacgatcgagtgatgacatccactgcctcccgcctgtcagtggtgcagcgtgagatcgaaaatctcgagacgaacctcaactcagaccccaagagccgcgcactcagcttgaagcgcaggatccgtgaactgcagatcgagcttgaccgggccaaagccggccatgtaccgatctttgatgaagccaaagcgattgaaggcatccgcgagatctacgcgctggcgacgagcctgggggctgatttccgaagagttgaggactcatggcgtaatgctgaccgcctgcttcggcaatcgattatcagtgatcagtgcacgagaggggaggttctggataaccttcttgacggtcaggatgcgctgctgacaacgccagaagggaaggtctttgacagcttccagcttcaactgcgggcgcctgtagaacttgatctaatgagaacgcggatacgcaacatcatgcgtcatccagccgtaccgcaggcactgcacaaatatcagcagaccgagcttctgcgattggtgcctcgtctgcttcaggagtcagccgccgtattacgtgcgcgggccagaagcgagcgggacgtcaagagcttcttgaaaactggcctagtcgctgagcatcaccgtgtgggtcacctgctcaatgagtttttgagcttggcattaaggatcaattggcagcgccaggcgatcaggcgtacgccggtacccattcctccggttggtatggcgctgtttggggtgcccgctgtcgagcgcctgagattcaaagcaattgccgaggagcatgcgccaactctggatctgacaccgcgtccggctgacctagagcagattgaggacgagttctggcaatcatttgacggactcgaccgcgacgccttcgtgcttgaaacgttgagaattctggcccaggagggacgtccgttgtccctggcagagctcgcaagcttgctaccgcctacgcatgacttggagtgcttcacgttgtggatcacgatggccagggaggccggactgctcatagatgaacaggaaatcgagagatttgacctagcggacgctgaggatcgctggtggcggtttaaccttcctttcacccaacttgagtctgagaagcttcagaacatcaaatgggagctttga

SEQ ID NO: 41654 - DNA, 756 bp, Pseudomonas putida KT2440
atgccgagcatttttgatgaattgacaagcaagccagctgatcaggaagcgccggaagcagacaaggaacgggacgcggatactgagccgctcgatggagattttttcagaaaaattgacgaggaactgcggactacacgagccgtccgggaggttgtgcaactgctctataaaaatggcgatatcgaagagtctgaagatcctggcctttacagggccgcggtggctaacgccgacttggtagagcggataatggagccttttgaccttaacgttcagttagacgagctgagaggattggcctttgtcgtcgtccgtcaggagcccggagacacagctgacggttggacacaccctcttgtccgcagacataggttcaccctcgagcagaccttgttgatcgcgctgctccggcagcacctgatcgcattcgaaatggagagtggtgtgggcgccggtgtggcgcaaatgaccgtagacgatgtggtaactcagcttcatacctatctgggcgaaccgggaagcgatctcaaagaccgtagccgcgctctgaatctgttggagcagctgaaaaatcaccacttggttacgacgatagatagtaatgatcgtttcaccatacgtccgcttatcgctcatgttgcaaaccctgacaacctttcaaccttgatccgttggctcgagaccttcggctccagcctggacaggtcgaccaatgtcgatcctgtcgatgaggaaggggaggaacagccatga

SEQ ID NO: 41655 - DNA, 2085 bp, Pseudomonas putida KT2440
atgactaacccaaatggcagttacgtcttgaccgcaatggagttgtacaactgggggagttacaacggcctacaccaggcgcctatagatcctgcggggacatcgttgatcggcacgaccggtagcggcaagacaaccttcatcgatgccttcatgactctcatttgctcaaacccgcgatacaacctcgcatcgacaggcggggttgagagtgaccgggatttggtttcttacgtaaggggggtgtcgggcccaggcgaaagccagggcacgaagcaacaatgtgctcgtcctggacgaacaatatcagggatttgtgcaaccttccgacgcgctgacactctggttcgtatggccgcacttttctcattcgagggcaccagttcagctgcagccgagctagaaaaatgctggatcctctcagagaacccagagcagacgctggagtcttggctcgttgcttatcatggcaacgggaagcgcgggttgagtcagattgaaaataatgtccaaaatgtctgggtacacggtacgaggaaggagtacctagcccgtatccgtgcgctgtttcaggtgggcgacaatgctttttcccttctgaaccgtgccgcgggcatcaagcagttgactgacatcgattcgatttttagagagcttgttctggatgatcggtctgcctttggccgcgcggcggaagtggtgaagagctttgaggatctcagtgaaatccatcaggaactggagatcgctcgtgcgcaacagaaatcgctaaggcccatcgcagacctttgggaaatctacaaaaacgagtccgatagtcttcaagagctcaagaccgtcgagtcagtcgcgccggtgtggtttgcggagcagtcccaccaactgtggctggctgaaagaatgaggttggagtcatcagccgaagaatcagcacagcatctgcagcagctgatcagccagcgaaccgagctgaagcagcagtgcgacatgcacttacaggcctacctccaaaagggtggtgccagcattgaccagctacgcaagcgcgtcgaggagtgggaggctgttcgtgagatcaggcttaactactcgtcgcaatatcagcaccttgctcgaaagctgaagctaccggacgagctttctttcagtgcgctagcggagaacaaggagcaagctgccaagcaggcttccgtcctagtcaatgagattaaggatcagcgcacccaggccttccagcgtggcattgtcgagtcagatatgcgcaccaaactcttggctgtgaacgaggaaattgacgatatcaagcagcggccgggttccaacttgccaggacagtaccatcttttccgaagccagctggccgcgcatctccaggttgaggagagcgaactgccttttgttgcggaactcgtccaggtgaagcttcaggagcaagcctggaggggggctatcgaacgagctataggagggcatcggttacgtgttctggttcctgctggtgtggccaaagccgcccttcagtggatcaactccagacacaatcacctgcacgtcagaattctcgaggttgatcctcaggtagaagcacgtgcatttttccaggatggtttcgcacggaagcttgccttcaaggcacacccgttccgtaaagctgttgaagccctcatcgcggccaacgaccgccattgcgtgtctgacgcggatgctttgcatgcaatgccacatgcgatgaccaaagaagggttgatgtctggtaaggagcatttcttcgagaagcgcgatcaacgtctgcttagctctgactggtttacgggttttgataaccgagatcgcctggcctacctgggacaggaggctgccactgcagatttgcagcttgcagcggcgatagatgcagtgcgcgctgctcaagatcggcttggtagtcttgaggaaacgaacgctgcataccagctgatcaggggcgtggagttcaatctgatcgacctcccaggtgcagacaatcagctgatagatctcagagggcagctggattatttgacccgtccaaataccgacgtcgctacagccaaaaagctcctttag

SEQ ID NO: 41656 - DNA, 1632 bp, Bifidobacterium longum DJO10A
gtggccgatgtgatgcgggagctggaacggctgcgaccggtgtatgagacgggcgtcctgcggttgctgttgcgccagaacgcgatgctgtacgtgtcgctgctgcgttccacgttcgacccgctcaccggcgagctgccgcgcgagactgtggaggagcggttcgcgcaaagtctgaacgctctggccgacgccggcgaatatgcgccgcgcgaggaccagaccttcgccgaggccgctcatcagatcctcgccgacctgacccgtgaaggcgaaggcgactacgcctggctcgccaactcgcatgatgcggcctcacaccgattcctctaccgtttgacggcccgcgcccaccgcgccatcgaggcgctgagcaggctcgaagacgaatcacgcgccctgtccggcgcgcaggccaacagcatcatcatggaaatcgagcacgcgcgcatgcagctgaccgccgaccccggcgagcgcatcaaactcctcaaccgtgaaatcaaggaacgcaagcacgagatcaaacgcatccaacagggcaagcagcatgccacgctgagcgaagcccaggtggaggacgtgatcgccgtgatccacaacacgctgcgcggcgtgcccatcgacctgcgcgaactcgtgctcgacgagcgggacaacggcgacgccttgcgtcggcgcatgcaggccggcgacatcagcgtggacgagaacctgacccgctaccacgatgaataccgccgctcgttccgcgaatcagacagcggccgccgcttcgaggacgccttccaggtgatcatcaccgacgagggccgccagcaaatcgacgaagccctgcgcgctatcgccaaaaccccgtatctggccggcgaatccggcgtgctgctcggccagatccgcgacgaactggcccgcatctacgacggcatcgaagccgtgcgccgccagatgcgcgtctccgacgaggcgatcagccggctcgtgcgccagcaaaccgacactcgctaccgtacgatgctcacccgcttgaaccgactgtacgcgcgcctcaacgcggatgcgaaaacccatatgggagacgcctcgcgcccgtacgacacggccacctcggacgcgctgttcgcgccattgccgatgcgcccggccaaatccatgacccgcgccaccgcacccggcctgagcgacctcgccgccgaagccccgcagtcgactccggtggccgatctgcgggacatggtcaacagcggcggcccccgactcctgcgcatggtcagcctcatccggcgcaacccggtgaccgttgacaggtccgatgacaggcccggcgcaaccctcgtggacatcgccgccagcttcaaccggctgcccgaaagcgaacgccgcgaaagcgagatcgtcggcttcctgggcgggctgggagccgtaagcggcaacgccatcgccgacgagccgtccactgacggcgtcggcgtcggggtcgacagcgacatcgccaccgagccggctccggcgcagcgcggcgataccgcgacctggcattgcgtatcgatcgacggcgagccccggaactggatcactagaccggtgctggccgacatggacgagctgagcatcattgtggaggaaggatga

SEQ ID NO: 41657 - DNA, 675 bp, Bifidobacterium longum DJO10A; identical to SEQ ID NO: 41629

SEQ ID NO: 41658 - DNA, 3546 bp, Bifidobacterium longum DJO10A
atgcaggcgacagacgtgcagatgatcgcggaccggtggatgctggaatcccgccgactcatcaactggggctcctatgagggctaccacgaattccgcccctccacggaccacaagctgccggtgaccctgctcgccggtgccagcgaatccggcaaatccacgctggtcgacgcgcagatctccctgctgtacccaaccggcacgccgttcaacaaggcctcgaactccggccgctccgaacgcagcgactacacctacctgcgcggcatggtcggcgtgggcagcaccgaaaccggcgacgagccgctctacctgcgcggccgcgacgagaacggcgcaccgcaacccgtgtggggcgccatcgtggacacctatcgcaaccagaccaccggccaggtgctctcctgcgccaaattcctctacctgatgcccggcgacggccgcggcgacgtgcgccgacagtacgtggtctggggcaagcccgtggaccccaggcgcatggaccaataccgtgacgccccgttcacgccggcccagctcaaagccacctaccccgactgcctcacattccccagcgccgaagcgttccacacacacatctggagcgcaatgggcctgagcgaggccgcctgtcgactgctgcacaagatccagtccgccgacgcgccctcccggctcgacgacatcttcaaacaaggcgtgctcggcgtgcccgaagccctggacctggcccgcaccacggtcgaggactacgaacgttacgacgagaacttccacgccatggacgagaagacccgccgcatggacacgctgcgcggcatccaacaggcctacggcgaatacgccgccgcacgcggcaaggcccgcgccttcgaaccggtcaagccggccgtcgacggcacggtaccggccgtgctgcgcgactgggcattggcccgcatgcgcggcgaagtcgccgtccaactgcccgccgaccgcgccgaacaacagaacagcgaggcggaagccaagctgctgcgccgccgaaccgaagacctgcgcacccgtctcgacatgatccgcggccagatgcagggtctggacggcggcaacctgacccgactcgaactcgaactcgaccaggcccgccgcaccctcgaagacgtgcaagccaaccgaacacgaatcgaacaaacgttcgcatccatcggcgagacgctgcccggcgacgaacaagcctggaacgaacgccgcatcaacgccgtgaacttcaaacgcgaatacaacaaacgagacggcgaatgcgaggaagccctcaccgccgccatcaacgcgcgggccggcgcacgcggcgacctcgaacgactgcaacgcgacttcgaccggcaacgctcccagcgcacccgcatctcccagcagatggacgaaacccgcgccatgctctgccgcgccaccggactcacccccgccgaactgccgtacgtggccgaactcatggacgtgaacgaacacgaggaagactggcgtctcgccatgaacgtcgcctacgcgcccatcgcccagaccatcctcgtcgacaagcgccacgaacagggcttcgccgccaaagtcagcaccatcgacccgcgcaccatgccccgacgcacctggcagttcgtggacaccgcacgccactacgacgacaccggcgcgcacgcgaacatactcaccggagaacaggacggcgactggctgtccggcaaactgcgctaccgcgacgactcgcccttcgccgactggctgcgctcgcagacccaggacgaacgattcgacgccctatgcgtcaccgccatcgacgacaccgaccgcaccaaccgtcaggtgcaggccgacggtcagatcaaatccggcgcacgcggccagcacggcaccaaagaccgcgcccaggtcatcggattcgtcaacgaaacctacctcaacgcgctcgcagcgcaggtcgacgccgcccgcaacgcgctcagccaagccgacaccgactacacggccgccaaaacacagtccgataacctccaccgcgaactcgaactggccaaccagctcgcctacacgtcctgggagcgcatcgacatcgccggcgcgcaacggaccatcacggacacgcaggacgccatcgcatccatcaaaaacgatcccaagctcgccgaactcgccaaacagcgcgacgaactgaacgccgaactcgaccgtgtggaacgccagcgcatcgaatccgaccaggccgcggcccgcgccggcagcgccgtcgaagcggcgctcatctggctgcgcgaccatgccgacaccggcacgacggacgccgccggtgccaccgccgacaatgacgatgacgccgcgtccggcccgctgccggacgaagtcacggcggcgctcgccgaatcctacgacaaccgattcgccggactggcggacgccgccatgcgcgcgcacatgatcatcggcgcgggcgcggcaggaacgcaggcaccgggggagagcttccccgaacgcaccatcgccggcatcggcaaggacatggcctcccgcatcaacctgctgaacggccaggccgatgccgcacgcaccggcgtcgaatcgaagatgagcacctacatcgcgctctacgcggccgacgatgattcgctgaccgccagcgtggaggactaccggtactatctcgacgaactcgccagcctcacccagctggccgcggttgccgccaccgacgccgaataccggcgctgcctcgaacagctgctcaggagcttcctgaccatcaaacgcgccatcgacacggatgccagcgacatccacgaccagcttgaccgcatcaacgccatgctcaaaggccagcagttcggtcccaagcacggcagcctgtccctgcacgcggacgtgcgccgtcccgagcgcaccttctgggcgcagctcatccgcgtcatcggcaccctgaacgattggaaatccgccgacgtcaacgattccgacgcctcgcgcaaggccttcgcggcctgtgcgccgatggtcgggctgctgcgcgccgaactcgcgcaggtcaaggacacgaacggcgtgaaaagctacggcgcccgcaatctcgacccgcgctgccgctcgtccttctacgccatcgtgcatcatgccgacggtccggacgaacgcatcacctccaccggtggtcgctcgggcggcgccttgcaggagctcacctcattcgtatacggcgcggcgctcatctacctgctcggcggcggcctgaccagcgagccctcgtacaccacgctgttcctcgacgaggcgctcatcaaggccgacggccgttacacgcagcgcgccctcacggtgctgccgcgcctcggattccaggtcatcgtctccgctccggaaagcaagaccggcgaaatcctcgaggtctccaccaaggcctacgtgacctacaaggaccccgacaccggcctcacctccctgcgcgaggccgtgctgcatcagaatgacatggacgatgaatcatcgtcggatatattgaaggatgacggggttgccgaatga

SEQ ID NO: 41659 - DNA, 1185 bp, Bifidobacterium longum DJO10A
atggtcggcatgaaagacatcgctgcgatcaccacatgcgtgaagaaacatatgcgttcacatatgtacgacatcgaaccggcatggccatttcccgtgccggtgggattgccggaccaagcatttttggaaaccaatgcgattgcggtgcatgacaacaacaatgagatacggcaatgggcaagcaagaatggttgcgaaatcataaccaagcatcgcaccataggcacctctgtcgagctgatctccaaagtcgtcgttcctgacgaatcaatagccatgcgtgtggttggtcgtacgctggcggcggaatgtcgcgaagcgcgccgccgcatagcatgtctggttgctgcttgtgacgttgctccggaaacaatcgaatcggccgctcgcatgacaggccatgaacagcctgacgacttcgatctgcttgtcagcgcagttcgatatttcaggcatcatgacgtgaccggtatgacgccgcgacagattccactgacaggattcagcggcaaatggctgaatgagtcaaaaaccaatcgtcgtaaggccatttgccgactgctcggtgtcgaaacgttgggtctgtcaaaacggccgaccgaactgcggttccgttatctcgatccggtccgcgacgatgctgagctcgaacgcatcatatggtgtccgtgggaaggcgaagcgttatccggcattaaatatgctgtcatcgttgagaacaaagacacgtatcagactatgccgccgattgcgcagggcatctgcatatggggttctggtcgcgctgtaagcgatgctgtacctgcggttcctgcactgcgtgacatgcgtatcgtgtattggggtgatatggatgcggatggactggaaatactttcgacattacgtgaatcaggtatcgaatgcgactccatcctgatggattgcgatgcatacgatcggtaccacagatttggtaccgatcgtactgaacgcagcgcgaagattgctatgcgggagcctaagccgacgcccggccttcaatcggcggagcgacgtctttatgaacgactgtgtgctgacaaaacaatcgcttatcggcgtatcgaacaggaacgcattcccatgcgtgatgcagttgacgaattacgcaagcttggcatccccgtggagtccattgaaaatcaggatttgccgatttag

SEQ ID NO: 41660 - DNA, 1470 bp, Xanthomonas campestris pv. vesicatoria str. 85-10
atgaagcaccaggcacgtatcgccggttatcggcaactgcgcgagcagccggtatggaaactgctcgccgccgaccacgcacccgagctgatcggcctgctgcagacggtgctgatggatggcgaacgccgcctgccttcggccgtgttgcacgaacgtttgcagcgccagctcgacgccttgcgcgccgacgagctctcgcgcgaactgccgcgcaccgcacaggcatatctggcgcattggttggcacagggctggctggaacgccgcctgcctgaaggcgcagccgaagaagaatacgaactctcgcgtgccgcgacccaggccatccgcttcatcgccggcctgcgcgaaagcagcagcagcgccaccgaaagccgcctgtcgctggtgatccagcaactggtgcagctggccggacagaccgaggccgatccagagctccggctggccgcgctgcgcgatgaacgtgcgcgcatcgatgccgaaatcgaacgcgtggcctccggccgcgtggcggcgctggacggcaaacgcgcgctggaacgcgcgcgcgacctgatccatctctctgacgagctggccgaagatttccaccgcgtgcgcgacgacttcgagcagctcaaccgccaattccgtgagcgcatcatcgacgacgaaggcgcgcgcggcgacgtgctcgaacaattgttcaacggcgtggatgtgattgcagacagcgaggccgggcgcaccttcgaggcgttctggagtctgctcaacgacacccagcaaagcagccagctcgaccaggcgctggatgcgctgcttgcccgtgggtttgcccgcaagcttgatcgccgcgaacgcgccttcttgcgcgggctgaccggcacgctgctggaacgcggcggcgaggtgcacacggtgatgcagcatttcgcacgcagcctgcgcgggttcgtgcaaagccgtgggtatctggaacagcgccggctcaatcaattgctcaagcaggcccagggcgaagccttgcaattgcgcgacagcctgcacgccaccaccgccaccggctatacgcaggcactcagcagcagccgcctgcgctcgctgtcgcaatggcggctgcacgatccacggctcacccaggtcgatggacgcgtgcaggccgccgacgcggccgagatctcgctggacagcgtgggcgatctggtcgcgcaatcggagatcgatgtacgcagcctgcgcaacgacctgcatgagctgctcggccaacgcccgcggctgaccatcggcgacgccttgcaacaacgcccgtccgtgcagggcctgggcagcgtgatcggatacctgtcgctgggcacgcgccacggcatggtgatcgaaggacagatggaaacggtgcaatgggaaggcagcgacggcgccgtgcggcgcgcgcgcattcccttggtgtggtttacccgggagaaacgcaatgaactggtctga

SEQ ID NO: 41661 - DNA, 702 bp, Xanthomonas campestris pv. vesicatoria str. 85-10
atgaactggtctgaggacgccggcccggacgccgacgagagcaccgcggtgtcggccatcgacgaccgcatgccgatgacgcaagcctccagtgccgagccgcgcggcgagctgtttttaggcgacaccggcacgctgccgttcgacgcgcggcgtgcgctgtgccagttgctggcagggcccagcatcgatgcgcaacggcacggtgcgctgtggccggcgttgttgcgcaacgaggtggcgatccgccaggtgctgtgcgagctgtttctggagctggtgctcgaccgcgagggcggggtggccttcacccgccaggccgacaccgccgagctcgaatcgcccaccttgctgcgcagcgcgccgctgacgttcatcgagtcggtgttgctgctgttcctgcgccagcaactggccgaggccgatacgcgcggcgagcgtgcggtggtggacgaagcgcagttggtggaggcgttgtcggtctacgagaagaacgtgtccaccgatcgggcgggcttcgcgcggcgggtgatgacggccatcggcaagatgcgcgacaaccagttgctgtcgcgtttgcgcggcagcgaggagcgctatgaagtctcgccggtgctgaagctgttgttctcggcagaggatgtgcaggccttggtggtcgcgtatcgcggtttgcgggaaggggatgtagctgctgagtaa

SEQ ID NO: 41662 - DNA, 4056 bp, Xanthomonas campestris pv. vesicatoria str. 85-10
atgaattcccagtccaatctgtcgccagcgcaaccaggtgcctccttgtttgccgagacgctcgccgagcaacgtgcgcagcagttccgcatgcggcgcttgcaggtgcacaactggggcaccttcaacgggctgaccgaagtgccgatcgcggagaagggcttcctgttcgtcgggcgttcgggctcgggcaagtccaccttgctggatgcgatgtcggcactgctgacgccgccgagcatcgtcgacttcaacgccgccgcgcgcgaagccgagcgcagtgggcgcgatcggagtctggtgtcgtatgtgcgcggtgcgtgggccgatcagcaggacagcgcgtccggcgaaatcgctacccaatacctgcgcaagggcgccacctggaccgcgctggtgctggaatacgcaaatgcgcacggcgaggcggtgagcctgatccgcttgttctggatcgccggcagcggtaacgcggcggccgatgtgcggcgtcactacatggtcgcgccacgccgtttcgacgtggcgaccgagctggatggcttcgatcttgacctgcgcaagctcaaggcgcgattgggtgaggacgttgcgcatttcgacggcttcgccggctacgccgaacgtttccggcacgcgctgggcatcggcaacgagatggcgctgcggctgttgcacaagacccagtcggccaagaacctgggcgatctcaatgcgtttctgcgcggcttcatgctggacgagccgcgtaccttcgaagcggccgaccggctggtggaagattttgccgaactcgatggcgcgcaccatgcggtggtcaccgcccggcgccaggtggaaaccctgacccctgcgcgcgagcaccacgcggcgctgatggcgctgcgccacagcgtcggcgagttgcgcgagctgcagctgggcgtggacagctaccgcgagcagcagcggctggccttgctggaggagcggctgcaggagctcgacaaccaggaccgtggactggccggcgaagaaggccagcgccgcgaatcgctggataaccacgaacaaaaactggtcggcctggagcgcgaacagcgcgccgccggtggcgagcagatcgaggaactggaacgcgaacgcgcacgcgtcgagcgcgagcgcgacgaacgcctgcgccgccgtgcacagatcgaacaggcctgccgccagctcggcaccgccctggcggccggcgccagtggctttgccgcacagatcgcgcatgcgcagaccgtgctggataacggcaagcacgacgccagcgcgctggatgaggccatcgccgaacgcatgggtgcgcggcgcgacgacgagcgccggtttgccgaaatccgtgccgaactggaggcgctgaagcgcgcgccatcgagcatgcccgcaccgatgcaggccctgcgcgcgcgcttttgcgaagacaccggcattgccgaggccgcgctgccgttcgttggcgagctggtgcaggtgcgcgaggaccagacggcctggcgcggtgcgatcgagcgtgtgctgcacggctttgcgcaatcgctgctggtggacgagcggcattacgcgcaggtcagcgaatgggtcaaccgcacccatatcggtacgcgtctggtgtacttccgtgtgcgccgcaacgacgagctgcattcgcggcgggtcgatcccggcgcgctgcccggcaagctgcagctgcgcgagcacgcctttaccgaatggctgcgcaacgaactgacccgtcgcttcgactacgcgtgcgtggacaatgccgcagcattgcgcaacgccgaccgcgcgatcacccgcgagggccaggtcaagcatcctggcgatcgctatgagaaggacgaccgccacgcggtcaacgatcgcaagcgttggctgctcggtcacgacaaccgcgacaagctcaaggtgttcgagcgcgaagcgcaggcgctggcccagcgcatcgccagctgcgatgccgatgtggcagcgctgcgcaagcagcgtgagcaggaccaggaacgccaactcgctgcgcacaccttggtggagcgcgactgggacgaaatcgatgtcggccccaagctgcagcgcctgagcgatatcgacgaacagttggtgcagctgcgcgaaggcaacagcggcctgcgcgcgctcgggcaggccatcgacactgcacggaccctgcgcgaccaggccaagcgcacctatgaagatgtgcggctggagcgcgcgcaactggcgcgcgaacgcgtgcggctcgaacagcagcacgcggcctgcgcgggccgcgccggttccgccacgctcacgcccacccagttgcagggcttgcgggaacggcttgccgcattgacgccgctgtcgctggacaatctggaagcgcatttccgcgtggtcgaacgtggcctggccgagcagttggccgacagccagggccgcgacagccggctcagcgcgcagttgctggaatgcttccgcaagtattgccagcagtggcccgaagacagcggcgatttcaccgtgagccttgccagcgccgacgatttcctcgcgcgtctggaccggctggaaagcgatggcctgccgcgtcacgagcatcgtttcttcgacctgttgcagacccagagcaagaacaacctgctggccttgcagcgttacaccgccgaagcccacaagggcatcaagcagcgcatggacgaggtcaacgccagcctggagcaggtgccgttcaatcgcgacaccgtgctgaccatcgaggtcggcgaccgtcgcctggccgaggtgcaggaattccagcagcagttgcgcgcggtgctgtcgcatcaacagaccgaagaccgcgccctggccgaagcgcagttttccaccttgcgtgcgctggtggcgcgcctgggcgcgcaggaaccggaggcacgccgctggcgcgaacaggtgctggatgtgcgcctgcatgtggagttcatcggtgtggaactggacgcgcagacgcgcgcgcaggtggagatctaccgcagcggcgcgggcaagtccggcggtcagcgccagaaactggcaaccacctgcctggcggccgcgctgcgctaccagcttggcggcgaagacggcgaactgccgcgctactgcgcggtggtgctggacgaagccttcgacaaggccgacaacgaattcaccgcgctggcgatgaacatcttcgagaacttcggcttccagatggtggtggccacgccgttgaagtcggtgatgaccttggagcccttcatcggcggcgcatgttttgtcgaaatcagcggccgccataactccggcgtgttgctgatcgaatacgacgagcaggcacagcgattgaagctgccggagcgctcgcgtggcgatgaggcagcggtggccgatgccactgacgccgcgtcagcgatcgaggctgcgagtgagcctgtaggagtgcagggcgctgcaaacgcagacggcattacagctgatggcctcccgctacacatagccttgcccgtgcccggcgatacctcacccgcagcgcagaacacgcatagtagtaagcgcaagccggcagcggcgacggcgacggcgaacaagcagaacaaaaacaagcaaaacaagaacgccaagaccacatcgcccacacgcgctgcggcacagcctcacgcaaagcagccgaagaaatcgccttcgcgcactccagctgtggctggcaagccggtagcggacaaacgtacctcaggcgcgcagcaagcgccggcggtgtcgtcaggagctgcatccaggtccaacgtgggcaagaccacgcggtcttcaaaagcgcagggcaagccgattgtggccgcaaacgcatccaacgccacgtccagcaaggtcgccgccgcatctgcgccagtgaaaaacactgccgcagccaagccacgtgcaacagccgcatcgactggtcagccagcgcgtggcgccggcaagacaacctcggcgcgcgcggtggctgaaccgtcaccggccacgacgcgcgtcgccagggcaggcgccccgaaggcgcgcggcaagcgctga

SEQ ID NO: 41663 - DNA, 1473 bp, Xanthomonas oryzae pv. oryzae MAFF 311018
atgaaacaccgtgcccgtatcgcccgctatcgcgccctgcgcgagcagccgctgtggaaactgctggcggccgatcagtcgccggaagtgatcggcctgctgcagacgttgttgctcgacagcgagcgcggtttgcccgcggctgtcctgcatgaacgcttgcagcgcatgcttgacgatctcaatgtcgatcagctctcgcgcgagctgccgcgcactgcgcaggcctatgtagcgcactggctggcgcagggttggctggaacggcgcctgcccgagggcgcgcagcaggagcagtacgagttgtctacccaggcgatgcaggcgattcgctttgccgatggtctggagcaggcgcgtggtgccgcgaccgagagccggcttgcgctggtgatgcagcagttgtcgcagttggccgcgttgaccgaaaccaatcccgatgcgcggctgtcggcgctgcgcgacgagcgtgatcgcatcgatgcggagatcgcgcgggtggctgccggcaaggtcgcctcgttggatggcaaacgcgcgctggaacgtgcgcggcaggtgatcgcgctggccgacgagctgaccgaggattttcgccgggtacgcgacgatttcgagcagctcaatcgccagttccgtgagcgcatcatcgacgacgagggcgagcgtggcgaggtgttgacgcggctgttcgagggcgtggacgtgatcggcgacagcgaggccggacgcagttttcaagcgttctgggcgctgctcaacgatgccgaacaaagcgcgcagctggatgcagcgctggagacggtgttggcgcgggcgttcgcacgcaagctcgaccgccgcgagcgcagcttcctgcgcggcttgaccggcaccatgctcgaacgcggcggtcaggtgcacgatgtgatgcagcatttcgcccgcagcctgcgcggcttcgtccaaagccgtggctatctggaacaacgccggctcaatcaattgctcaagcaggcgcaggccgaggcgttggggctgcgcgagcatctgcgtgcccagcgctcggtcgggcacgatctcaacctgaccaccagccgcttacgctcgctgtcgcaatggcgtctgcaggatccgcgtcagacccaggtcgatggcagcatccagcgcaacgacgcagcggcgatctcgctggacagcgtcggcgatctggtcgcgcagtcggaaatcgacttccgcagtctgcgccgcgatctctacgaactgctgggagaacacgcacagctgtctatcgcgcaggtgctggcgcagcggcaggcagagcaggggctcggcagtgtgatcggctacctgtcgctgggtacgcggcatgggcaggtggatgcgcaacgcagcgagatcgcgcgatggcgtggcggcgatggccagtggcgcggcgcacgtattccgttagtgtggttcagccaggagaaacgcaatgaattggcaggctga

SEQ ID NO: 41664 - DNA, 699 bp, Xanthomonas oryzae pv. oryzae MAFF 311018
atgaattggcaggctgacaacgccgaaaccgacgcgcacgcgccgagcgcccacgccgatgcggctgtgcccgaggcggacgccgcaacaggcctgtttccgggcgatagcggtgcgttgccggtggatgcgcggcgcgtgctgtgccaattgctcgccggccccagcgtggacgtgcagcgccacagcaagttgtggccagcgttgctgcgccatgaagcggccgtgcgcagccgcctggccgatctcttcctggaattggtgctcgaccgcgacgccggcgtcgccttcacccgccaggccgacaccggcgagctcgaagcgccggtgctgctgcgctctctgccgctgaccttcatcgattcggtgttgctgctgcatctgcgtcagcaactggcagaagccgatgcgcggggtgtgcgtgcggtggtcgaagatgcgccgttgagcgaggccctggccgtctacgagaagaatctgtccaccgaccgtgccggcttcatgcgtcgggttggcaacgccattcagaagatgaaggacaaccacgtgctcacgcgcctgcgtggcgaagacaaccgctacgaggtttcgcccacgctcaagctgctgttctcggccgaggatgtgtccgcgctggcgcagatctatcgccagctgcgcgagcagcccggcaccgtaggcgatgcagagcgcgcctga

SEQ ID NO: 41665 - DNA, 3432 bp, Xanthomonas oryzae pv. oryzae MAFF 311018
atgaaatcttcttcctccagcctgtttgccgacgatctgcccgacccgcgcgtgcagcagttccgcatgcgccgcctgcaggtccataactggggcacgttcaacggcttgaccgacgtgccgatcgccgcgaagggcttcttgttcgtcggccgttccggttcgggcaaatccacgctgctggatgccatgtccgctctgttgaccccgcccaatctggtcgacttcaatgccgccgcgcgcgaggccgagcgcactggccgcgatcgcaacctggtgtcgtatgtgcgcggcgcctgggccgaccagcaggacagcgcctccggcgaaatcgccacgcaatatctgcgcaagggcagcacctggaccgcgctggtgctggaataccgcaacggcgagggacgggtgatcagcctgatacggctgttctggatcgccggcagcggtgcggcggcagccgacgtgcgcaagcattacatggtggccgagcgcagtttcgatatcgccagcgaattggtcggcttcgatctggatttgcgcaagctcaaggcgcgtctgggcgacgacatcgcccacttcgacaatttctccggctatgccgagcgcttacgccatcagttgggcatcgccaacgagatggcgttacggctgctgcataaaacccaatccgcgaagaatctcggcgatctcaatgtgttcctgcgcggcttcatgctcgaggcgcccaagacctttgacgccagcgagcggctggtgggcgacttcgccgaactcgatggagcgcatctggcggtggtcaccgcacggcggcaggtcgaaacgctgctgcccgcgcgtgcgcattacgaggacttgcagtcggtgcaacgtcagcgcggccgcttgcaggaactcaagctcggcctggacccctatcgcgagcaacgccggcttgcgttgctggatgcgcgcctgcatgcactggacgtcaacgaccagggcctggccggcgaggagggccaacgccgcgctgcagtggataaccaccaacaacgcttgtccgatctggaggcccagcgccgcagccagggcggcgagcggatcgacgcgctggaacgcgagcagctccaggtccagggcgaacttgcacgccgcagcgacaagcgtgccaaggccgaacaggcctgccgccagctcgaccagactttggccgacaacgcgcatggatttgcccagcagtccgcgcaggcgcgcgccgcgctcgaggacgggcagcggctggccgccgaacaggacgaggcgatcggcgagcgtatcgccggcaagcgcgaggacagccagcgctttgcgcaggtgcgcgccgagatcgaggcgctcacccgcaatccctccaacattgctgcgccgatgcaggccctgcgtgcacgcctgagcgaagaaaccggcattcccgaagccgcgctgcccttcgtcggcgaactgatccaggtgcgtgaggaagatgccgcctggcgcggtgccatcgagcgcgtgctgcatgggtttgcgcaatcgctgctggtggacgagcgccattacgccgaactggccgagtgggtcaaccgcacgcatctgggctcgcgcctggtctattaccgggtgcgcaataacgaacaggcgttttccggccgcgaacccggcagcgcgtcgctgctgcacaagctgcaattgcgcgagcatccctttgccggctggctgcggcgcgaactgggcaagcgtttcgactacgactgcctggagagcgccaaggccttgcgcacggcagagcgcgcgatcacccgcgaaggccaggtcaagcatcccggcgaacgctatgaaaaggacgaccgtcatgcggtcggcgaccgtcggcgctggctgctgggcttcgacaaccgcgacaagctggcactgtacgagcgcgaagccattgaactggcacaacgcatcgccgcctgcgatgccgacgtggccgagctgcgtgcgcgccgcgaacgcgatgccagccggcgcctggcccagcacaccctggccaacctggcctgggaggaaatcgacgtcgccgcacagctgcaacgccgcgacgatatcgccagcgccttgcgccagctgcgcgaaggcgatgccaacctgcgcgcgctgggcgaggcgatcgagcgcacgcgcggcgacctggaacaggccaagcgcacgttcgacggtgtgcgcgaggaacggatcgcgctgggggtcgagcgcacgcgcctggaaaagcaacgcctgcactgcgccgacgccgatgcccgggtggtcacgccgctgcagcgcgaggggctggaggagcgcctggccaacctgggcgcgcttagcctggacaatctcgaagcgcattttcgccagatcggcaacgccatcgccgagcagaccagcgccagcgacagcgagcacaatcggctcgaacagttgctgctcggctgctttcgccggtatagccaacagtggcccgaagacagtggcgacttcatcatcagcctggccggcgccgaggattttcttgcccgcctgcagcgtctggaacgcgatggcctgccgcagcacgaagcgcgctttttcgagctgttgcagagccagagcaagaacaatctgctcgccttgcagcgccacaccgccgaagcacgcaaatcgatcgcccaacgcctggacgaggtcaacgccagcctggagcaggtgccgttcaaccatggcaccttgctgaccatcgaactcagcgatcggcgtttgccggaggtgatcgacttccatcaacgtctgcgtgatgtgctcggtcaccaccagaccgaccagcgtgacgtggccgaacagcaatttgccgtgctgcgcgaactggtgcgtaagctcggctcggccgatggcgaggacaagcgctggcgcgagctggtgctggatgtgcgcctgcatgtggagttcgtcggtgtcgagctggatgcggccacccgccagcaggtggagatctaccgcagcggcgccggcaagtccggcggccagcggcagaaactggcaaccacctgcctggccgccgcgctgcggtatcaacttggcggcgaagacggcgaattgccgcgctacgcggccgtggtactggacgaagccttcgacaaggccgacaacgaattcaccgccttggcgatgaacatcttcgagaatttcggcttccagatggtggtggccacgccgctcaagtcggtgatgacgctggagccgtttatcggcggcgcctgctttgtcgaaatcagcggccgtcacgactcgggcgtattgctgatcgaatacgacgaacaggcacgccggctcaagttacccgagcgctcgcgcagcgcagcggccgacggtgcggcgcgcgcgaccgagccgtccgccgatgccgtcggcggagcgagcgtcgatggactgcactga

SEQ ID NO: 41666 - DNA, 1164 bp, Xanthomonas oryzae pv. oryzae MAFF 311018
atgatgttgcctgccgctgcgctgctggccttgcgcgggcagtggcagcgcgcacgcgggcagtggctgatcggcgagggcgcaccgcaggcgatcggattgcgggcgccgacccaggcacaggccatcgcgcggttcgatgccttcggtgcgtggttgcaggagtggagccgcacaggcctgccggggcgggtggagtatcgcgcggtgagctggacgcagctggggccgcagcgcctgccgcagacctgggtgctggacgatgcgggccaggccgccggcgcgcttggcgagggcgagcgctgggcgcgtgcccgccaacgcagcgctgccttgcaggcgcgctggccgcaggcggtcgcgctggcggcgcggctacgccgtcaattcgatctgctggccgactggccggaggtcgagttcgcacgcttggtggcggtggtggagtggctgcaccagcatcgcgacagtggactgttcctgcgccagcttcccatcgccggcatcgacagcaaatggatcgaaccgcatcgcggcgtcatcgccgactggcttgccggcctgcgcggcatcgccgagccgcgcagctttgccagcctgtccggcctgcgcaacgcgccggatcgggtgcgcttgcgattgctcgacccggccctgcgccaccacatcggcggcctggaggacatcaccgcaccgatcgcgcagatcgccgcgctgcgtctgcctgtgcgccgcgtgctgatcgtggaaaaccgcgaaaccggtctggcctgcgaatcgctgccgggcacgctggtgctgatggcgcgcgggtacgccgtcgaatacgtgagcaatatcgggtggctgcgcgaattgccgctgtactactggggcgacatcgacacccacggcctggcgatcctgcaccgcctgcgcacgcacgctccgcacaccaccgcggtgttgatgaatgaggccaccctgcaggccactccgcgcgcgttgtgggggcacgaacgcaggccgcaccgcgcccaacgcctggctgcgctcagcatccaggagcagcgcctgtatgcggacctgcgtggcggccggttcggtccgtcgccgcgcctggagcaggaacgtatcgcctgggactatgcctggccgcgcatccaggccgcattggcggactga

SEQ ID NO: 41667 - DNA, 1443 bp, Desulfitobacterium hafniense Y51
atgaagctttttgagattctgccggaaagtttttttcagctttttacgggaaaaaacagacaagtttatgcggaagccctcttgctcctctatgagcaatatcaggtgaaccgctttggcgttgactatgaagtgatgcgggatcttctgcaagagctgatcgagacccaggaaagcctgggctattcctttgaagttgaagaaggggaggaagctccggaggcggacctcttccggacccaggtcaattccatcctgcgccgcctgaaagttctgggctggctggatgtggagacccgggacaattttaaacagtacatccttctgccccattactccagccgcatcctgcaggtcttcaaagagctttgtgaagaacggaccgtggaattccagcgttttgcttttgtcacctatcagctgctgaccagtgaagaagccaaacgacgtccggcctttgccatgatcgaggccgagaagaccaccgaacaatttaccggcgagttaaccctgctcgccaacaatatgaagttccacgccgaacaggtggcggccaagaccagcatccaggaagttctggatcatcattttgatgagtataaaaccaagattgtcgacaagagctaccaccgtctgaaaacttcagatcatgtctcccgctaccggcaccagatcctggagcgggtccggaccctgctcatcgatcaggaaatctttcaggaagcggtggaggacggaatccgcagcgagttctttgccacccgggaggaggccgagcataagctgcgccaggccctgttaagtgttgaagaagtctaccgggaactggatgaggtctttaaccgcattgacctgcggcacaatcagtatttgcgcgcctccttcgaccgggcccgctatctgagccagcactcccaaggggtggatcagcgtctggcggaaattttggattggctgtcggagcgaaggtcctcaagcaaggatattggagcaaaaatccttggcccggaggggctccgcttcctcaccctttcccagctgagcgaaccttctgtttttacaccgcgcaaaaaacgcctgcctcaccaagcggaagatatcgaggtcatccagctatccccggaactcaaagctcagctgcgggaagaatccctgagcaaaatgcgccggaacatcacccgggaaaaggtgcgggactatgtcctggctcacctgggccagcgggaaaccatggggatcgccgaactggctccgcagaatctggaggaattcctctacctaacctatgtctatttatacggttacgacgggggagccggctacaccctggagcgggagtacaaccgcgtcctggagatcggcggctaccgcttccatgatcggcaaatccggcgcctgaccgccaaaaaggagggatctcaccgtgttcgagcaactcagtga

SEQ ID NO: 41668 - DNA, 438 bp, Desulfitobacterium hafniense Y51
ttggatgaacgccatgaatgtatctatgtcttttccaaggaaggagctcaccggctgaggctttcccaggaagaaagcattgcccttttggttttgcgcctgatttatcaggagaagcggcagggggtgctgctcacggcctttcctctcaccaccaaatatgaaatccgggccaagtatgagaccttccgcttgccctttccggggaagacccgctttttagagacgattaaactctttactcaatataaactgcttcagtccctcgatgatgaggtgaacctggatgagtgccgtttccgtctctttcacaccctgctctatgctttagatgcggattccatcgagcggattcacgaacggatcagagcctacgatctggagatcgatgaagaggagttattgtatgaaatggatgaaacggcttcggctcgttaa

SEQ ID NO: 41669 - DNA, 3480 bp, Desulfitobacterium hafniense Y51
atgaaatggatgaaacggcttcggctcgttaattggcattattttcaggatgaatccctggaattcggcaggcaaaccctgatctccggacgcaacagcgccggcaaatccaccattatcgacgctttgcaggtgcttttcatcgccgatcagcggcaaatccgctttaatccggccgcccatgaagaggccaaacgctccctgctcaattatctgcgggggaaaataggcagtgatgaaaaatctttcgtccgggagcgggattttacctcctatattctgggggaattctacgatgacaaaacccgcaaatcctttgccatcggcgctgtgatggacgtgtacagcgataacaagatcgacgatgaatttttcatcattcccgatctggaactggctgagctggagattcaaaagggcaaaagaacctatcgcaataaagaagaattccaccgttatgctctgggcatcaggcccaagacccagtttttccggggcaggcaggagtatcagaaggccttcctcaaccgcatgggacagctggaacggcgtttttaccgcacctttttaagggccttatcctttaagccgattcaggatatccgggaatttgtgtatcagtatatcctggacgagcgggagctccagcttaacatcatgaaggagaatttcgaacttcatgaacgctatcaacgggagctgaaagatttagaggagcggaaaaccgtcctggaaaaaatcgcccggcagcatgaacaagccatcaaataccgggatatcgccgccacccaggaatatgtgatccggggtttgaagcatctggagatcacagagaaaagggaagacctggagcaggccattgcatcctcccaaaatgagctcaagagtgttaaggaacgggcggctcttaccgaggagcagcaccgggaagcccgggaacaggcattggagtattatcgtcaatggtccaatcaccagctccagaaggaaaaggaaagcctggaagcacggattgaggacatgcagaagacccttgccgatcaaaaacgccggttggagatttgggtcgccaaagtcaaaggggagatccggcttttggaaggtctggccaccgcttttgcggtagatggggaagtatggcggcaggaagaccggcgaaagctggaaaacgtcctgggtgcgctgcggactgccttggacttagccggccggcccaaccttgaatgggcccaggaagaccaggacgtattaggggaagaaatccggcaaagtggtctttttctggctgcattgcagatgggttttctgcagacccaaacccgcctggaagatagaatcagggaacaagaagcccagcaagagcgcttgaatcaggaaatccgcggactggagcagaagaagcgcccctaccgtgaagaggttctccggctcaaagccttgctggaagagcggctggcgggacgatcgccggtctggatcttctgtgaagagatggaagttctggacgaggccgaagcctggcgcaatgccattgaaggctatcttcacacccaaagattcgacctgctcgtcaaacctcaggctttctccgaagccctccgcatctatgagcaggaaaaatggatccatcgcctccagggggtgggtttggtggatacggaaaaagaagaacggtatctgggcaagcgggagtcaggctctttggccgcccttttgcagacagataatcccatcattcaggcccgcatcgatcatttgctgggccgggtcatgcaagcggctgacgagcaggatctccgccgtcatcacacagcggtaacccggacctgcatgtcctacaccaatctggtggcccgccagattcaaaaggaacgctatgagattccctatatcggctcccaggccatcgtccggcaattggaaatcaaacgccgggaactgaggaccgttcaggataacctcagacagctccaggcagagctcatcatcatgaaggaatgggtgagcagccttgctgacaggaaaaccctttatgaaggactggctcaagggctggagctgcccaagatggtggagcagcaggagtatgaactgctggaggtgcagatcaagctggaagagctggatctttctgaagtggagcgcttgaagcaggagtatgaggaatggcaccggcgggaaggtcagctggtggaagccatgaaggagctcagcgggaaaataaccggattggatcttgagatcggccgaaagcaaaccgacctctatctcttaacccgccgggagcaagaggcccaagagctgtgggacggctggaaagccgagtatgccccggaactctgggaaaaagccgcggagcgctggcaggaagcccaaagacaaacccagcctgcgtccacgaagctggtgaactgggaaggcagccaaaaagggaatgttacccgtaaacttcaggagtttggcagactccgcgacctgagacaggattataatatccgttatacctataatggcagtctggatggggaagacaacgcctcttaccaaagcctcctggatgaagtggcgggggtggatatcccggactatcaagtcaagctggcggaagctctcaagcagtcagaggaagaatttaagtctgatttcgtggccaaactccgggaagccattgagatggcccgtcacgaattcagtcagttgaacctggccctgaagaacttccccttccatcaggataagtaccattttgaagtccggcccagcagtcactataaacggttttacgatgtgatcatggatccggacatcgtgaaccggggctccttattcgattccttagctgatgataaagccgatactctccacgaactctttgaacgcctggtgcggggggaggccggagaccaggaggaatttaccgattaccgccgctatctggatttcgatatcgccgtcaccaccgagacggggcgttactatttctcgcaagtcctcaaggaaaaatccgggggagagacccaaacccccttttacatcgccgtgttagcctcgttttattatctttacaactccggaaaaaccctgcgcttagtggtgtttgacgaagccttcaataaaatggacgaagagcggattcagaccagcctccgcctgatcaagaaaatgggtcttcagctgattgccgcagtccccgatgagaaaatgcagcatatggctccggaagtctccaccaccctaattgtccaccgggacggtcaccactgctttatcgatatgatcagccgtgaggaaatgctggatagcctgaatggagatgaagagaatgctcaggattcccaggacgatggcgttgaggggaaaggggcagatacggagacggatgccgggcaggaggcagagtcaggcgtgagcgcagatccggcatggatgcagattcggatgcaggctcaaatgcagaatcagatacagagacaaacataa

SEQ ID NO: 41670 - DNA, 1254 bp, Desulfitobacterium hafniense Y51
atggaggacaaggaagtcagggaatacaaaaagaagattctcacccttttattgagaaaataccaaaacagcctcagcttccaaacgggaacccccggcaagcagcgtcctcaactgactatggccaagtctgaactggccgcggattatgaggacgagctggatttccgcaagcgggagtggatccatgccgccttgaaggaactcagccgggaagggatcatccaggtaacctggccgaagctgaaagagcatattcaagtccataaggtctatctcaattttgcaggggtagagcgggcttatcagctgctgggggaaacacccctggaagataaactccgccggctgaaggagagcctgtctcccctggctgctcatccctgggtctgggtgagaagctggcaaagggagacctgtgccaggctggaggaaagaaaatccgccggactggatgcagataatccccagggctatgatgatctggttaaggtccttaaggcacttccggaacttgaggacagcaccccaaagcgggtattcagccaaagcctttttcaggacagcaagtactttgaaaagaagctggaaggacggctgatcagcctcctgcgcaaaatctatcccgaggaactggatcaagacgaagactatctggaccaagtgggcatcgtcaataatccgaagctgaccctgcttgccggtcccttgatcatccacccggatcgggatctcagtcatttttccggcggtctgggtctgtcggcccagtcggtgaaggagctgatcattcaggatatcccggcccaaaccatcctcttgattgaaaatctgaccacttatcatgaagttctgcaggcaccgcccatcctcccggcaccggtgctggccatctatacaggaggatttccccacaagtccgcccaaaagctgctggagaaggtctccggctttttagagaaccgccgccagggccaagggctggagatcttccattggggcgatatagactatggcggcattcgcatatttgaatacctgcgcagaaatttctttcctaatttaaagccttatcggatggatggggtgacttatctggagtacgaaagtgcaggcctgccttttggagaggatcaggccaagaagctggcagccttattaagtgatcccggctatagtgattggcatgaggtgatcgggctgttgctcagctatcggaagcgggtcgagcaggagggtattcgggttggctaa

SEQ ID NO: 41671 - DNA, 1497 bp, Bifidobacterium adolescentis ATCC 15703
atggaacggctccggcccgtgtatgagaccggggtgctgcgattgctgctgcgcggcaattccatgctgtacgtcgcgctgctgcgctccacgttcgacccgctcaccggcgagctgccacgcgagatcgtcgaggaacggttctcccgcagtctgacccgacttgcggaaacgggcgattacacgcccaaggaagggcagacgtccgcggaagccgcgcacacgatcctgcagcagctgacgaaggaaggcgaaggcgactacgcctggctcgccaattcgctcgacgtcgcagcccaccgctacctgtaccgtctcacggcgcgcgcccaccgtgcgatcgaggcgctcgaccggctcgaggacaccacgaaagcgctgtccggagcgcaggccaacagcatcatcatggagatcgagcatgcgcgcatgcagctgaccgtcgatccccgcgaacgcatccgcctgcttgaacgcgacatcgaggagcggcaaaagcagatcgacgaattgaagcacagcgacacgttggacaggctcacctcccagcaggtgggcgacatcatcggcgtcatccacaacacgctgcgcggcgtgccgatcgacctgcgcgaactggcgctcgaggaacgcgacaacggcgacaatctgcgccgaagcatgcagtcgggctccatcagcgtggagcaggcgctcggcacctaccatgacgaataccacaggtcgttccacgaatccgacagcggccggcgtttcgaggacgcgttccaggtgatcgtcaccgacgagggacgccgcgaaatcgacgaggcggtgcgagacatcgcccagaacccgtatctcgagggcgagcctggcatcctgctcgcccaggtacgcgccgaactcaaacgcatctacgagggcatcgaggacgtgcgccggcagatccgcatatccgacgaggcggtgagccgtctggtgcgccagcagaccgacacgcattaccgcaccatgctcgacaagctccacagactgttcgtgcgggccagcgacgatgcgaagacgcaccccggctcggacgaacgcccataccgtacggacaccggtacggcgcagttccaggcattgccgtccaggccggcgaaatcgatggcgcgcgcggccacggccggattggacgacgcgccttcgacgaacgtcgacgcgccggacctgaaggccatggtcgagatgtgcggcccgcggctgacgcacatgatcggactcatcaggcgcgatccggtcaaaacggcggacggcaggttcgtggatttcgcggcgagcttcaaccggctgccccaggaggaacggcgcgaaagcgagctgatcggcttcctaagcgccctacgcacgcaggacggaccggcaaccgtggcatggcattgcgtatccatcgacggaggcgagcgcgtgtggcgcaccaggccgatcctcaccaccgaggcggcgcttgacgagatcatcgaggagggatga

SEQ ID NO: 41672 - DNA, 840 bp, Bifidobacterium adolescentis ATCC 15703
atgacggacaacaccgacggattcgacactggcatcggcatcgaagaggagacaggcccggaatccggcatgccgtccgaagggccggatatgacgagggacaggccggcattgttcgacggggatacgggagacatgcctcttgaggcgcgtatggccgcgatcgcgctgaaacgcgaacgctacatcgacggcagcctgtacgacagggcgtgccagtaccgtgaggccgtggaacggtcgttgaacaacgacatgctcagactggtcgacaacacgaaataccggatcatgtacgcgtcgccggtcacggacgcggagacgaacatccgctcgttgaagacgcgtgtgagcctcacccgcgaggaggccgccacgctcgcggccctgcgcatcaaggtgctggagtacgagaaccagaagacgaagccgggcgactggctcatcagcttcgacgacatccgcgcgctgctcgccacgggagcgggcttcctcacggccagcaacgacgaggagggcacggcgaagaagatcacgtccgtcatctcgcgcatgcgcacctacgggtatctcgcggaaacgggggacgagaacatgtacgtgctcacgccattggtgccgatggtgctcgaccagaagctcgccgaccggtggctcggctccgatgatacggacggcgatggtatgaaagacgcggatggcgatggttatgacgattcgtccatcggcgcggatggtggcgatacttccgattcgaccgggacggtttcgtccggcgtcgagcaggacgcgttcgatttcgattcggccgatgacgcttttgatggggggaaacactga

SEQ ID NO: 41673 - DNA, 3447 bp, Bifidobacterium adolescentis ATCC 15703
atgaaaatcgtttccgaccgttggatgctgcaaagccggcagatcgtcaactggggctcctacggcggctaccacgtgttccgcccgtccatggacgatgcgatgccggtgaccctgctcgccggcgcgagcgaatcgggcaaatccacgctcgtcgacgcgcagatctcgctgctctacccatccggcaccccctacaataaggcgtcgaattcgggacgttcggaacgcaacgactacacgtacctgcgcggcatgatcggcatcagcgacggcgaaaacggtgagaccccgatcttcctgcgcggcagggacgcggacggcaccccgcagaacatctggggcgcgatcgtcgacacatacgcgaaccgcagcgacggaggactgttgtcctgcgcaaaattcctctacctgaccgcaggcgacgggccggacggactgcgccgccaatacgtcacctggaaccagaccatcgacccgcgcctcatggaccggcaccgcgacacgtcattcacgcgaggactgatggaacagacctacccaggatgcacgacgcacgtcaacgcgcaggcgttccacgcctccatctggcaggacatgggcctaagcgccgaagcatgcaggctcctgcacaagatccaatccgccgacgcgccctccaaactcgacgacatcttcaaacagggtgtgctcgacgtgcccgaatccatccggctcgcccgcgaaaccgtcgacgactacaaccggttcagtgagaacttccacagcatggaagacaaaatggaacgcgtcgccatcctgcaggacatacaagcccgctacggcgaatacgccaaacaagccagcgaacgccgcgaatacacgcccatcgaccccgaccgcgagcaaggcgagacgacgctcgccgcatggacatggtcgcgcatggccagcgaagtacgcgccggactgccatcggcgcaacgcaaagccaaggaatcccaggacgccatcgaccggtctcagcagcgcatcgacgaactcgacacgcaaatcgaagccgtcaaagaacgcatgaacggcatcgacggcggcagcctgcagcaactcggcaaggacttcgaacgcgcacgccaggacgccgacgaggcgcgcagacaacggcacgccatcgccgaacggttcgaacgcgtcgaaggcagactccccgccgacgagcagacatggaacgccaaacgcgccgcgctcgccttgtcgctcgacacgtacgacaagcgtttggaagacgcgcgatccgaataccagcggatggtggtggaacgtcacgcccggcagggcgaacgcgacctgttgaggcaggattaccggcgcaagatcgaacacaggacgcgcatcagcgacgacatggaccatgcgcgcacgctcatcgcacgggcgacgggcttggacgagacggaactgccgtacgtggccgaactgatggacgtggacgagggggacgagcaatggcgtctggcgatggacgtcacgtacgcgcccatcgcgcagaccattctcgtggacaagcggcatgagcaggggttcgccgcgaaggtcagcgcgatcgatccgacgcgtatgacgcggcgtgcctggcgtttcgtcgataccgacgcgcaatacgattcggcctgcaacgaggggtggatgtcgtcgaagctgcggtacaaggaggattcgccgttcgtcggatggttgaaggagcagaccgcgtcgcaacggttcgacgcgcgttgcgtggaggcgatcgacgacatggaccgggccgaacggcaggtgcaggtcgacgggcagatcaaatccggcgaccatggattccatggcgtcaaaggcctgcgtcaggtcatcggcttcgtgaacgaacggtatctggccgaattggaacgccagcttgacggggcggaacgggcgttggaggacgccgaccgccgcggcaggcagatggccaacgccatgactctgctgcaggacgagcatgagctcgcattgaccgtcgcggatctgccatggggcaagatcgacgtggacgggctcgagacgaaggcggaacggatccgtctgcagatcgaacggatcgaaagcgatccggaactggcacaattgcaggacgagttgaaacagctgctacggcagaaggacgacgagggcaagaccaggtaccgtgccgaagcggaattggaaaacgcgcagcatgccgtccaggccgaacaggcatggctcgacatgcatggcgactccgatttcgacgatgccgcattgtccgacatggtgtcgaatctgctggccgacacgtatgagacctgtttcgacacgtcgcgtccgcaggaacggccgcagcgcatcgccggcggtttcgaccgtgaggggacggcgccgttcgacgtgcgcgtgctgcgcagaatcggcaacaccgtgcgtgcgagactccagcagatcgacgagcgtgccgtccaattgcgcgccgacacggaacgcgccatgggcgactatctgaagcaccattccacggagggcgacaccgtcatggcgagcgtggaggactatccgtatttccttgacgagctcaagaacctcaacatgctcgtcacccgcgccgcgaccgacgaggagtatgcgaacagcgtcgaaaagctgtatatgagcttccaacagctcaaccgcgcgttcaacaccgacgaggagaacgtcagggagcagctcgaccgcatcaacggcatgctcaaaggccaacagttcggcccccgcggcggcaggctctcgctccacgtggacttccacccgatcgaccggcagttcaaatcctcgttgggccgcatcatgtcgaagctcgacgattggacacgcaacgcgcgcagcaatcccatggagacgcgcaaggcgttcgcaggctgcgaaacgttcatcggcaggctccaggcggaactcggccagatccgcgacacgaacggcatcaaggaatacggtgcgcgcaacctcgatccacgcgtgcgcagctcgttctacgcgatcgtgcaccataacgatctgcccgacgaacgcatcagctccaccggcggcaagtccggcggcgcgttgcaggaactcacctcgttcgtctacggcgcggccctgatctacctgctcggcggcgacctgaccggcaagcccacctacaccacactgttcctggacgaagccctcatcaaagccgacggacgctacacgaaacgcgcgctgaccgtgctgccgcgcctcggcttccagatcatcgtatccgcgccggaaagcaaaaccgccgaaatcctcagcatcgcagacaaagcgtacgtggcatacaaggatcccgcaaccggcaactcgtacctgcaggagctcgaccgcgagccggcaacgcaagccgaaacacaagacgccaccgtcgaacagacgcaacccgcgacggaggcataa

SEQ ID NO: 41674 - DNA, 867 bp, Bifidobacterium adolescentis ATCC 15703
atgagcgcgctcgccaaagaattcggcctcgaaccggagaacgccatgaacgtcgccaaaaccctcaaagaccacgacgacaccgacttccacctcgtcatccaagccgcccactacttcgcaaaccacgactgccacaccatgaccccacgcatggcgcccatcccaggattcagcgccaaatggctcggcacacccaactcccaacgccgcaaagcgatatgccagctcaccggacaagacaacctcaccttccaggaacgcccgaacgaactccgactacgcctcatggacgccgaacaccacgaccaacccgacctcatcgtcacccaaccatgggtccgcagccagccaaccgacatcgaacacgccatcatcatcgaaaacaaagacacctaccaggccatgcccaccgtcgaacacgccatctgcatcctcggcaacggatacgccgcaacatcacacatcacaacactcctgccatggctcaccaccatccccaacatcatctactggggcgacatggacgccaacggactcgacatcctctccaaactacgcgccaccggcatcccatgcacatccatactgatggacaccaccgcataccggacatacgaacaatacggcacccaactcgacgccaaaaacaaacccctcaccacacaaaccccacaacccacacccggactcaccaccgaagaacgcaaactctacgaaacactctgcacaggaacagacatccaatacctacgcatcgaacaggaacgcatccccatacgcgacgccacaaccatcctgcacgaccaacaccactggccaatcgacatacccggcaacgacataccaaacaacaacaccaaatag

SEQ ID NO: 41675 - DNA, 1515 bp, Corynebacterium efficiens YS-314
gtgcctgtcgacggggtcctgtcccacccctgtggcacactgatttttatgagctcaatcgcccaggcgttgtcttttcaacggatcttgacggattctcccgccgtccgtctcctcgccgccaagaatgcacccttcgtcatggccacggtgtctgttcatttcggaggtgctccggctccacgtccggcttccgaggtgtatgagttgatggcggcagatctgaccgtgctgcgccagcgcgggatggatctgccgaagaccccggcggagtactgcactgactgggttcggagtggatggctggtacgcagggctggaagccagcggaccggcgaattgctggagcccgccgaggatgcgttgagcgccctccaggcggtacagcgctgggagaaaccacgttcggcagttaccgcatcccggttggaatcaatctcggaagcgttgcgtggcctggcacgtgatactgacccggacatctcctcgcgtctgcaacgcctccagatcgaacgtgaccgtctggatcgggagatcgaacgggtctcgcagggtgatttcgaattgccatccgtggagcgggtgtccgaacggctggaggatatcctgacctcggcgtcatcagtgcccgcagacttcgcccgggtccggcatgagtttgaggtactcaaccgcaccctgcgtcggcagttactggatcccgatgccacgcgcggtgacgtactggatgatattttcacgggggtggatgtcatcagcgattccgaagccggtcgcagtttcaatggtttctattccatcatcaccgaccccgaacgcagcgcctatatcgacgcctggatagatcagattctggccagcgaacccgcccgccatcttgaccaggacagccggatgtctctgcgcagtctcatccgggacatggaggaggccggggcggaggtgaactcggtgatgacgggtctggcccgctcactgcgacactatgtggccagtgaacagttcgcggaggatcggaagatgatcgaattgatccgtgagacccgcgccctggccgcggatgcggtcgaagagtcggaactgaatgccattcacgcgatggagactccactgcagcgtatcggcatgagcatccagtccgtcagttccatcgaactggccaaccccggcgaggaggtagtcgaaggtgagaccatcgtcaatgcggcgcagccgctcgacgtcggggagttactggccacggtccgccaatcggaaatcgacctcgaggagctgatcgactcggtccgcgacaccgtgacggcggaagcggggcgggcgacaatcagccaggtgctggccagacacccggcgacccaggggctgggcagcatcgtcggcttactccacctggggctccaacacggtctacccggcggccacaccgggcacgtcacctgggacgaggacggaatcacccgccacgccatcatcgaccagtatgccttcgataccaccagcctggaggagatgtag

SEQ ID NO: 41676 - DNA, 621 bp, Corynebacterium efficiens YS-314
atgtccaccattgatcccctatggaccggggacaccggcaccctgagcctcgactcgcgtcgcgctctggttcagcttctcaagggcccgttgatgcgcaagaccaggcatccggagctgtggtcagcggtgatcactgacacccaggccctgcgcagtcgcctcgcggatgtgttcctcgacctcatcattgacgaggacgccggcatcgccttcacccggatggcctccccggacaacgacctgaaaatccccgcggtgctgcgcgtcgaccggctgaaacacgtcgacacgctgatcctcctgcacctgcgcaatgaactgggcctgagcgccccgggcgagcgggtgatcgtggatgtcgaggagctgcgcgaccaggttcgttcctaccagcgtgcggatgacctggatgatgccgcctatgccaggcgtttcaacgccgcgatcacccggatccgcaacacctacaacctgctcgacgagacagaaaccaccggccggtatgaagtctcccccgtgctgcgtcacatcttcgacgttgacaccgtgaccgccctccgggatgaatatgcgcgctacgctgccggtacagccgccggtacaaaggagcagaaatga

SEQ ID NO: 41677 - DNA, 3363 bp, Corynebacterium efficiens YS-314
atgagtcccatctaccccggccaattccggctctcccgtatccaactgatcaactggggtaccttctcgggttacgtcgacatgcccattgcgaggcggggacacctcatcaccggtggttcggggtcgggtaaatccacgcttctcgacgccatggccgccatcctcgtcccgcccgtcaaggtgcgcttcaacgaggcggcacaacaggggctcagccgcgaacagggacgaaccctggcgtcatatatcaggggtgcgtggcgacgccgtgaagacgccgagaccggtggcatcgcatccaccttcctgcgtggcaaagccacctacaccgtcgtcggactcacctacgacgatgccgcgggcacggtctatacgctggtcggactgttctatctccgcgccggcgacaccgccaacgcccaggtacagaagttctacggcaccgtgcccacggacatggacgtgcgggaattcgagccttacctgaaggtcggcgtcgacaagcgcaagatcaagagcgccttccccgaggcccgtttcagcgaccagtaccgcgtttttgccgactatttccggccacgcctgggcatgcacaccgaagaggcccagctgctgctgcaccgaacgcagtcggcgaagtccctgtccagcctcgatcagctcttccgcgactacatgcttgaaccaccgacgaccttcgacatggccgacgaggcggtccaacagttcgacgacctgcgccaggcctatcgacgcgtcatcgacgtccgtgcccagatcgacatcctggaacccctcgtggggcttcgtgatcaccgggacgctgcccagacccgcagggaacacgccgcaaagatgaagcaggccttccccaccgtgcgcgacaccctgcacctggaaaacaaccgtgatcgtctggcggaactggccaccagacgcaccgctgtggacgcccgcgtggcgcaactgagggaggcactcgaccaggcgcagcagagagtgacatcggacacggcggcactccagtcgcggggtgatggacgcctgaatgtcattgaggaacaggaggcgagaatcagggaacgacgggaacgtcggtcagcggatcgagccagggtccagaaggctgtccaggccgtcggtggcaccatgcccaccgacgcggagaaatacgcccagcttctcgtccacgcccaggagatcacctcgaattcccctgaccggatcaggaggtgggaagccgagaagctcagcgatgaagtggaccgccgcgacctgaaaaacaagcgcgaggagcttgccgccgagctgagttccctggggcaacgcagcagcaacatcgaccgtcgctacatcctcgtgcgtgaggctctcgccgaggcattacaggtcaccgaacaggaactgcccttcgccggtgagctcatcgacgtccaccaggatcacctccgttgggaacccgtcatccagcagctcctggggtcctttgccaccacccttctggtcccggagcggctagcccacaccattaattcctacgtgaaccggaccagtctcggaatctgcctgatctaccgcgtcatccccgcccatgttgttgtctcccgggggtcgtcgagtcccagggccctgagcaacaaactccaattccctgatgcgccgatgtcgacctgggtgcgcaatgaagtactgcgcgatcatgactacgagtgcgtagacactgaacgtgaactggaggaactcggcacccatcagcagggtgtgaccctcaacggactggtgcgacaacgcacctacagggatggctcggtcggttatatcaaggacgaccgccgtcggctgggtgatcgttcctcctaccgcctcggttcctccaatgacgagaagatcgagctgctacgcgacgccctcgccacgctggatgcacagatcaccgccgccgggaaccggatcacggagaaacggcgtttaatcaccagtgaacggacactgatcgatcacgccagagacatcgcccagttcacctttgaccagatcgatgtcagcgtggatgatgcccacctcagctccctggcccagcagcgtgccgagatcctgtcctcgccggaactcgcgcaactccagcagcacgtcaccgaatctcagcagcgctacgccgaggttgattccgccttccggatcgctgaccgggaggccgggcagctggccacggagatcgacaccacgacccgggacattgcgcgcctggaatctgagttggctggccgcgcacacgtcgacgagtccctctcccgggagctgagcgcacgcattgatgtggagacgcgccgcgttacccagggcaatatcgacaggatcaccgacacgatcgtcggtgaactcgatgccacgatcgcctcctgcgaaacggccatcactcaggcgaactccggaatcacccggatcctggcgcggtatattgccgaatggcccgccgagaaggccgagctccaggctgatcccggtttcgcaggtgaggccatcaaccgcctgatgttcctgcgccgtgatcggctgggggatttcgagggccgtttcctcgacctgatgaacgagagctcggtgaagaacctcggcgcattatcgacctctctgcgccgcgcccgcggggacattgaaacccgcctgcacccggtcaacgagtcgttggggcgttccgagttcaaccctggccggtggttgcgcgtcgaggtcagggacaaccggaacaccgatgcccagaaattcatggacgacctcaggatggcgaccgatggtgcgatggctgccacccgcgaccgggacatcgccgaggcggagaaacgctatcaggtgctgtcggtcatcctcgaccgtctcggcagtgagaacgcggatgatcaacgttggtgtcgactggtgctggacacccggttgcatgtccgcttcatcgcctccgaggtcgacgctgacggtgccgtggtcaacacctacgtggattcggcatcactgtccggtggacaggcccagaagctggtgttcttctgtctcgcggcggcgctgcgcttccgtctagcagaggccgatgaggaccacccgcgctacgccaccgtggttctggatgaggccttcgaccgggcggacccggccttcacccgaaccgccatgaacatcttcaccgaattcggtttccacatggtgctggccacaccgttgaaactcatccagacgctctccccctatgtcgacggcaccgttgtcatcagctactccgagggcatcgatgacaacggcaacgacgtggccagatccggatgggctcacatcgactcttccgaggaggtgacggatgcggtttcctga

SEQ ID NO: 41678 - DNA, 1113 bp, Corynebacterium efficiens YS-314
atgcggtttcctgatgacgtctcgcagcgcgccggggtccattttcgttcccgtctgccgaagttgctcaccgacgatgcctacgcctggtctctgcccctgcagccaccaaccgccgccaccgcctcccgtgacttcgacaccgttcaggagttcatccgtacctggcaggcctggcgcggcccgggaagcatcaccgtggaggagaagcactggcaccgtgtgggcctgggtgtccagcccgtgccgacacgcatcagcacctcaacatccgcggagcttgccgagctcgcagggacaaccggagtcttctcggaactgcagcacaagctcgcgctgctcggcgttgagcacaccgagcgcgccgtggaggtggtgcccttgtggagggaccttccggtggaggaatgcacctgggtgccccgagtcgtggactggttccggcagcaccccgggtccggcctccgaccccgcgccgtggccgtcgccggggtgcatggcaaatggttggaacgtaatgcgcgtctggtgcgtcacctgctcggtgtggaggacctgggcctggtcaccggtgatcatctcgtccgcctgaggatcctcgacccctcgctgggaaccggggtgaccgatatcagcaccccggtcgccgaggccgccacgatgtggcccacggctggaccacggatcgcgctgatcgtggagaacaaggagaccttcctgagcctgagcaccgcctggccggggaccgtggctgtgtggggtgccggttacgcggtgggttccctggaccggctcccctggctgcaccggtgcgacagactcgtgtactggggtgacctcgacgccgagggattcgccatcctccaccggctgcgcagcagcttcgcgacggtggaatcggtgatgatgtcaccagccgacgtcaaccgctgggcccacctcggtgtccccgacccgggtgatcccaccaccgttctgccgcttctcaccccatcggagtccgatgcccggcgggccctgctcacagaggggaagatccggatcgaacaggaacgcatcccctgggataccgcgcacaggaccctcgacgaggtgctcggcctgactgactga

SEQ ID NO: 41679 - DNA, 1488 bp, Corynebacterium glutamicum ATCC 13032
atgaccgttgtatcgcacgcgcttgggtttaagcgatttaggcaggaatccctggagctgtctttgttgcgcagtgacaactttccggtggtgctcgccgtggtagcgcagtattttccgcagggggctatcgctaagccggcctcagagctgtatcagctgctcagcgatgattttcgggtgctgcgtgaagaaggatttgagctgccgaaaagcccgtcggattatgtgagtgattgggtgaagtcccggtggtttgtgcgtcgtccgggtagttcgcagactggtgagaccgtggaaccgagtgaagagctgttggcggtgctggattcggtgcagcggtgggataacccgcatcgaagcatttcggcgtctcgaattgaatcgttgacgcaggcgttgcagactttggcgttggaatcggaccccagcacagcgaaacgtttagctgagttagagcgtgaacgcgacaggattgaacgccagattgaagcggtccacgctggtgaatttgaagtcctcaccaccgtgcagattggtgatcgggtagcagatattttggatctagcagcatctattcctgcagatttcgccagggtaaggcatgagctgagcgatctgaaccggaagctgcgcaggcagttgcttgatcctgaagattcccgtggtgatgttttggaagagatcttcaggggagttgatctgattggggattccgatgcggggcgcagcttcaatagtttctttgatgttttgctcgatcgggaacgctcaagtctgattgatcgatggatcagagaagttctgggacgcgatgaggctattgatctggattcaaaattaaggacagggctgtaccgaattttccgggatatggaggatgccagcttcgaggtcaacggggaaatgacagggctggctcgaagtttgcgtcactatgtcactaccgaggagttcgcagagagccgacgcatgattcagttgcttcgcgatacccgcagtgccgctgctaaggccgccgaggctggtgaagtgacctcactcaatcacatggacacaccactcgtgcgcattggtatggatgttcgctcgattgcggggttgaaactgaagaacccaggtgaagaacgcgtcgaagatttgcctgagccagttgaagaacaagaactagacactgaagtcttgatggaacaaattcgggcaagcgagattgattttgaggaattggaagaggctgtttctttagttcttgccgagcaatcgcacgccacgatcaccgaggtactagaacatttcccggcaacgcaaggtctcgccagcattgttggattgttatacctggcgatgcgtgatggtgttcccacaggtcgcgcgcaaatagtggagtgggaaagtgatgatgccacacaccgccggcggattacaggatggcagttcatcaggggtttaaacagtgaagatttggcagaaagcgagatggataaatga

SEQ ID NO: 41680 - DNA, 639 bp, Corynebacterium glutamicum ATCC 13032
atgaatgatcagctgtgggaaggcgacactggaacgctgacttttgggtccaggaaagctctggtgcaattactcaaaggtcccatggtgaatgctttgcagcatgttgaagtgtggcgggctatcaccacagatcaagatgcgctcaatgctgtgcttaacaatttgttcctcgagttggttcttgatgaggatgcgggtgttgcatttactcggcctgccaatggtagacaagaagtattggttggaaataacaaaactgaagcgatgcccaaagtgctgcgcacggagacgctgtcgcattttgatacgttgatcattttgattctgcgccaagaactcaccatggcgccaccgggggaacgagtcattgtggatcgtgaagaaatccgcgaacaagtgttgctctaccgcgttgatgaagagcgagatgaagccaaactagctaagcgattcgacgctgcatttaggcgcatcgtggattattcattagctaaaaagacagagacacctgaacgttttgaggtctcaccagcactgcgccagatttttgatgccgacactgtggcaggtgtgcgcgctgagtacgaaaaatttaacaaagcagcccatgatggaaatgaagaggaacagaagtga

SEQ ID NO: 41681 - DNA, 3336 bp, Corynebacterium glutamicum ATCC 13032
gtgaccagcgaacaagctttagatcctatccacccaggtcagttccgtctttctcggattcagttgatcaactggggaaccttccacggaacggtggacattcctgtgaccagggaaggaatcttagttaccggtggttcgggatcaggaaaatccacgctgattgatgcgatcacggcggtattgcttccgcaaggaaagctgaggtttaactctgccgcacaggctaatactccgcggaataagggacgcagtttggttacctatatccgtggcgcttggcgtgcgcaggaggatccgctgcaggatcagattgtctccacgtacctacgtccccgcgcaacctattcgctggttggattgacttattccaacggtgaaggcgtcgagcacaccttggtggctattttctatctgaaatcgggacacaatttaacctccgatatttcttcatattatggtgtgtttcccgttgatcaagacatcaatgcgctgctggatttcctgaaagagggcatcgataaacgccagatcagagctgctttcaaggaagccatctttagcgagcagcattctgtattctccggcaggtttagaagccgtttggggatctccagtgaggaagctttgctgttgttgcaccgcgcgcagtcggcgaaagatcttcaaagcttggatgatctatttcgggattacatgctggtggaaccggatacgttcagcattgccaaaactgccgtggaacaattccaagaccttgaaggtgcttatgagcaggtcgaagatattaaacggcagatccacaccctggatcctttggtgcagctgaagaatcggcgagagaaagcgcaacagtccaaagatcatgccaatgcactgaagaaggcgctgccgactgtcgggaatcgcattaagaaggaagagcaagaaacgctggttcgacaatttactgtcgagcaaacgcaggcgaagtcgaaggtggagtccgccaaaattgagacagatcgtgcccgcgaaatggaaaccctcgcgcacgacaacgtcaaacaaattgtgggagcgcagcatggaattttgagtgcgaagagggagggggccgtcgataagcgaagaacaattagcactgcgcgcgctggtctggacgcattggttaaggggctgggcggtgcggcgccggaatcggcggaggagcttttggagctcaacaacgctgcgcggctgaccgtggatgagtatccggcggcgagggaagcgcttgaatctgcaggtcagaggaatgtagaggaccgaacccgtgcggttgatgagttcaaagcggcggatcaagagctgtcttctttgagtaaaggcagcagtaatattgagtaccgtttgctgcaggtgcgggaaaatttgtgtcaggatttgggcgtgagcccgcgggatatgccctttgccggtgagctgattgatccgaataatgcggaatgggaacccgttgtgcagcgcattttgggtggttttgctgcggaaatgttggttcctcatgggttgttgccacgggttcgggattgggtaaatgccaaacatttggcagcgctgctgaaattcaacggcgtggtgacaacgggggagtacaaaacctcgcgttttccggcggattccctgatccgaaaagttgatgttgtggagtcgccgtttcgcgattgggtaaatcaagaattaggcaagcgttttaatattcggtgcgtgcgcactcctgaggaattgtcggcgctggggccacgcgatcagggcgtgaccattttgggtgtgcgaaaatttgcgcagcagacaggcgatccgacgacgcgttgggaaaaagatgatcgccgaaagctgggggatcgttccacataccgtttgggttccaccaatgatgccaaggtggaaacgcttcgggaaaccgtgaaagctggcaaagcagttgtgcaggcagctgataatcgcattgctgcaaaccgcgctgagctgcgggaacttgaacggcagtatcaagcttcgcaagaaattttgaaagtgtcgtgggctcagattgatgtggaatcagccgacgcggcgattgctgagctggaccgattgctggaagagctgaacaacactccagaggccaccgagctttccgcgcggcatgaggcggcgaagcagacgctcgcgagggtttctgacttgcttgtcgcagctcagagtgaggaaaccgtggcgtcgatgaacctgaaacgcgccgaaactgaattgaaacggctcgaaagcctgccggttgcggaggtttctgaagaaatcgcgcgggaagtggagaaactatttcttgccaacacccgccgggttcacgccgccaacgtggatgagcagaccattgcgctgcgcgaggatctggacaaacaaatcgatgccaatgaggcagaacttcgacgttgtgaaaaccaaattgttggcattttgcgcagctatattgaaacgtggcctgcgaaccgcgctgacttacaagccgaacctgagtttgttggtgaggccatcaaccgcctcggcgagcttcgcagcgatcgtttggcagaattcacggccaaattcctagggctcatgaacgagatgtccacccgaaacctcggccaaatctcgcggcgtctacgtgatgcgcgccgggaaatcgaggagcgcatcgagccgatcaacgcctccttggcgcagtcggaattcaacgaaggtcgcttcctgcacatcgacatccgtgatcaaagtggtccgattgtgagggaattccagcagaaacttgatgccgctaccagcggtgacctgggaaccagtaccgagaaacaagccttcgcccgttatgcgctgatcgctgaaatcatttccaaactcgcctcccacgactccgccgacgcccgctggcgcaacaccgttctagacacccgccgccacgttcgcttcatcggcctcgagcgcgattccgacggcgcaaccgtcaacacctacgtcgactccgcatcactttcaggcggacaagcccagaagctggtgtttttctgcctcgccgctgccttgcgctaccagctagccgaacccggcgcccattatcccacctacgccaccgtcattctggacgaagccttcgaccgcgccgaccccgccttcacccgccaaaccatgaacgtcttccacagcttcggcttccacatggtgctcgcgaccccgctgaaacttatccaaaccctcggcgattatgtcggctccaccatcgtggtcagctacaccgaaaaaccaaacgcccagggcgcaattcagggcaattccagtttctctaggatcgagaaataa

SEQ ID NO: 41682 - DNA, 1203 bp, Corynebacterium glutamicum ATCC 13032
atgtcggctccaccatcgtggtcagctacaccgaaaaaccaaacgcccagggcgcaattcagggcaattccagtttctctaggatcgagaaataacatgccattgtttatcgacgacgccctccaccgcagcaaaaaatacttccacgcgcacttaagcgagctgctcctcggcgaatttgcaggcctcagcctgcccctgcacccaccgacggcagctaaagccgccgccgatattgatgccacgagggaatttatccgccaatgggaggggcgtgatgatgtggaatatgccattcgaaactggtctcctgtgggcttaggtaaaactgaagtacccgttaggctgacgttgaacacgactgaggaattagttgtgtttgcgcaggtagaggatgaatggtcttcacttcacgagaggttttcacagctgtctggttttacagcggaggtggtggcgaaacatgtgtcgctgtggcgttcgctgtctaacgatgatctctctaaggcagtgttagttgtggattggtttttgaaacaccctaactctggcctgctgaaacgcgccgtcgcagttgaaggcgtgcataccaaatggctcgaaaaccaccgcgtactcattgaaacgttagtggccgacaaacgtggtgaacctggtcgtgccgatcttggacttggtgacgccgaagctcgcgtccggctccgcttccattccgtagatgctcccgctgggctcacagacattgaagtaccgctttccaacctgtgtgaattacaagaaccgcaagtaattctgatggtggaaaacctcgattcatttctcgctttacccacttggccgggcgtaacaattgcttggggtgcgggctaccgtgcagtagacattgttcgaggaccctacttttctaatggtcggttgctgtactggggtgaccttgacctggacggtttcaaaattctcgacggcgtccgcagccatgttcctcacaccgaatccgtgctgatgaactctgaaaccgtctcccgctggcgctaccttggcgttgccgaccgagaattcaaggcagagagctttgacaaccttcatgattttgaatctgacgcacttgacctactcattacagacggtgagctccgcattgaacaagaacgcatccgcctcgatgttgctgttgaagaaatcgagaaagtaattcgtgggtga

SEQ ID NO: 41683 - DNA, 573 bp, Bradyrhizobium diazoefficiens USDA 110
atggacaagatcgaagatttccgcgaccgtctcgaacgccgcatccgcaccaccgtccactacatggacgtcatgggagagggatccgctgagcggatcgtccggctgatcgagcaactctcgaagatcgggcgcgatgaagtggagatccgtcttgggtcgccggatgtgggcctgccgatcacatcgcttgcgctgtacacgccaccgcctccgaaggcaccaccggagcggacgcgcttcaaggtgccgaagcaggatccatatctgcgcgcctatgtcgaggccacgaccgaattcgaccggatggtgcgcgtgtccgaccagaggctgctcgagttcgcccggcggcagatgcagggccgcgatgccgtgtcgtccgcggagatcgagatcgagagcattccggacctcttcgcctaccgggcgctcccgaacctggctgcggtcggccgctctgtgcgacttggcgaattcacgatcaggctcgacgaggggcgcaccgccaacgactggatcgacgtgaccgccttccggatcgaaagaacgaggaccacggccgatgctgcgtga

SEQ ID NO: 41684 - DNA, 642 bp, Bradyrhizobium diazoefficiens USDA 110
atgctgcgtgatctttctaaactcatcgacgacgcggactccgagggacacgacggcgaccagttgcagaaggaactgcggcaggcggcacagtcgctttggcgcgcgcagttcatctatgagaacgactggggcatgaagacctcctacgaagtgctccgtcgccacatggggtatttcgagaatctgttcgatgcgctcgggtaccgggtcgtgggcaggccgaacgacggctacgtcggcctggtggcgaacgagctgccccctcgtcagagcatgaagctcgatgagagccttctgcttctggtgctgcggctccactacgaagaggcgttcacgcggttcgaggccaaggaattcggcgaggttgaggtcgagagcgagcagatcctgcagatctacgaagatcgcacgcatcgcgagcgtccgaatttcggaagggtgaaggaaatcctggccggcttccgccagcgcggccttgtccgaatcgaggatcgggacgacaggaacttcactctgttcctgcggcccgccctgccgatcgtggtctccaaggatacgctaggatccctcgaagagttcgtgtcgcgctccatcccggcgacggcaaagaccgacgccgcgagcgaggtgcaggcgtga

SEQ ID NO: 41685 - DNA, 3501 bp, Bradyrhizobium diazoefficiens USDA 110
gtgatcgaacttcgtcgcatcatcctgatcgattggtacttgttccgggcgcagcaggtcgatttgcgcggcatgaccgccatcatcggtccgaacggtgcgggtaaatcggcgatcatcgacgccgtccagacagtgctctcgggcgcaagtatggccagcatccgcttcaatccgagcgcccagagcaatgtcaggagcaagcggactctccgcgactactgcctcggcgttgtctcgctcgacgagaagggcgagcgttcggagccgacgcgacagcatgcctacacctacatcatcctggtcttcgaggatctggccgatggctcggcggtgagcctgggcgtggctttttcggcttcggcttcgagaagcgacgagtcctgcgaggcgcgcttcatcgccaagggcgccatggcaaaggacgacatactcgcggcggtcggcgacgacgaggtcgagacactgcagtggcacgccgtacgcaccgcgttgcgagcgcgacatatcgaggtcgacgatgcgttctcaagcgctaccgacttcgtggcggaatcgctcagagctctatcgccggcagggtttccgctcgatccacggcgcttccagaaggcattccggaacgcgctgctgctgaagccggtggacaatcctacggatttcgtccggaactacgtcctcgacgttcagcctctccaggtcgacagacttcggctcggaatcgaacactggcggtcattgacccgtcgcatcgaggagttgagggcccagagcgccagcctagccggaatccttcgcatcgtcggccgtgccgtggaaaacgagaaggttatcgcaaccaatagctggcagatcgcgcgcctggaatgggagaagttctgccgggaagccaggcggcaggaagaggtcatcgcgcagtttcggagcgtggcaggtaaggcagaggtcgaggcggccgcggccgcggcccgacatgccgcgctcgaggccgagcataagaccgtcgagctgtcgatcaggaccagcgacgccgaacagcttgcccagatgtacgagtcggacaaggccgcagcgctgagccagcgtgccaacgccatggcgccgctcaaggacatcgaaggccttatcgcgtcgatcaagaaggccgtcgaactcaatctgctggttcgtcgtgacgatctcctgcatgcgctgctgagcgcggtcgtagtcgctcggggaagggcgccactttccgaatgggacaagacactgccgggcgactggaaagatagcgcttcgcatctcgacgcggcgctgggcgccgtggaccaggagagacttgcggcggtccggaagtcgttctcggacgctcatttcacggcccgcgtcgcgaccaaggaccttcaggatcgcatcgaccagatcgacagcaatctgaaacggatggaccaagggctcagccctatcgagcgtggcacccggaatctgatagatcagcttcgttcgcatggcatcgaggccgagccgctgtgcgatctggtggaaatccgcgacgacaaatggcggatggcggccgaggccgtcctggggcgctcccgtgaggcgctgatcgtcgagcccagtcgggccgtccgagccctggagatctaccggcaaggcggcgaatattcgttccaacacgccgaagtcatcaacacgacgaagaccgacggtacgcgccccgccgagaaggggtcgttggcgcagatcatcagcacggaaaaccggcatgcccgggctttcctcaattataggctgggccggctgatgatggtagagaccatggacaggatggtcgccgccgagaacgccatcacgcctgaccggatgatgcaaggtggccgtacggttcgaaggcttcccaaacctgaacacctcaagctcgggcgtgccacacaggggcaaatgcgtcagcagctcgagaccgagcgaaaagacctcacgatgcagctcgctgagcgggcgcgcgaggttggcctactggaagaagaagcacggctgttcgaggacatgtttgcccgcttccagaagacgatcgaagctggcctgacctgctccgaatgcggagccgacttggctgctttcgaccgcaagctcgccgagatcggcaaaaacatcgaggatgccaagcggaatcgcgaccccaagctcgttgccgatctggagcgtctcgcgggtgaagtggtgacggcgggccgtaggaaattggagacgcagaaggcctttgacgccgcgaagagcgcgcgagataaggccgagggcgcgtacgatgactacatgcaaaagaatagcaccaccgcgcgtggagctcgacgggaccgtgcacgtcagatgcgtcaagatttcccgcaatcgacggcgatgcgtgactaccgtccggaagtcgccagaatggcgacggaagcgataccgaacctcatcgacgggctgaccgcggacagagagactcgctctacgacaaggcgatccagcctgatgcgcgaaatgaccaacgcgatgaacaagcacggtcaggatttccatgtcgtgccgtcgttcaccgctgaagaggcaacgccgacggcagtagagcagtgggcggcgaccgaaaaggagcggctcgatggggacgagctagtccagtatgaggagcagtgccggaacgccgcgaccgagatgacctcggccttccgagacgatctccttcatcggctggatgacgccttcatgggcattcgaaacaccctgaaggagctcaatcgccatctggaagatcgccagttccacgggcgggactactactcgttcaaagcgctcgatgcgccaactcatgtcgacatgatcgagctcgtcgaagaatcccgaaagcctgaattcaacctgccgctcttcggcgaccggagcggggacgcgaattccccgatgatgcgcgcggtccgccagatcgaggagatactgtcgaatccagaggcgcggacggaggatatcgaggacccgcgcaagtatttcaatttcgagctctacatcaaggatgcccagggtacgatccggtcgtctctgacgagccgcgcgggcactggatccggaggcgaaggccagttgccgttctacatcgccatcggtgcctcgttggccgccacataccagaaccggcgaaccggggagagcggactgtctctcgcgatcttcgacgaagcatttaatcggctggatacgaaggcgatcggccagtgctcggacttcatgcgggccctgggactccaagtcgtgttggccacacccgacgaaaagcgtcacgtgttcatggaagtggtcgacaccgtcgtaaacgtgaatcggctgggcaaccaggtgatgatcgacaccgaattcttgaccgagaaggctcgcgacgcgatcgttgctatcgacccctaccgcaagggcttcgacgtgttcaagtccgagcggatcgcggccgagaaggccgaggctatcccgcgggaccaggccgctgaatga

SEQ ID NO: 41686 - DNA, 1206 bp, Bradyrhizobium diazoefficiens USDA 110
atgaccgacgttcggatgacagatgccggcgtcgaactgctcgaacggctgctggagcggagcgagcgcaacccttatcgctcgtggtcagcttctgcagctccagactatgaccggctttcgaccgcgcagcaaatgagccgcttccatgatcagatcaccgcggccgaaaggttcggttctgtcgaggtgaaatggggcaagagggaccagggccatctgatcgagcgcgtcgtcgtccgcgacgctgagctgctcgccaggcatctcggccgcccgactgctccggcgaccgcgcagcgcgtcagggacgaattgcttccggtcgcggcgaccggagaaccgtgggtcatcaccttgttggacgacatgacggctaggtgggcccgcagcgaggcggcttatcgcctgacggccggccaagtcgatgcagccaaggagttcttcagcttgctggcgtccatctcgcgagaggaggccagagggctggacgcgcgcaccttctctaaaaaggcgacgaacgacaccaaggccttcgataggcacgcttcgcggcttgccgcggttctcggtgtccggatcgggcagccgggcgcggctgccgatgttgtctggacgcacatcggactcgagcggttcagccatcccattcatttgagggggcctgtcgccgttggggaggctgacggtcgcctggtcgatggccgggcaaggccgttcgcgtccattcatccggagatgctgcagcaactctcggtcttggagcgtccgacgacgatcctaacgatcgagaactatgcgagcttcaatcggcaagtccgggagatcgaggacggcagcctgatcgtgtataccggcggcttcccggcggctggagtcgtcgaatttctggcaaaggttcttacggcagtggcggccgaggtgccgttccttcattggggcgacgtagacgccggcggcgtgcgaattttcaggtaccttgaggaaaacctgccgcgtgggccgcgaccgcacctgatgactaaggatctggccgagaaatcgggccagccggcggatgcggatccgagcttggcctcgatcgcaaggtccgacagcgcgctgcgcgagttggcggattggcttgcgttcggatcggatgtgcgccacttggagcaggaggcgctggatccggagcgcccatgggccgacgtcaccgcctcatga

SEQ ID NO: 41687 - DNA, 1557 bp, Bradyrhizobium diazoefficiens USDA 110
atgaggtcgggcccaggagccgcgtcattgaccttgttccgccatttgcatgacgacgcctttttagctttttcgcgcgatcacaagcacctgtacgcagcgtgtctgctggatctgcacgaacgcttcttttcaggcgcgccgtcgttcccgacgccgcagcaggtggtccacgccatctacgacgtcatgcgcgccaaccccgtcctctggaacgagggcgatgatttcggcagcctgccggaaatgatctccgcgagacgccgccggatccggaaggccgacgtcgcgctcgcttccgagaagggcgacaaggcgctcggtcttgcccgacaactatacgcccggctgctcgtctggggatggcttgaagaggaggaatacgggcttcgcgtcactgtggacatggctatgggaccgctgctcgtgctgcaacggctcgcgagcctcaacaaggatctctcgcagcgattcggcggcttgatcgtgcaaatccgcctcaacctggaggccgtcgaaaaactgaggcctgagatcaccgaccgcaagcagcgcgaagccgcgctcgccgtccgcgaggcgcgcaatcaggccgaccagttcactaagagtctgcgggccattctggccgacctgaagcgcgtccgacggaccgtcatggagtcgaaaacagtcgctacccggctcgaagcctttttcgaggagttcatcgaacagctcctgctgaaggatttcgagtccatcctcaccgtcaaccatccataccgcttccgcgacgccatcgtcgatctcgcgcggaggatctcctacagcccggaaaccatgcaggtcctcgccgaggagtacatagcttccagcatggcagccgacatcgaggacggtcgaatggccgcggccgacgacctgctggctatcgaaagcatcttcgatcagatcggggagatgttcgacaggatcgaggccttccgcaggcagctcgaagcccgggtccgcaacaccattaagtacgccgagcggggcgggcagggactcgtcggccgggccggcggcctggtgcggcgcctggatgccttactgcgcgacggcaggcaccacaaggcgacaatcgaatggagcatcgagccgctgcggtcgccctggtcggagcaccatcaggcgccggccaggcagccgcgccgtcccgtcgaagcaagggagctcgccgagccgccgtcggatccgttgtatgaactgcgcaagaagctccgcctcgagtacatcgctcgcatcgcgccccgccccgaggatgtcagacgattcctcgagggccaggtgccgccattcgcgaccagggaagcccgcttcatggaaatcgataccgtggacgactttctcgccttcgattgcgcccgccgatatgcgctgacaggcgaggttccggcgcaggtcgcggccgggttcgaactcgaaccgtgccccgacacgcccccacacgacagcgaatggctccgttgcgccaacttcctggtcaagcgatcgggcgcactccggaaggcgagggcggctcatgctcagtga

SEQ ID NO: 41688 - DNA, 639 bp, Bradyrhizobium diazoefficiens USDA 110
atgctcagtgagttcgaaaacgtcgagcgctccttcggcgcggaaaaggcagccgacctccgcaaagcgcagcacttcctgctacggcggcagttcgtgttcgcgggagacccccggaccgggacagtctacaacacgatcatggacggccgcttccgcgacgtggtcgacggcttcttcgatagttgcggataccgcgtccaccgcgatccggaggcgcagtgggccggcatcgtcgccatggacgaggacgtgccgctgccccggatgaagctcgacgaaaccatcgtcatgctggtgctggcggcatactggcagcaggaggtgaacgtcggagcagtcgaggaccgggccgtcgtagtggccactttgaacgacctgttcgatcgctaccgcgagatggcgcaacacggcggcggtggcgcgatctcggccgcccggttccgggacatcctgcgcgaggtcgcccaacgcagtttggtcgagatcggtgattttgacgacgagcagcaggactgcgagatcaggatccgtccgatgattaagctgatcagtggcggcgatgccctccaacggctcgagcgctacgtccgtagcgaggaggcgcggtttccgcagcccgcaggagacgaggcatga

SEQ ID NO: 41689 - DNA, 3435 bp, Bradyrhizobium diazoefficiens USDA 110
atgatggagctacgccacctgacgatggtgaactggcacctattcgacgtcgccgacatcgacgtgaggggacacgtcggggtcctgggcgagaaccggtccggcaaatccacaatcctcgacatggcacaggtcgttctcaccggcgggagccggcggttcttgcgcctgaacgcggtcgccggcgatagcggaaaatcgcgcagcggctcgaagcgcagcgtcgtcgattactgccttgggacgctcggcgaagatcagcgccggcgcgacgaggcgcgcacctacatcgcgctcggtttcgaagacacggaaggcgcccggtcaccggtcacgatcggcatggcgctcgaggcgcgcaagtccgacagcagggagaccgtgctggcactcttcgtagccgtcgggaccgttctgagctccaaggacttcatcgagcagcgaggaaagtcgcaattcccggcgcagtgggaggacgtgcgcgcccggatcgtcgcagcggtcggcgaaggcaacttcgtcaatcatcgcgaccgggcgagcgactatgtccgcgagtacatgcgccatcttctgccgcattcgtcctttggcgaacagaacgccagcgccctgcagaaatcaatcgtcaacgcgatgacgctcgatcacaaccagacggcgacgcagttcgtgcggaactacatcctcgaggacagtccgatcggcatcaaggagctgcgcgagtcgatccagacataccgcaacatcagcgagaccatccggaaaatgcgcctcaggctcgaagccctaagggcgcttcggggcgtcctcgccgcgcttgaagaggcgctcgagaccaagttcagggaggaatgggtcgcaaaacgcgcgacttggctcgcggcgcgcgcgacaaacctggacttcaagaccaagcggcgtaccgagatggcgcgccgggacgccgcagcaaaagaactcgaattcatcgacgacgacgtcaaggccatcgataaggagatcgaacgcctcacggccgcgatcgccgagcacgatgccaagaccggcagaaagtccctgcagcagaccgccgatgtggccgggcaggcggcgcaccgcgcctcggcggacttcaaggctcgcatggagaacatccgtcgcctggagccgctacgcgcgatgtgcgcggacggtttcgaggacttcgttcctgcgcttgagcgtcttctgaccgccaccgccggggccgacatcgggggcgtctccgacgaggtcaccgcggccgagaagtccttcgcggcaagcggcgccaaatggctgccgaagatcgacgaagcgcgtcaaaggatcatcgcggagctttccggcctccgcggcaggcgcgacgaggtgctcgaacggatccgacagcacgccgccggaggggcgcgcgcctatctcggcgacgacactgaactcctctgccgcaggctgcggcagggtggaatggtcccgcgcgtactctgcgacatcatcgaagtcgccgaacccgagtgggtaggagccgccgaggcgctcctcggtcgcgaccgggaagccgtgttcgtggacagagcggatatcagcgccgccacgtcaatcttcaaggaaggtcgccgcgagtttcgccatgcatcgctcgtgagcctaaacaagctcgagcagttcagggccaagccggagcgcggcactttcccctcgatcttccggagccaggatccggacgcgatggccttcatcatgcgccgctacggcaacgtccgtctcgccgacacgctcgaccagttcaacaggcccggccgggcgataatgaaggacggcctctacgacgacggactcgtccggagccatcgctggatcgaatcctcgcagtataagatcggaaaggcagcccaggcgaacgccctgcgatccctgcaggatcaggccgaggagctgggtcggatcctgatcgacaaggggaaggaggcccatgccgcggagcaggcttttgccgctctgaagaacatctgcgagggacgtaatgatctgggggcttgcgcggccgccttcgcggccgcgcagactgaggtcgctgaagctcaggccaggctcgatgccctcgacggcgcgggggacggcgggcttcgcgacaaaaagagggcgcagcaaaagctgaaggagaagaggctggaggagagaaagacacagcagaaggcgttcggcgagcatgacggcgaggtcaggtcggcggagaggaggctcggagagggcgagaacgtgcccggctccgaactcaacctcagggtcgcccggtcgatataccgcaagttcttcccactctactccaccgcgaaaggcagggccgtctaccgcgaccgcctcgatgccgcagcccaaaagggcttcgctgagaaacaccgggccatcgccgagaaggccttgaaggatgcgaatgtgtccgacaacgagcgcgcccggatcgagcgacgggtccgcgagcttctttacgattacttcgaccagttcgggatgagttcgcaggtcggtgcggaaagcgagccgctgcgggaggtgaagccatggatggagcagctgatctcggatatcgaatccaatgagctgcgccagtacgaaaggcaggcgcgggatgcggcggaaaaggcctctaccctgctgcgcggcgagttcatcaacgcgctcacggcccggatcggaaagatggagcgggagctgaaatcgttgaaccgtagcctctacgcacatccgttccataacgagcgatattcattccatcgcacccagatggtggaattccagcccatcctgaagatcatcgagatcgccaaaacctctccggaggcgctcgatatgctgttccggggcgacgtgcccgatgacttcccgcacaaggatacgatcgtcgcactcgaggcgctgctcgaggaccccgacaaggatttcacccagttcgaggactaccgcaacttctacaccttcgagatccacatggaggatgttgccaccggccgctcgacccgctgggagcagcggcgcggcaccgggtctggcgccgaacaacaggtgcctatctacgttgccatcggcgcttcgctggccgccgtctacggcagcgcggagcgtcgtgccggcaagcccgccggtttcgcgctcgccatgttcgatgaggccttctccaagatggacggcaagaaccagcggcagatgatgagcttttacaaaaacctcggcctgcagttcgtgatcgcggcgccgttcgagaagcgcgtcgccgtgctcgagcacatggacaccatcgtggaggtggaccgcatcggcgagcagtccagggccactgtggtggaactgaaagagaaggccaagcgcgagctgatggccatcgatccggacctgatgtccgaagatgagctcgccacccgtctggccgccgagtag

SEQ ID NO: 41690 - DNA, 1170 bp, Bradyrhizobium diazoefficiens USDA 110
atggctcggcgtttcacggatgcgatcggcctgctgaacgacctgctcaaccgcttcgaggcgggggccgcaagcccgatcgcccacccggactaccccgctttcccatcagtagtcgcggcggacgccttcctgaaacagatcagggaagccgaaagcgccggcgcggtctcccttggttgggggcggggccccatgcgcgaccaagtggcacatgtgcggctggcctcggcggagatcctataccgatatctccgccgtacccccgcgtcgcgcatcgcggaggatgccgctgtgcggcttgtcgccggggcggcgatgcacgactctctgaagaacagcgcttcccaagtcgccgaggtatgggggcgggggaaaacgtggcacggggttgcttcgtccgatgtcgagacactgcgcgacgcgttcgttctcgcccaggccatcctggctaacaaacatcttggcgtcgactacaagaccttctcgagacgaacggtggggcacagcaaaacgctcgaacggatcgaaggcgcggtcgtgcggctcctgagcggcatcctggagtttccccccggcgcgcggccacgcgaggcgctccgggcaatcggccttgagcgcttcgcgccaccgctgctgatcgcgggcaagatcgacctcgatggagccgacctctccggaatctctccgctgtatctcggaatcactcccaaggaagcagatcgcgtccgcttccgggagccgccggcctacgtgctaacgatcgaaaatttcgcaagcttcaaccggcacatcgccgaggcggaccccggccgattaggaacgaccatgtatgtcggagggtacccctcgcttgccacccagcaggcgctgcggacgatcgcaggattggtatccgaacagacgccgatctttcattggtcggacatcgatccggacggcacctggatcttccacaccatcgagcgcgccgtcgaccggccgatccgtgcccacctcatgagtgtcgaagttgccgagcgtttgggacaagtgccgttcaaaaaatccgcacccgctcgatgtccaccggactccggtatcgcagctctggcagcgtacctggcgaaagatggagccaagacgctcgagcaggaagaactcgatccagtcctgccagagtttcattag

SEQ ID NO: 41691 - DNA, 1470 bp, Xanthomonas campestris pv. campestris str. 8004; identical to SEQ ID NO: 41635

SEQ ID NO: 41692 - DNA, 708 bp, Xanthomonas campestris pv. campestris str. 8004; identical to SEQ ID NO: 41636

SEQ ID NO: 41693 - DNA, 3999 bp, Xanthomonas campestris pv. campestris str. 8004
ctgtcgccggcgtcgccgggtgcttccttgtttgccgagacgctggctgagcagcgtgcgcagcagtttcgtatgcggcgtttgcaggtacacaactggggcacgttcaacgggttgaccgaggtgccgatcgcggagaagggcttcctgttcgtggggcggtccgggtctggcaagtcgacgttgctggatgcgatgtcggcattgctgacgccaccgagcatcgtggacttcaacgcagccgcgcgcgaggccgagcgcagtgggcgcgaccgtagcctggtgtcgtatgtgcgcggtgcctgggccgatcagcaggacagcgcgtccggtgagatcgccacgcagtacctgcgcaagggcgcgacctggacggcgttggtattggagtaccgcaacgcgcaaggcgaggcggtgagcctggtgcggctgttctggatcgccggcagcggcaatgccgcggcggatgtgcggcggcattacatggtggtgccgcgcgcgttcgatgtggccagcgagctggagggtttcgatctggatctgcgcaagctcaaggcgcggctgggcgaggacgtggcgcatttcgacggtttcgccggctatgcagagcgcttccggcatgcgttgggcatcggcaacgacatggcactgcggctgctgcacaagacccagtcagcgaagaacctcggcgatctcaacgccttcctgcgtggcttcatgctcgatgagccgcgcaccttcgaagcggcagaccggctggtcgaagacttcgccgagctcgatggtgcgcaccatgcagtggtcaccgcgcgacggcaggtggaaacgctcagcccggcgcgcgagcaccatgccgcgctgatggccttgcgccgcagcgttggcgaattgcgtgaattgcagctgggcgtggacagctaccgcgagcaacaacggctggccttgctggaggcgcgcctgcaggaggtcgacagccaggaccgcggcctggccggcgaagaaggccagcgccgtgagtcgttggacaaccacgaacagaaactggccgggctggagcgcgaacagcgcgccgccggcggtgagcagatcgaagaactcgaacgcgagcgcgtgcgggtggaacgcgagcgcgatgagcgcctgcgtcgccgtgcgcagatcgagcaggcctgccgccagctcggcaccgccttggcggccggcgccagtgggttcgccgcccaggtggcgcatgcgcagggagtgctcgatggcggcaagcagcacgccagcacactggacgaggccatcgccgagcgcatgggtgaacgccgcgacgatgagcgccgctttgccgagatccgtgcagaactggacgcgctaaagaaagcgccgtcgagcatgcccgcaccgatgcaggcgctgcgcgcgcggctgtgcgacgacaccggcattgccgaatccgcgctgccttttgtcggcgagctgttgcaggtgcgcgaggaccaggtggcctggcgtggcgcgatcgagcgcgtgctgcacggctttgcgcagtcgctgttggtggacgagcggcattacgcgcaggtcagcgaatgggtcaaccgcacccacatcggcacgcggctggtgtacttccgcgtgcgccgcaatgacgagctgcattcgcgccgtgtcgatcccaacgcgctgcccggcaagctgcaactgcgcgagcatgccttcaccgagtggctgcgcaacgagctcacccgtcgcttcgattacgcctgcgtggacaacgccgcagcgctgcgcaatgccgaccgcgccatcacccgcgagggccaagtcaagcatcccggcgaccgctacgaaaaggacgaccgccacgccgtcaacgaccgcaagcgctggctgctcggtcacgacaaccgcgacaagctcaaggtcttcgagcgcgaagcgcaggcgctggcccagcgcattgccagttgcgacgccgacgtggccgcgctgcgcaagcaacgcgagcaggaccaggaaaaacggctggccgcgcacaccctggtggagcgcgactgggacgagatcgacgtcggccccaagctgcaacgcctgagcgatatcgatgaacaactgcagcaactgcgcgaaggcgatagcggcctgcgcgcactgggccaggcgatcgacaccgcgcgcacgctgcgcgatcaggccaagcgcacgtatgaagacgtgcggcttgagcgcgcgcagctggcacgcgagcgcgtgcgactggaacagcagcaggccgcctgcgccggccgtgccggcaccgctgcgctcacacccacgcagttgcagggcctgcaggagcgcctggccgcgttggcgccgctgtcgctggacactctggaagcgcatttccgtgtggtcgaacgtgggctggccgagcaactggccgaaagccagggccgcgacagccggctcagcgcgcagctgctcgaatgcttccgccggtattgccagcaatggccagaagacagcggcgacttcaccgtgagcctggccagcgccgacgatttcctcgcgcggctggaccggctggaaagcgatggcttgccgcgtcacgagcaccgcttcttcgacctgctgcagacccagagcaagaacaatctgctcgccttgcagcgccacaccgccgaagcccacaagggcatcaagcagcgcatggacgaggtcaacgccagcctggagcaggtgccgttcaaccgcgacaccatcctgaccatcgaggtcagcgaccgccgtctggccgaggtgcaggaattccagcagcagctacgcgccgtgttgtcgcatcagcagaccgaagaccgcgcgctggccgaagcgcagttcgccaccttgcgcacgctggtggcgcggcttggcgcgcaggagccggaggcgcggcgctggcgcgagcaggtgctggatgtgcgcctgcatgtggaattcatcggcgtggagctggatgcacagacccgcgcgcaggtggagatctaccgcagtggcgccggcaagtccggcggccagcgccagaagctggccaccacctgcctggcggccgcgctgcggtatcagctgggtggcgaagacggcgaattgccgcgctattgcgccgtggtgctggacgaagccttcgacaaggccgacaacgaattcaccgcgctggcgatgaacatcttcgagaatttcggcttccagatggtggtggccacgccgctgaagtcggtgatgacgctggagcctttcatcggcggtgcgtgtttcgtggaaatcagcggccgccacaattccggcgtgttgttgatcgagtacgacgaacaggcgcagcgcttgaaactgccggagcgctcgcgtggggaagaagcggcggcaccgccggccgaacaggggggcgctgtggcaccaggcgagcgcgcagaacgtgctccggtgatcgctgtggagtctggccacgcggcaagcgtgcacctagcggagaccacggcagtgcttgtgcagggcgatgcagtcacggacgggcagtcgcgcggccacaagcgcacacgcgcggcggccaccgcatcgacggcggcgccagtgcctgcgcccgctggcaagcgcagcacgtctgcagctgcaacatcagcgacggccgcgccagccacgggcacggcggacgcgtcgaacgcacggcgcaaacaggctgcaacccctgacacgccaccgaagccaaccaagccggcgagcacgcggtctgggtcctccggcacgcccgctgccaagcgcacaaccaccgcgaaagccgcggccgtgctgaaggcctccaacgccacgccggccgttgcggccaagcgcacgggcaaggcgccgaaacgcgtgagcaagccagcatcagctcagcaggtggccaaaccggtatcgaaatccaagcccacggccaagcccgcgacggcggcttccgccaagagccgcgtcgcgtccacgcgcggctctgctcccaaggcgcgcagcaaacgctga

SEQ ID NO: 41694 - DNA, 1449 bp, Chlorobium luteolum DSM 273
atggctctcgactataccaccctcgatctgctccgccagaaccatccggcctggcgcctgttgcgggcgcagcatgcgcctttggtatcatcgttcctgcaccgggcattcattgcgcccaatgtgcgcaccctctcagaggccgaccttgtcgaacagcttgaggacgaactcttcgcgcttcgccgtcagcttggagacacagcgtatcccggctctgcacagagctatctgaacgattgggcggagaatgacaaggggtggttgagaaagttctatccagtcggagaggacgaacctcattacgatgtgacccctgccaccgaaaaggctctggcctggctggaaagcctttccgaacgcgccttcgtcggcaccgaatcccgcctcctgaccctcttcgagctgttgcgtcagatgagcaccggcagccaggccgatccggagctgcgaatcgccgagctgaaccggcgccgcgaagagatcgatggggagattgcccgcatccatgccggagacatctccctgcttgatgacacggcgctcaaggatcgcttccagcagttcctgcagctggcacgcgagctgctgaccgacttccgcgaggtggagcagaatttccgtacgctcgaccggcgtgtgcgggagcgcatcgctctctgggaaggaagcaagggagctctgcttgaagagatcatgggacagcgcgatgccattgccgactctgaccagggcaaaagcttccgggccttctgggggttcctgatgtcgcagtcacgtcaggaagaactgagcgtcctgcttgacgaggtgctgaaccttccgccagtagtggagatgcatcccgaaccccgcctgaagcgggtgcactacgactggctcgaagcgggcgagcacacccagcgcactgtagcccgcctctccggacagttgcgcaagttcctcgatgacaaggcttggctcgaaaaccgccgtataatggatatcctgcacgacatcgaaagcagtgctctcggcctcaatggacagatgcccgaaggaagcttcatgcccattgccgatgcctcagcctcgatcgaactgccgtttgaacgaccgctgtaccgcccgcccttcaaaccggtaatcgaaggcattgcgcttgaggcgggagatgctgaaatcgacactgccgccctctacgcacaggtaatcatcgaccgcgcagaactgacgggcaacatccgcaaggcgcttcaggaacaaaagcagatcggcctcggcgagctgatcgccctccatccccttcaacacgggctggccgagctggtcacctacctccagatcgccggagagtggccccgtacggcagtagacgatgaggttgaagagcggattgaatgggaaggtgaaaacggttttatgcgacgggcaacactaccaagaatcatctttgtacgcaacgactaa

SEQ ID NO: 41695 - DNA, 636 bp, Chlorobium luteolum DSM 273
atgacaactcccatagacgcccaaaccccgcggccggcaacagcgcccgaggagctttcgcccctggtggtcaccctgctcaaaggagtcctctacgaggaggagaacactgcactctggaacgcgctgctgaacatgcaggcaggcgtacgcgattacatttcggtgctcggcctcgaactgatactcgacgaagcagagggctatgccttcctgaggtcccgcgcggcgggtgaagaggagagtcaggactccatgccgcgcctggtggcccggcgacagctctcctacccggtcagcctcctgctcgcgctcctgcgcaagaaactcgccgaatccgatgctggcggtggggacacccgcctgatcctctcacgcgaggaggtggtcgagctgatccgtatcttcctcccggcagggagcaatgaggtgaagcttatcgaccaggttgatgcatccctgaacaagatcgccgagcttgggttcatccggcgcctgcgaaacgacaaacagacgattgaggtacggcgcatcatcaaagcctttgtcgatgcacagtggctggccgatttcgaccgccgactcgacgagtaccgccaactcagcggaaaatctacggaggaaacggatggctga

SEQ ID NO: 41696 - DNA, 3366 bp, Chlorobium luteolum DSM 273
atggctgaagcacttgaactgggattcatctcagacgaccgactcgcaggtttccgcctccagcggatcgaggtgttcaactggggtaccttcgacagccgcgtctggacgctccggctcgatggactgaacgggctcctcaccggagacatcggctcaggcaaatcgaccctggtcgacgccctcaccacgctgctcgtcccgagccagcgcattatctacaacaaagctgccggtgccgatatccgggagcgctcactccggtcgtatgtgctcggcttctacaaatcggagcgacaggagtcacttggcggtggcgccaaaccagtcgcccttcgcgacagcagcgcctactcggtggtgctcggcgtcttccggaacgaaggctatgacaagaccgtgacccttgcccaggtattctggatgaaggatccctccggcccgcccgcgcgcatctatgcggcagccgaacgcgacctctccatcgcaatcgacttttccggcttcggcccggagatcaccgccctgcgcaagagactgaaagcgggaggcgtcgagctgttcgacagcttcccgaaatacggatcctggttccgccgccgtttcggcatcgacaacgaccaggcgctggagctgttccatcagaccgtctcgctcaaatcggttggaaacctaaccgacttcgtgcgcacccacatgctcgaacccttcgacgtcgagccccgcatcgcagccctcatcaaccacttcgaagacctcaagcgcgcacacgaagccgtgctcaaggctaaacagcagatctcgatgctcgatccgctcgttgaggactgcaaccggcacagggagctctccgcctccaacgaagagttgcgcggctgccgtgaaaccctgcgcccctggttcgcgaccctcaagctcgacctgctccaccaccgcctcacctcgctcgaagaagaactcgttcgccatgagagctccctcaggcgcctcgaagcagagcgactcgaacaacaggagcgggatcgcagtctccggctcaccatcagagagagcgggggcgaccgaatcgagagcatcgcctccgacatccgcatgaagcagggcgaactcgaacataaaaagctcaaagccacccgctatgctgagctgctcaagccgctcggcgaaacacccgccagcagcctcgaggagttcctccataagcgcaccctgcaggtaaccatgcgcgaaaacgcagccggacaggaagcaaggatacagaacgagctgaacgagctgggagtcaccctcacccgcgaagaacaggaataccgggagctgatggctgaaatcgagagcctgaaggctcgcacaaacaatatcgacgacaggcagattgcaatgcgacgcgacctctgccgggcgctgggcatcgacgaaaatgagatgccatttgcgggagaacttcttcaggtgcgccaggaggagaacggatgggaaggggccatcgaacgcctgctgcgcaacttcgcactctcgctgctcgttcccgaccgctactacgcatccgtcgccgaatgggttgattgcacccacctcaagggtcgtctcgtctacttccgggtgcgcacaccgtcccgcagcgaaacaatgccccccggccccgccaccctgccgcataaactcatgattaaggcagactccccccactttgaatggctcgaaggggagataaaccgccgtttcgacgtggtctgctgcgacagtcaagagatgttccgacgtgagaaaaaggcgattacgatggccggacaggtcaagatggcgggtgaacgccacgaaaaagatgaccgccaccgcctcgacgaccgcagccgatttgtactcggctggagcaacgccgccaagatcaccgtgctcgaagagaatgcccgtcaaaaaaacgactgccttggcgagctgaacagccggatgaaagcactccggcaggagcagaccgccctgaaggaacgcctggccatcctctcgcgcctcgacgagtattccgactttcatgaactcgactggcagccggtggcggtcgccatcgcccggctcgaagccgaaaagcgggaactggagagcacgtccgacatcctccgaaccctcaccctgcagctccaggaggttgagcaggaactccgtgagaccgagcgccaactcaacgagcgcaaaagcaggcacgcaaaaaccgagcagaaaatcagcgatgcgaaggaactcgcagaacaggccgggcaatgcctgaacgaagctgttccggaatctgcggaacgcttcccccgccttgaatcgctgcggctggagatgacggaaaaccgtgccatcaccatcgaatcgtgcgataactgcgaacgcgacatgcgcgactggctgcagtcgaaaatcgatgctgaagacaacaaaatcaggcgcctgaacgacaagataatccgcctgatgaccgagtataacgagaaatggaaacttgagacccgtgaggtcgatgtcaacatagcctcggccgatgagtaccgctcaatgctcggcaatctccgtgctgacgatttgccgcgctttgaagtgcgcttcaaggatctgctcaacgagaacaccatccgcgaagtggccaacttccagtcccagcttgcacgtgaacgagaaaccatcaaggaacgcatcggacgcatcaatgaatcgctcacaaaaatcgactacaatcccggccgctacatcctcctcgaagcggagatgaacctggatgccgacatccgcgagttccagacagagctgcggagctgcaccgaaggagctctcaccggctcggacagcgaatactccgaagccaagtttctccaggttcgccggatcatcgaccgtttccgtggacgcgatgagtacagcgaacttgaccgccgctggagggaaaaagtgaccgacgtccgtaactggtttgtgtttgcagcaagcgaacgatggagggaggatgatagcgaacatgagcactatgccgactcgggcggtaaatcgggcggacagaaggagaaacttgcctatacggtgcttgcagccagcctcgcctatcagttcggtctcgaatggggagaggtgcgatcccgttccttccgcttcgtggtcatcgacgaagccttcggacgcgggtctgacgaatctgcccattacgggctgaaactcttcgcccagctcaacctgcagttgctcatcgtcaccccgctgcagaaaatccacatcattgaacccttcgtctccagcgtcgggtttgtgcagaacaaggatggccggaactccgagctgcgaaacctcagcatcgaagagtatcgtacagaaaagcagaagatggcccaatga

SEQ ID NO: 41697 - DNA, 1212 bp, Chlorobium luteolum DSM 273
atgagcggaacaaaaaaggactggaccacccctgccgacatccgggaacaggtgcagaggctctgggacagggggacactgctcaacgccctggtggatgaccgggacctcttccccctgcgactcggccacagcaggccggactcacgagagatcagcgaccggtttatcgaggtacgcgactggatcgcccggctcaaagcagctgaagggccctaccgcatcgtctcgcgcaccctcaaccaccgggtgcacggcagcgacagcattccatacgagatatggatcgattcggcggacgacgccctcggcctcatcggcaaacgtcgcgccgctgccgcatttgtcgatatgatcgagttgacccggcgatatgagcccgctctgctcccctggatctcgaaacgaccccttcgcgctctggaacttgccacggtctggcccctcatgctcaacatcgtcgaatggctgcgccagcatccccggcccgccgtctacctcaggcaaatcgatattgccggcgtgcacaccaaattcatcgaacgccaccgcggcgtgctctcggaactcttcgacctcgccctgccgaagagttcaatcgacgaacatgccaccggcaccacaaacttctgccggcgctacgggttccgggacaaagcgctccgggtgcggttccgaatccttgattccgcttactccattctgccatactgcaccgatcaggaaatcacccttacccataccgacttcgcccggctccacctcccggttgaaaccgtcttcgtcaccgaaaacgaaatcaacttcctcgtccttccgcccatcccgcgggcaatggtcatcttcggagcaggctacggcttcagcaacctcgccgtcgtcagctggctgcaggataaaaagctttactactggggtgacatcgacacccatggtttcgccattctaaaccagttccgccaatacttccccaccgccacatcattcctcatggacagggaaaccctcctcgcccatcgccaatactggcagagagaaccctgcccggaaaccaccgccctccaacggcttaccgacccggagcaatcccttttcaacgatctgcggcagaataatctgggtgagcacatacggctcgaacaggaaaagatcggatattccatgctccttgatgcgctgagaaagaacccggccttatctgcatcatcataa

SEQ ID NO: 41698 - DNA, 1449 bp, Bacteroides vulgatus ATCC 8482
atgcaagtagaagaaataacacaaatattacgagagtcaccaagcgtacgactcataaaatcaagaagtgtggatttcttcttgtcttttgtcattgaagcgtttgaaggacaggcggctataatgcaggaacgcttgcacatgctactggagaaccgactggatgagcaggaaaatacgttggtggaggatgattctgaaatgacgagactagtagagtctaacgaacagaaagcgaaacggctcatcaaagactggacagacaagggattcttgaccaattatcagaacgaagagggagaggtgatatacgagatttcgtcacacacaagcaaattgatagattgggtggtgagcttgaaaaaagaagattacatcggtactgaatcaaagttcaagacactgttttcccaactgaaggaattggtggaatactcgaacgaggaccgtgagaagcgactagaattgcttcgaaccaaaaaaatggagatagagcatcagattcagcggctggagatgggcgaagaggtcgaggtttacgaggactaccagatagaaccacgatacaacagtttgaacaaactggcgaaggaactgctgagcgatttcaaagaggtggatgacaactttaaggggattatcaaagagatatacgaacgtcagacagaaaatgcagagaagaaagctttgttgaactacatctttgatgcatatggcgaactaaaacaatcgcaacaaggcaaaagtttctatgcattttgggagtttctgctctcggccgatctgcagaaagaatgggacgagttggctggtgcactctacaaaacgctggaaaatagaggcattgatgcacatgacatgtttctcaaggaaatgaaaaagcatctgtttgacgctggtgagaaggttgcgaaaaccaacgaccgcatgagcgagaaactgagtcgaatcattcgccagaacggacatatgaatgctgaggcgacaaagcaagtaatcaacgatataaagaaactactcatcgaagccagcagacggaaagaaaagccagatgcttcgcttgaatacgaaaccattgacatcaatctgccgctggagtgccctcttaccctcacacctgtaaaagaaactgtgtataaggataagcctgacatagccggactgagtctggctgatttggagagtattggtaaactctacaatccgtatcacatcgaccgaaaggtgctgagagaccgcatcaacgaggtgttgaacgacagacagcagacgaccctggcagaggtgatagagcggaacgaaggcgtggagaaaggtctgtcggaagtgtttggatacattggcgtgctgaaggaatataagacggtggtaagcgaagaacgccagcaacatattatttttacagaaaataaaaccatatcaattcccgaaattataataacaagatga

SEQ ID NO: 41699 - DNA, 585 bp, Bacteroides vulgatus ATCC 8482
atgaacgcagcaaatatacaaccatacagcagggctgtagtgaaactgttgaaaggcatcgtagagaaagacgatgtagtttggaatgatttactcgactaccaaagcgagattcaggactatatcagtgtgatgggactggaactcatcgtgaaaaaggatgaaggttttgcctttgtcaagcaaatgaaattggacgaagacaaaacattgaacatggtgtcgagaaggtcgtatggttttgaggtttcggtgatactcatcgtgttgaggcagatactcgaagacttcgacagcaatccaacagagtcgcaggcttcggacaagtatgtaactgctactgaaataaaggaagaggcagaattgtttcttcccgccacattcaatcgtgccaagtttgagaaagatcttgaccgctatatagacagcatagcaggctttggtttcctggtggaagcaaagcatattgagggtgagaagcgctataagatacatcgcatcatcaaggataaggtgacactggacgatatattagaatttaaaaacaaacttaatgactataatgcagcagatgaacctatttaa

SEQ ID NO: 41700 - DNA, 3402 bp, Bacteroides vulgatus ATCC 8482
atgactataatgcagcagatgaacctatttaataccagttcggaagtggcaggctttaagcttgactatttggaagtgtggaattggggaacctttgacaaaaaagtgtaccatatgaatttgcatggtaacaactcgctattgaccggagcaaacgcctcgggcaagagtacgctgatagatgctctgctcacgctgatggtgccactgaagcgccaacgattttacaatcaatcatcgggtgtggagaagaagggcaaccgtacagaggaatcgtacttctttggcaactatggcaatcagcagcaggagggtgcagcgagcacaaccacgctgagattgcgcgacaaaggggctcgttcggtattgcttgcatcgttctgcaatgtggacaagcgcgtggtgacgctgtttcaggtgcgctactacactggcgaggaactaaaggtactgtttggtgtagcccgagagtcgttgactatagagcgtgacttttcagagtttgacttgcatggcgattggcgcaagcgactgacgaaaaaatacaatacgaatgaaacaaaacgcacgatagagttttttgatggtccggtggcatatggcgaaaagatgataaccctcttcggtatgcgttcggacaaggcgcttacactcttcaatcagatagtgggtgtgaaagtgttggacgatctggacagttttattcgtacgaatatgctcgaggaactgccggctgaggagaagtatcaggaactgaaggacaacttccaaaatctgatggaggctaagactaatatcgataaggtgaaggagcagattgcccaactggaacctatcaatgcattgacagaggaactgaaggagatagacatacgcatagttgaaatggagcaggagaagagtgtggcagcctattggtttgctgcgcgaacggtggatttgtgcgacaaggagttggtgtgctgcaagagcgacttgaggaaactggaagataggttgaaggagttgaaggtgcagaagggtgagctggaacaagagcaaatgcgcttgacggtggctattgagaaggacgaggtgggtcagcagatacatgaaattgaaaaggaaatcaatcagagagtgaggatacgtgataaccgcaaggccaaagccgaagaatacgataagttggcaaagctggtgaagatggaacaaagtcctgatgtagaggtattcgaaattaatcgtgcgaccgccaaacgcgagaaagatgctctgcaagtgacgattgacaggcaacttatggaagagaagcgtcaggcacaaaaccgtcaggatgaaatcagtagcaacatagaagaacgaatggccaccatacgctatctgcagcagcataagaacaatatatccggtcgtgtggctgagattcgtgatgagatactggaagctgttggtgcaactaccgaagagattccattcattggtgaactgatatgtgtgaaggatgatgagcgtgattgggaatattccattgagcgtattcttcacaattttgcattgcggttggtagtgccggagaagtattacaagcaggtaaatgagtatgtgaatggtcataatctgcgaggtcgtatcgtgtatcagcgataccagggcgcagagactattcgtgagtttgaggataggacattgaaagcggattcgttgctccgtaagcttgaatacaagccaatgtgtttgtatttggattggcttgaggacaggttatttgctgagttcaactatagttgtgttgattcgcttgcggacttcaaccatctgcaagagaaagcagtaacaaaagaggggctgataaaggcgagaggtggtaagcatgagaaagacgaccgaccagagatacgaggcaaggaacactatgtgcttggctgggataacaaggagaaaattgccgtgttacaggcagaggtgcgtcagttgcagcaggaagaaaagatgacagcagctaaagtccgtaagctagaggaagacataaagaatgctcagaagaagcgggaaacctatttgacgctgtttagtaaatacgataaatttgatgatatcgactggcagtcgtgtgtactagtcattcagcaaaagcaagaacagaaacgacaactggaggaagccaataatcgggtgaagattttacaggagcaattggcgggggtgagaaaagaaatcggtttacttgatgatgagaacaatgaagctatcaaaaagaaaacattatcggagaatcgtgagaataagctcaaagaaaggagaaacgaaagtaattcagctttggctcaaataggcgtagttgatacggatacttttgagtcgcaacacacagatttactgaatgtggcattggaggatttgaacggaaagcgtgacacgttacaacatgagatcgatttagctttgcagaaacagcgtgaaacgaagagtcgcaagaatagcgatttgaagaacctgatttatcgcttcaagaatcccgcagaggaaattaccatgaagtatcacgattggcgttcggatgtgagccgtttgcccgaagccgtggagtttatgggcgaatatcaggcctattaccaacgattgcttgacgaagatttaccagggtttgaatcgcgcttcaacaagtatttgcaggagaatatcatcaacaaagtcagtgcattcaatgtattcttccaaaactggtgtcagtctatcaccaagaccatcgaccaattgaattcgtatcttataggcattgatttcaaagatgctccaaagacttatatccagttggtagcaaccaaacgattgaatgtggatgtgaaggagtttcaaaacctgctgagcagtgcaatacctaatattcatgagatgaattcaacaatcgatggaagcaagattcatttcgaacagcatattgaaccgctgatgtctcgcttacaggtcgaatcatggcgaaagtcggtgatggatgtgcgtggatggtacacatataagtcggaggagttttaccaagacgatgggcagaagcgtaacacctatgaggcgatggggcagctgtctggtggcgagaaagcacaattaacatacacgattctgggatcggctatcgcttaccagttcggattaaccaagagtggattagattcttcgttccgcttcattgcaatagatgaagcttttcgcgcacaggacgaggacaaggcacgctatctgatttcgctctgcaaacaactccatctgcagttgctcgtggtgactccgagcgacaatattcacatcgtggagaacgatatttcgtatgtgcattatgtggagcgcaagggcaactgttctgtgctctataatatgcctatcagtgagtttaaggcagaacgtgaaaggagtatggaagtatga

SEQ ID NO: 41701 - DNA, 1167 bp, Bacteroides vulgatus ATCC 8482
atgataacggcagtagaaatacgtaagaagactgaacgcaagtatgtagattatttgcgttcggtggtagctggctctgagtttgagccaattgtgatcccttgcgacaagaaggctagcgcatcgatggacgagtatcaacgtgaactgacggacatccgttcgcaatcgaaagaggtgaagggctttggttacacgattgagtggaaaacagtgaaaacgaaagcattgggcgaacaggatctgcctgagcgcgtgttattcgagagtgcatcggacattgagcgcttcttgcagaagtgtggtgaagtatcacagtttcgtaaggatgtggcaatgttgcttgatgagtttccgcagcttcgttcatgggtggaacgctatccgctgaaggtggtggaaaatgcttccttttggtctgatttgctgaaagttttgcgctattttgtggcaaacccttgtcctaggttgtacattcgtgaattgcccattgaggtgcataccaagtttattgaacgtaacaagggagtgcttcgtgagttgctggatattgtcattgtagagcatgtttgttcggatgagaaggtgttcgagaagcgctttggattgcgatacgatgagtcatgggtgcggattcgtgtgctggaagcatcgattgcgaatgaatacttttctggtgtagacgatcttacgatgcctcagagtcagttctgtgcgttgtcgttgcctgtgcaaaaggtgtttgtggtggagaataaaatcaacttcctgacttttcccaagttggcaggaagtctgctgatttgggggcatggattcaccattggcatcctcaagtccgttccgttcatgcggcacgcttcactatattattggggcgacattgatgcacagggcttcgaaattctttcgcagttccgcagttattttccccagacacaaagccttctgatggatcgcactacctttgacacatattttgaaggcgacaaaggcacaccaagcaatgtatcaaagcctctccatcttacccctgcggaagccgcactgtacgatcatgtcaagtttcacaacctacgtctagagcaagagaagattccgcaaaaatgtattaataatatattcaatagtttgttaaaaaatggccaggtaatatctgaggtctaa

SEQ ID NO: 41702 - DNA, 1173 bp, Carboxydothermus hydrogenoformans Z-2901
gtgggctggtttaatttagaagaggataatgactaccagcagtatgtaacgattaccgagcctgcccgggttatgttagaagctctggagaaaatagccaaccggcaaacggaagaataccgtggttatgtttttgctacttacagtgcattgtgttctccggaagccgaattgcagaaagatttggctttagatagcgcttaccgggaaacccggaatcttttaaatagcttaaagacgctaagagacaacattaaaggttatatcaaagaagcggtaagtaaaacatcggcaaaagaacttctaatccttcactttgaagaatatacccagaacattatcgaccagaactaccaccgcctgaaaacttccgaccatgtttcccgctaccgtccggcaattattaacaaaattaacgaatgggaaagcgaatatgtggatgaaataataaaactttaccaggagcgggataaagaaaagccggaagaagttattcggcaggagttttacgaaaaaacatcgtttatcagaactgcctaccgggaacttgatctttacctggaggagattgaccggtataacgctctttatgccaaaagttcttaccggcagcttaagtatctattggaaactgaccgggatttaaccaggacgcttatagatattttagattatatcgccggacaggtaatgcaaaaagagctatcattaaaagattatttagaacatgctttacctgtaaaacttaatgaatttaaattttttaacaatgatcccctttataaaccaagaagaccggccagcgaacaccggccggaacaaaagcttgtggaattaccactggagaagaaaaaagaacttttaaggaaaaccctggaagaagtaagggagcggtattcggtcgaggttataaacgaatttttcctggaaaaagcccggggacgggatgaagtggaagcggtagaactggtagaaaacctggaggattttatcaagttaatttatctaaatgcgtattttcgccataaaaaagcagcttatgttattaaagaagacaagcggcgttttgctggggagaaagtgcaaaagggaccttttgcgtttaaaaacattaagattgtaaggaagggaaaaaatggaagagcttcttttaatcaaggattattcgcctaa

SEQ ID NO: 41703 - DNA, 603 bp, Carboxydothermus hydrogenoformans Z-2901
atggaagagcttcttttaatcaaggattattcgcctaaaacccgggaagaatttacccgggcggtaaataaattgcttgcgcaaaattttgtgatccgggaccttgaagaggatagaaaagactattattttatctaccagcatgaaaaagaagtgcgagcttttttagagcttgccggctgggaactggtgcattttgcagcccagaggatttaccaggcggcaggtagcagtgattttaacaagcttaggttaaatttagtggaaagtttagtactcttaattttacgaaccctttatgaggaaaagcggcgggagctatctcttgcggaaaatccactggtgacggtgtttgatattcaggagagatttcgggaactgggaattaaagataaacctttggataagaaatctcttagagaatgtctttccctgttttcccgttaccggctgataatcctaccagatggagcacaaacttttcccgagacgagaatagtcttgcttccaactctggcggtggttctgaccgataaagatttgcgggcgtatctggagagcttgaagagcggtgatgcggagggagaagccgatgaaagttga

SEQ ID NO: 41704 - DNA, 3306 bp, Carboxydothermus hydrogenoformans Z-2901
atgaaagttgaaaattttaaagagctcaggggtataaagcttataaactggcattattttcaaaatgaaaccattaaactaaaaggggcaactcttttaaccggggataacggttccggtaaatcaaccatattggatgctatccagtatgttctggtggcggaccagaggaaagtgcgctttaattcatcggcaggggaagaacattccaagagggatttactggggtatgtgcgctgtaaaaccggggccgacggggccctggggaaacgggtactaagaaccggtgacgtaacttccgttatctgccttgagttttttgaccataagaaaaaggagccgtttttggtaggggtagtaattgatgcctacagcgatgatacgttaaaagaacagttttttatcataaataatgcttctattaacgatgactattttatcgttgatcagcggcccaggaatattaccgagtttcgcgctaaaatggggtctttaaaaaatgcagagcttttggccaaagatgcgtataaacatcagctgcggacaaaactggggcacatccatgaaaagtttttctctttatttgttaaggccatttcctttaaatcaattaaggacatccgggaatttgtctatgaatatttgttagagcccagggaaatcgacttaagaaatcttttagaaaacctggagcagtatgaccggtttttggttctggccgaagaaaccgagagaaaattacacgatttagaagtaatcttagaaaaacataaacagctaaaaaaagacataacgacccggaacctgcaccgctacctggtgttacggggtaatcttgctgatttacaggagaggtatcaaagccttattgggaggatggaagagcttgccggtgaaaaggcaaagcttgaggaaaagctaaacattcttacaaaaaggttgttagaggtacgggaagaaaaggataatgtcaataaagccctctgggaaaattcggcataccggaggttaacggagattgagaaagaaattaaagagctccaaggggaacaaaaaaggttaaaaaccttacaggaaaaagttcagacttttttacagaatgaagcaacaatatataaaaaatacggttttagccaggcagaaattttaaaagaaatggtcttaaatttaaggctaaaagacgtaaaagcgcttttaccggaacttataaactttcggaaaaatttaaaagaacaaacggcgcaggagctataccggatagaagccgagatttctactaaaaaggccttaaaacaggaaatcgaagaaattcttgaaggattaaagcaaaacaagcatacctatcctccggaagtaggggcgttaattaatcttttaaaggaaaagtttcgggaagaagcgaaaaaagaagtggagccgaaaatcttagcggagttacttgaggtcaaggatgaacgctggcagaatgcggtggagggatatttaaatacccagaggtttgatatcatcctgccgccggaggattttgaccgggcccttgccatttacgagcggtataaaaaggagcggcgaatttcccgggtggggattgtcaataccggccgggtgaaaaagtatttaggacaaattgagaaaaattcattggcggaagaagttaccagcgagaatccctacgctctggcatatgcccagtttttaatgggccgggtaataaagtgcgaacacgaggggcagttaaaactttatccgcggtcgataaccccgacctgcatggtttatcaaaaccatactgcccggcaaattgattttaaagtttacgaaattccctacatcggcagccgcgctattaaaaagcagatcgagaaaagagaacaggacctcagggaattagagcaggaacttgataagttatacagggagaagtttaagcttaccgaacgccaggaggaactctctggagcacgggatgaaaaggaccgggagtatgctctgttggaggaccgcttgatggagcttttgaagcttgcggaaatcgaagaaaaaatagtaaaactttccctggaaagggaaagtatcgatacttctggaattgaagctctggaagaaagccttgccaaacttgtgctggaagaaaaagctctggaagcagagaaagataaagttcagggacgggtgggaatggttacaaaagaacttgaatttagagcaggggaagaaaaacagcttaagatggaacttgaatctgcccggagggagtacgatgagttttgttcccaaaatcccgatttggtgggtgatggggaaaaacgttttgaggaagaattaaaaggaaaaagcccaggacaaattgcccagaatttctcaagcagtttaaaaggtcttgagaccaggattaataatcttcgggcggatttaacggagctaagaagtaaatttaaccagaagtatgcttttggcggcagcataaccggggatgatattaccgattttcttgatttatacagaaaacttgccgaaagtgagcttccggattataaagagcggatggagcgggcgaaagcccaggcggaggaagagtttaaatcccattttgtgcataagttaaaagaaagcattgaagaagctaaaggggtattccgggagttaaatgctgctttgcggggcataaaatttggagaggatgaataccggttcaggtacgaaaatgctccggagtataaaaaatacatggagcttatcgatgaagtggataagttaactcccggggagacaagcctttttagcggggtactccgggaaaagtttaaagaagtaatggacgaaatgtttgaagggtttttacaccgggataaagaggccggggagtttttaaaccgcttaaccgactaccggaactacttaacctatgatattgagattctccacggtgatggaaccacttctcattactccaaagtctacggtttaaagtccggcggagaaacgcagacgcctttttatgtggcaattgtggcgtcttttgtccagctttaccggatacaccggggggacagcactataaggctgatgctttttgatgaagcttttaaccggatggatgccgacagggtggagtcaagcataaggtttatgaaattttacggtctgcagcctattatagccgtgccatcggataagcttgctctgattgctcctcatgtggaaaccaatttattggtactacgcgccggtgaccaaagttttgtggaggaattttattatgatggctccaaggaagggataaggcttggaagcgccagcggttaa

SEQ ID NO: 41705 - DNA, 1032 bp, Carboxydothermus hydrogenoformans Z-2901
ttgtttcatgcagcccttaaagactgggagcgggaggggtttatcaccttagtctgggagcggtttgaaaaagataatcttttaaggcatgttaaactaaatcctgaaaaagcagagcttctttatgaaaagctttcccggcaaaaacctcaagaaaaagaagagcattaccgtaagctttgggctaatttaaacgattttcccgcatggctcggggaactgaaaaaagacatgttgttagagccgttatttgatgacgatgctgaaataatggttaccgtattaaatgctctttccctgaataacgaagaaatacccaaaagggtttttagccagcggtatctgggcgatagtaaactttttttaaaagtggagcgcaaagttgccgcccttttgcaaaaatactactttaaagatattgaggtatccggggatgccgtttttgccgagtttggggtggtcaataacccggtttaccttcatcttgccggtcccgttatccttaaataccccgatggacggctctttaaccttaaagggcttaattatgatgtagcttttccggccggacttgccctgcagctggaaattgccgattttgcagctcagcgggtggtgacggtagaaaatttaacttcctattaccagtatgtacgaaggtatcctgaagatttagttctttatttgggtggctttgccgggaagatggagcggaaatttttaaggaaaatttatgagtattgtttaaatcggggatttaatattgatttttaccactggggcgatattgacctgggcggttttaatatttttttacatttaaaaagggaaacgggtattccctttaagccgctctggatggatttggatactcttttaaaatataaggaacgggggatgaagctttcggaaagctaccggcgtaaacttactaaagccctggaagacccggtttatcaggattttaggatggttattgaaatgatgttagccctaaatatcaggcttgagcaggaagcgattgagctttaa

SEQ ID NO: 41706 - DNA, 1446 bp, Pelobacter carbinolicus DSM 2380
atggcactggactacgccacattagaattgctccgccagaaccatccggcctggcggttgttgtgtgctcatcacgctccgctggtggccggttttctgcaccgggtgtttatcgtgcccaatgttcgaaatctaccacaggcagacctggtcgaggcgctggaagatgagctcttcgccctgcgcgagcagttgggggatgaagcctttcccggatccgcgcaaagctatctcaacgattgggctgaaaatgacaaggggtggttgcggaaattttatccggcagggacggacgaaccgcactttgatctgactccagcgacggagaaggctttggtttggctggaagggttgaccgagcgcgcatttgtcggcactgaatcccgtctacttaccttgtttgagctgttgcggcagatgagtgaggggagccagactgatccgcaagtgcgaatcgctgaattgcataagcgccgcagcgatattgacgcggagatcgcccgtattttggcgggtgatattccgcttttggatgacaccggtctgaaggatcgttttcagcagtttttgcagctggcgcgggaactgctgaccgactttcgcgaggtagagcacaatttccgaactctcgatcggcgggtgcgcgagcgcattgccctttgggatggatccaaaggggcgctgctcgaggaaattatgggcgagcgcgatgccatcgccgattccgaccaggggaaaagctttcgtgccttctgggattttctgatgtcccagtcccggcaggaagagttgagccgcctgctggaacaggtcttgtcccttccgccgatccttgccatgtgtcccgaatcccggctgcagcgcgtgcattacgactggctggaagctggagaacacacccaacgaacggtggctaagctttccgagcagctacggaggtttctcgacgatcaggcctggctggagaatcgccgcatcatggatatcctgcacagcattgaaaacaacgcgttggcggtacgcgaggcggttccttcagggggctttacgactttgtcagagacctccgcaacggtcgaacttcccttggaacgacctctttaccggcctccgcttaaaactctcattaccgagatggcgcttgatgaaggggacgcggatgtggatacggcggctctctacgcacaggtggtggtcgaccgggccgagttgacccgcaatattcggcaggaactccagggccgcagtcagatcagccttgccgaggtggtgacccgccacccgttgcgtcacggattggccgaactggttgcttatttgcagctggcaggtgaatggcctgaaacggtcgtggacgatgaggttcaggagaaggtgagctggcagttggggactggcgttatgcgtcaggcgactttgccacgcattattttgctgaggaactga

SEQ ID NO: 41707 - DNA, 636 bp, Pelobacter carbinolicus DSM 2380
atgatgaatgttgccgataccaatccgggttattttgccaaaccgctccacgaactctcgtctgtgctggtgccactgctcaagggtgtgctctatcgggaggataacccagggctgtggggtttgcttcagaagcttcaagcgagtgttcgggattatgtcgccgttctcggcctggagttgatgctcgacgaggcagaggggtacgcttttttgcgttcccgacgcgatgacgaagaagatgctccggtagccatcccacgcctggttgcccggcggcagctctcctatccggtcagtttgctgcttgcccttttgcggaaaaaactggccgagttcgacgctggcggtggagatacacgcctgattctttctcgggatgaggtggtggagttggtccggatttttcttccggcgggcagcaacgaggtaaaactcatcgatcaggtcgacgctaccttgaacaagatcgctgaactgggttttattcgccgcttgcgggggcaggggcagatgattgaggttcgacgcattatcaaggcgtttgtcgatgctcaatggctcgccgactttgataaacggctggcggaatatcggcagcaaatagccgaaccaccggaggaaacggatgtctga

SEQ ID NO: 41708 - DNA, 3366 bp, Pelobacter carbinolicus DSM 2380
atgtctgaaacattggagctggaatttatcggcgatgatcgtttggccggatttcgcctgcaacggctcgaggtttttaactggggaacctttgacggccgggtctggacactgcgcctgggcggggaaaacagtctgcttaccggtgatatcggttccggaaaatcgaccctggtcgacgccgttaccactctgctggtgccgagtcatcgggttgcctacaacaaggcggctggggccgagagtcgtgaacgttcgctcagatcctatgtgctggggttttataaatcggagcggcaggaaactctgggcagcgcaaaaccggtcgcactacgcgacttaaacagttactcggtcatcctcggtgtttttcacaatgcaggttacaacaagaccgtcactttggcgcaggtcttctggatgaaagaagcgggtgcgcaaccggctcgcctgtatgcggcttgtgaacgcgacttgtccattatggccgacttttccgggttcggcagcgagattctcggtcttcgcaagcaactgcgggcaagccatgtcgagttgttcgacagcttcccttcttacggttcctggtttcgccgtcgtttcggcatcgatagcgagcaggcgctggatctgtttcatcagacagtatccctcaagtcggtcggaaacctgacggaattcgtgcgcagccacatgcttgaacctttcgatgttgcaccacgtatctcagctctgatcggtcactacgaggatctcaaccgagctcatgaggcggttctcaaggctaagcatcaggttgaaatgctagagcccttggtggatgattgtgatcgatatcggacgctggcgcaaacggcggataatcttcgagcgtgtcgtgatgccttgcgcccctggttcgctaccctgaaaatcgatctgctggagaaacgtcttacttcgctgaatgaagagttggccagacatcgaaccgtcatcgtgcggttggaggagcagcgtcgcgagcagcagggacaggagcgcgatcttcgccgtactattgcggaaaatggtggggaccgcatcgaaagcatcgccggggaaattctccagaaacaggatgaattggagcgtcgcaagcaaaaagcctcccgctatgaggagctggtacgtgctttgggccaataccccgctacgacctgcgacgaatttctgcggcagcggtccgaaatcgccaattggcgtgaaacgacagaagaaaccgaaatccgcacgcagaataatctcaatgaagcaggtgtcttgttcaagcagggaaaggacgaatacgatcaactgcaaaatgaaatcgcaagtctgaaagctcgggtcagcaatatcgacgaaaaacagatcgccatgcggcgcgcactctgtggggccctgaatctggtcgaagaagagatgccttttgccggtgagctgctgaaggtacgcgacgatgagcgtgactgggaaggtgccattgaacgtctgcttcacggtttcggcttgtctctgctggttcctgatcggcattacgccaaggtagcgcagtgggtagaccaaacccatctgcgtgggcgtctggtttatttccgcgtgcgggcaaaggggcgcggcgagttgccgtcgcttcatcgcgattccctggtgcgcaagatccaggtcaaacccgattcgctcttttacgattggattgaacgcgaggtggcacatcgctttgatttagcgtgctgtcagtcgcaggagcagtttcgccgcgaaacccgtgccgttaccaaggctgggcagatcaaggctccaggggaaagacatgaaaaagatgatcggcatcggctcgatgatcgtcgtcgctatgtcctcggctggagcaacgccgaaaaaatcgcggcattggaaaaagaggccaagcggcaggaaacacaactcgccgaacttgccggtcgcatcagcacgctgcaaaaggaacaagccgccctcaaggagcgtctttcggttctctcgaagctaggcgaatacaccgattttcatgaccttgactggaaacccgtggcggtttttatcgccaggctggaagccgagaagcgagagcttgaagcggcctccgatctgctcaaaacccttacagcgcaattgatcgcgctcgaaggggagttgaaagaaacggaggagaagcttgatgggcggaaggataagcgttcgaaaaccgaggaaaaaatcagcttcgcgcaagagttgcaggaacaggctcaagcccttttggcggaaacaaccgaagagattgtacagcgattttccatgttgggggagatgcgcgaggacgcgcttggcgatcaggtgttgacggttgaatcctgtgacaaccgcgagcgcgatatgcgggactggttacaggccaggatcgatgccgaagcttcgaagatcaagcgtttgtccggaaacattatcaaggcaatgaccgaatacaaagggcagtggggtttggaaaccaaggatgtcgatgccgatttagctgccgctcccgagttccggtcgatgctggatcagctaaaggctgacgatttgccacgctttgaaggacgtttcaaggaactcctgaacgagaacaccatccgagaggtggcgaattttcaatctcagctggcacgcgaacgggaaaccatcaaagaacgcattgctcaaatcaacgaatcactcacccagatcgattacaaccccggccgctatataagtctcgaagcacagatgaatctagatgccgatatccgtgaattccagaccgagttgcgtacctgtaccgaaggagcgctcaccggctcggaggatgcccagtattcggaagcaaaattcctgcaggtgaagcgaattatcgagcggttccgaggccgggaagaacattcggatctggatcggcgctggacggccaaggtgaccgatgtgcgcaactggttcgttttcgccgccagcgagcgctggcgtgaagaccacaccgagtatgaacattatgcagattccggcggaaaatcgggtggtcagaaagaaaagctggcctacaccgtgcttgcagccagtctggcgtatcagttcggcctggaatggggatcggtgcgttcgcgctctttccgcttcgtggtgatcgacgaggctttcggacggggttccgatgaatcggctcagtatggtttgcagcttttcgcacaactcaatttgcaactgctgatcgttacaccgttgcagaaaatccatatcatcgagccttttgttgccggtgtcggttttgttcacagtgaagaaggtcgcaactctgtcctgcgcaacctgagtattgaggaatatcgcgacgagaagcaaaggatgcaaggatga

SEQ ID NO: 41709 - DNA, 1176 bp, Pelobacter carbinolicus DSM 2380
atgacgtggacgaccccggctgacctcaaagctcaggtgcaaaagctatgggatcgcggcttgctgctcgcatcattgtccggcgatgagtcggttttccccagacgtctcacgttcaaaggccctgactcccaggaactgagccaaaggttttccgaggtgcgtgactggatcgcccagttgtccgctgccgctggtccctatcgaatcgaatggcgttgcatcaaccaccgtgtccttggggctaatgaaattccctcgaaaatctgggtcgacagccttgaggacgcagtcgggttgatcggcaaacgcagagcggcggagcagtttgctgcgttggtcgaattgacgagagagaaacagcccgaactggtttcctggttgggaaaacgcccgctacgagctcttgaattgggcgcagattggccgcggctccttgcgattgtcgactggttgcacagacaccctcgtcctgccatttatctgcgccagatcgatctgccgggtgttcatagcaagattatcgagaagtatcggggagtgcttgcggacctgctcgatcttgtcttgccagagtccgccattgacgcaacacacaaaggcgtcggtggattctgccgtcgttatggttttctggataaacccacacgtgtgcgttttcgagtgttggactcaaatattcgcttgctgccagtgaaagctggtcaagatattactctgacacaggaagcctttgcctcatttgctttgccggtatcgaaagtgttcatcaccgaaaacgagatcaacttcttggcttttccggatgtctcggatgcgatggtgattttcggggcgggatacggttttgacaatctctctgcggcctcttggctgcacgagaaagatatctactattggggggacatcgatactcacggatttgccattcttaaccaattgcgcggattcttgcctcatgttgtatcttttctcatggatcagcagacacttcttgcccacagagcactctggggagttgaaactcagcctgaaacagggaccctttcgcggttactcttggacgaaagcgccctttacgaccaattacggcagaaccattggggggatcgcgttcgtcttgagcaggagagggtcgggtatgactttctgcttgaagttcttcgggagctatga

SEQ ID NO: 41710 - DNA, 1425 bp, Geobacter metallireducens GS-15
atgcttttcaacaagctgcccgacgaaatcttcaagcctctcgcgggcgcaaacagatatttctttgaggaaatccttctcttccttttcaggtatttctcggatgaggatataaccaacgaggcggtttttccacgacgcggtcatgtcgtccgtgagatagaagaactgctggaacgcaaaggccgcctgctgcaaatcgtcgatgaggaaggggacgcggaggaggatatcagcaatgcgccagggccggccgccaggtacatctacaagcgcctcgtcgtgacaggctggctcgaagaggaagaagacggctatcacgtcaacgtcatcatgccacctcacgccagtcttctcttggaggcccttgaaggtgtcgcccatgcagaaaagaagaactacggcagcaccatcgcctctatccatctacaactccaggcgattgccaatcaccctgaagacaatgcccgcgcattcattgaggttgttagagcggcgcgtgacttcacccgtcacttgcaaaatatcttctccggcctccgcggctttcaggacatcatcacccgtcagcacaaccctaaacttgccctgtccacttttttcgatgattttgtcgagaatctgctgatctccgattacaagtccctccaggcggaaaacaacccctttcgtcatcgcgccaatgtcctgaacctcctgattcagatcgaacatatagactcaatcatgacggcgctgatcaaggtctaccaggaagacaagaacctggcgccagacgcagcgcgggaaaaggtgataagcgatcttcattttatcgccagggtgttccgctcagttgatcggcgactcgatgccatcgatttgtaccgcatgcgcctggaatcacgggtggcggaaatggtccgttacatggatcgcaacgttcccgatctaaccaaccgaggaatcaagctgctggaagagctcggcaggagatcgctggagcagcccgatggagagctccccgctttaccccaacctcctcgctggatatctcatgcgctgttgagtcatcgcagcatccgcaaaccacagagacgccgacaacctcaattcatcgagctggccagggagcaggaactcagtacagaagtcaaagagcgcctgcggcttatccaggattacctgcagcggcgtgtcatgtcacctgccaaagtggttgcgttcatcgaccggcagatgggggagcgcgccacgttcgcggctaaggatttcaagatcgaatcggtcgatgagttggtggcatttgcctttgtcccttttctcaaccagatgaagggcaaaccggtcccgaacatgcctctgttcaacattcgccgcacaggggatcggcttgatacaccactgttggaatgcagcgattttatcgtcgaaaggaaggggtag

SEQ ID NO: 41711 - DNA, 621 bp, Geobacter metallireducens GS-15
atgcttcacgagctccgtcgcatgcttgataaggatgaaaacctggccgcagaggatttacgtcgcgcagcatcaattgccctggatcgtcagttccttttcggagacaagagcagggaccagcgttcttttcaccagatcctcgacgccgaggattattaccgaaacctgttcgatgccctgaatctcgaattgatatgcgaccggacggcagggtatgttggcgtggtcccccgggaatctcatctgaccgttggcctggacactgaacactctctgttcctcctcgtcctgcgggtcatctacgagagagccgcccaggagtgcagagtgggagagttttcgcaggtctttaccgacagcgaggtcatgctggacacctttgttgcgcacaccggcagaaagcggccaggcttggtgaggctgcgcgaaattcttagaaccttctcccgccaagggcttttagagatcgacgaagacgaggacaaggcgatccgcttccgcattcgcccatcgatccgtgacatagtaacgcacggtttcttgcaggctttggaagaatacaccaaaggaggagaaggcgaggaaaacggaaccgatgaagcaggggggggacaatga

SEQ ID NO: 41712 - DNA, 3423 bp, Geobacter metallireducens GS-15
atgaagacattgattaaagccgttctcattcaatggttccgccttgaagccgtagaaatcccaatcgttggcaatacagccttcattggcgataatggcgctggcaaatcggccttgcttgacgccatccagactgtgctgaccggggcaaacaagcggctcctggtcctaaatcgggggagcaatgaacaatcctcccgcaaactctgggaatacgtccttggggtcatgtcggacccgaaaaaaccggaacttgccacgaagatcaagccgcgagacaaagcgaattgctatctggccctgaacttccatgatgtcgagaccggggaaaccacctgtgtcgggcttggcatttatgcttgcatggcagacatggcagaaaaggtggaagggtatttcatttgccccggcctggttgggcacaaggacctgttcctggaacagggcaaaggcgacagcacgattgtcctgccctgggcgcgcgtcaaggagcgcttggcgaaaaggtgccacgccacccggtttcaccacgagccgggaaaattcacccaggatctctacggctgcctgagtgaacacccaggttcacccaacaatgacaagaccgttctcaaggctctccaagcagcgttccgcctggagaagatctccgatcctaccgagttcatccgccgctacatgctcgatcgtgatgacctgcagatcaaggagctgcagagcgccttgaaaaattatcgtgacatggcggagaagaccgaatcggttagtcggcgggtcgctgatttgactcgcctcgaagtttgctgcgagaaggtggaaaatgctcgcgcccaacatgtgatggccgagtatgtctcgttgaatgcccgtatcgagcagattgagggaagcgccgaccccttgcggggcgcgttggccgatcttgaagaggcccgcgagcatatgggtaaggacaagacggttcttgaggaccagcaggcaaaggttcaagaggaactcggtgagaaacgtggggagttgaagctctgtgatgtccaagtccagcgggatcgcctgcaattagaaagtgatcaggcaaggcagcgcgaaggagatgtgaaggcgaggattaccgagatccgcaggctgctgcagcgctttgaaaaacttaaggatgtgccggtcaatgattctctggccgtggccatttccgatatagtcaaactgatgccgggtgacgacatgataagcaccgcggtctggccgtcaaatccttccgaggttgacatctgtcttgaattgctgctggtggcagttgagcgctctttaccggaactgagcagccgctatgatgatttctgtgcggatcataaggacttggagaagcggctgaaaaatctcgttgaagcactcaagcagctacaacacggtaaagccccgcttcaaccaaacactcggaatctgattcagtttttcaagaaacatggcattgaatccaagccattgtgcgatctggtggatgttgccgacgagacgtggcgcggcaccattgaaagcattctcggcaatatccgcgaggccctggtagtgcttcctgagcaggcccgcaaggcagttcacctctatcgccatgaggggaggcaagagtttcccggctgtcatatcatcaatacaacccagaccgaccgctggaaggcctccaaacagcagggcactctagccgattgcctcaacaccgatgatgtgcatgcgagggcgtttatcaatcgccgtctcgggaatatcgtctgcgtcgataccgagaaggacctgcttcaccacgaccgggccgcaactgccgatgggatgttgagttccggtggtacagtatcagagctgaagaacgtacagccaatcttggggagaggttcccgagaagggttgcgggttgcttatcaacgtgatttgaacgagctgtcgacaaaacaggcgggggtagtaggagaaaaggagaatctcggcagtctgaaagttctgctggaagattgcaagcggcagttctcgggcgatgccgttatttcattgtccgctctcgtagagcagcgcacagcttctgagaaagccatccaggagatgcaggaaaaacttgcagccttggcttctgatgcccgggagcagaaactcagagatgaaatcaagaagcttgaggacaaggcagaaggaataaagaaaagtctcaaggatctggatgaaaagcgccttcaagctgaaaaagagtacgcacaaaacgatgacaaattgaaggctcttgacgctcagatggacgctctgcaagttgtcttggaagagaagcgtgggaatccgctgcttgatcctgcgaaggcagccgatacccttgaccggtggcgcgagcagaacgccggggattttgcggcgatctgtgaaagggctgaaaaggagataggttcagcgttaaaaacaatcgaagaaaacaatactcgaatgatcaaggagtacacggagtattatctccgcttcgctctggaagagggcgaagaatcccgaccagagcatttcgaagagtacgccgtcactatccgacggaagaaaaaacacctggtcgaaaccactctggccgaataccgcgaaaaatcggccagagcactccaggaagctgaggacaccttccgctccaagtttgtaggccgcctgataggcaaggtcgaggccgtaagagggtcgatcacccagcttaacaagacgctggagaagcatcctttccatggcgaaatctacaagtttcgttccagctccaacccagaatttaagcatatcattgattttgccaaggcctgcaatagcccggcgtcacgtgaagtgggcggactgtttgatcctgttgcagattccaatagcccgcaccgcaaggcattggaagatattaccaccgctttgcaggatcccaaggccgcggagaggctgcaggactaccggaactttctggtgtttgatgtggagatgtgtgatacggaggggaccccaacatccgacctcgaacatcgtatccagaagggttccggtggcgaaaaccagaccccgttctatgttgctatcggcgcatcactggcagcggcctaccgtctcaaggaagaatacggtaaacatcacggtggcatgagcttggcagttttcgatgaggcattctcgaagctcagtgtcgcaacctgccacagctgcatcgagtttctgaagaacatccagcttcagcttattgtcgctgcgcccgacgaaaaattcgccacaatggccgaggtgatggacactattgtctgggtaacgcgagacggcggcacggtggagacggaggtgatttccatcaaacctgccatgcgggcaatgctgagaaccgacaacccttaccggaaggcttcgggaacggcggagttccttcatgaaccagtctag

SEQ ID NO: 41713 - DNA, 1206 bp, Geobacter metallireducens GS-15
atgaaccagtctagccgtcaactccttaggaaactcctcgatgcctggcaggctaatcccgaccgttcccgattggttcgactgccaatcactcaagccagggccccacaatattttgaagcgtctcttcctgaagctaaggaggccattcacgcagggctccttgaagcagcctcggcagggacagtggcgctcgaatgggggagagggtatgaaagccacattctgaaacgaatcaccctgacagatggtcctggcttagccaattatctggggatgccgctggctgccaagcaggcagatgatgcccgctccatactggaaacggcgctcagcgggcgagaaacttggataaatgaatgggttgaggaccttctcggcaagtggagccgaaaccagtcggccgctggcatgtctccgggggataccgcgtcagcccgactgatggtccgggcattggaggcggttgtcgccggccgtcacctcaatctcgatctgcggacgttcagtactcgcgagttcggggactccaaggctatggagggtatgctggcacgatttacgtcagtctggaaaaaataccatccgacagagctgacgggcgaagagctgttagaaacgcttgggctggtcagatttcctcctccattattgcttagcgggccggttgttttgaagctttctgaccgtcacctcgactgcgaaggcattcggcctttcgtgggattgccacctcaagctattcggggagtttcggccgataagttgccagagtacgttctgactgtagaaaatcttgcaagcttcaatcgttatgccgccgagattcgagataacgggcttgttctttatacagccggcttcccctccccaggtcttgctgactttcttcggatgcttgatgtctcactaccatctggaatgccttttttccattggggggatattgacgagggcggactgaaaatatttgtctacgtacaagggttattacgtcggaccttgcaacctcatttaatgactgttgatctccttgcctcgtgcggtctgccaaaacccagcctgcgggtggacgaagtcaaacggacggctgagaaatatccggctatcgctttattggcggctgctatcatttcgacagacccgccaaagacactagaacaggaaaatgttaatcctttcacgccggctgtagaaacccaatga

SEQ ID NO: 41714 - DNA, 1476 bp, Hahella chejuensis KCTC 2396
atgtctaatccagaccgttttcagcagtttttttccacagactgcccgcagttctttcgtccgctgaccagcaaataccgcgaaatgatcgtggagtgtctgcgtttgctgtatcaacgtttctacagcagcatggcggactacggacacgccctcaagcgggagcagatggtggagatatttcaaaccgccctgacccgcgcaccggagttggaaaccgatgaggacagcgaaaccgagggccgtttccgcacggatcgcgacaaggctctgtggatactcaatacgctgattgattacggatggctggaagtacaggtggacgaggtcacgctacagtccagctaccacttcagccgtaaagggcgcttgttcacgcagccgtttttggagcttagcggcgcctcggtgcgcacccgtcaccgcaatacccgcaatacccgtaatgcgctgcgggcgtttattgaagccggtgaagtccacgatctgctggacgcctatgaatactctgagcgcatcatcagcgacttcactgatatcatcaccgaactggaagaccgtaaacgccagctggtgaaagaaattgaaatcaccgcgctgatcaaacgagccagcgatgaattcttcgacttcatggataaacgcttccagccggacttgtctgtgcgcctgtcggcggactccgtggagaagcatcgggacgagatcatgtcccaggtgcgtcagattcgcagacttcccaaagagaccaaggcgcacgcggaaagcgagttgcgtcgactgctgccggaccgagtggtggaagggcaatccctgctctggctgttgctggacaatatagaaatccgtctcaccaacgcctgcgacatcatgttgccggctctgcgcagtgcgctgcgtaacttcacacgacgcgcggacatcattattcgtcaaatgagctatctggccagtcagcgccataatgacatggtgcagatctgtcaggagctgaccgagctgccggcggaagagcaacgggcgcgtctggagcgcgcaggagccctgatggccaacctcaatgtcggccttatcgaccccaaacagatcagtctgcgcgaaggccgtcggaaaatcaccgtggacagccgggtgctcaacgacgaaccgctggaccagggcgctcgcaaagagttgttcatacaacacgcgctggatcaggcttttgtcatcaatgacgaccgcacccgtcaatatctgattcaggcgctacggggcggccagcgcatccagaccaaacatctgcccattaacgccgctcccgatctgttggcggcgatgcatgccgtggagctgggctccgtgtcaggcctctccagcgaatacgagttcgtggtagagccgacaggggatctggtcagcaatgaatatttactgcaggcggatgatttcatcatcgaagtacgaccgaaaaaagcgatgcaagacaccttatga

SEQ ID NO: 41715 - DNA, 672 bp, Hahella chejuensis KCTC 2396
atgattctgagtcaatgccttgaaaatgaactgtcctccgaaggacttcagttaacggacttcagcgaactggcgctgcgcctactggattacagcatcatctgccgcgatgaaagcctgatcgaacaaactttatatgatcgttatctgcgcatcgacaagctggtggacgattatctatccgttctcggcgtgcgtctgctgcacgaccgtcagttccagtacatccgcgcgtatccgccgggagccgaggcgccgggtctcgatgacgaggtggaccagccgttcaacaccggtttgcgcgcgcgtctgaatcagcaggagatcgccttgatcctggtgttgcgcagccaatacgacaaagccctgcgcgaaggtcaggtggacgatcagggtggcgtcacgctcagctttgaagcgctctctatcgccatgaaaaacctgctgcaacgcaccctgccggaaaacctgacggaacgccgtcagctgctgaagcgcctgcgtcagttgcgactgttgcaattcagccaggaagacacgctggagagcggcgaaagctgggtccgcatccgcccgcaaatcgtcaacttcgtcagcgatgaagcgctgtccgctttgcgcggcgaagaggcggagcaggaggacgcagcggcgtccccggaagagatctaa

SEQ ID NO: 41716 - DNA, 3630 bp, Hahella chejuensis KCTC 2396
atgtttctaaagaaatgcatctacgttaactggggcaacatccccaacagcgaattcgatttcggccctatcaacctgctttccgggggcaacggttccggtaaaaccacgtcggcggacgccattcaaacagtgatgaccgccgcccacgattacctgttcacctataacccgggccaggatgaaaccacccaacggggtcgcggcggcaaacaggtgcgtacgctgtcttcttacgttttgggatgcgacgatggcagcttcgcccgcctggagcccaccgaaggctacatcgccgcgtgttttcaccccaccatgggagaatccgccgagcctttcaccgccattatctgctgccgcgcccacattgatcaggccggctcccagcgggtggcgcgtcaggacgacctgttcttcctgatactgccgggagcggaaatcagcctgtccgccctacagggcgaagacgccagcggcgacaagttcgtcatgcccatggacaagatcgttgcgcgcctgcgcaaaaatttcgaggtggagaaatacgacaccaagaagggctatctgaaacgtctttacggcattctgcgcggtaaaacccatgaagtgccggagcgggaagcgatgaacgccgcgcgcgcattctcccgcttcatggcctacaagccagtaaaaagcatcaatgatttcgtcgccaatgaaatcctggagaaaaaagacctgggcgaagcgatccgctctgtctccgatctgctcaaaactatccacgggatggagagcgacgcttcccgcctgaagaacgccattcgcattctcagtgacgccatgggctatggcgaaagctatattcaacgctggatcgatttgaatgtctggcaatacgtcgccgcgcgccaccagtatctgacggaccaggaagcctatctcaccgccaagaagcaacagaagtccttgcaggatgagaaagtctccaaccagcaggagcgcgacacgctggaagcccgccacgaccagattgagggccgcctgttggagctgaccgccaagcgtatgggccatcagccgctacagcagaaagatgagctggagaaactgatcgccgccaatggacgcgccctgcatgaacaggcgccagggctgctggagcagaatcatcgcctggacgccatcttccaggcgactaataacatcatcaatttgatgaaaaaccagaatattctggatgacgcaccccgtctgggccataaggatgtgtgggcgggggcgctggagttcagccagctcaagcaacacggtcaggtggacttcgccgctctgctggggcgggattgggtggatatctcccctcttgaaaaccacctcgaacaggcgttattaattcagcaaaaagccaatcagtggcagcgccagtggcacgacggcgaaatcagcgctgacggcgtcagtctgcgcgaccaagtcagtcgcgccctgcaccggcgggaaagtctgaaccagaagctggagcaacaacgccaccagaaacaggcggaaatcgaaagcctggagacgcgtcaggttacttatccttaccacgtaaaaacagcgttagaagcgattcgccgggaatgccccgaggcggaccccagggtgctttgcgattacgtcgagatcaaagaccctaaatggcaaaacgccattgaaggctatgttggcggcggccgcttctccattctggtggagccggaatacgaagcccgcgccacccgcatcctgcgctcgctgaaaggaagcggacaggcccgcgttatccagggcgagaaagcccgtcgcgactgcgaacgcatgaacctggacaaagactccatcatccacgtcatggagttcagccacgccaccgcgcgctactacatcaccgccagctatggcaacgtgctgcgggtgcgttcagaagaagagctgcggatgacccgtcgcggcgtcaccgccaatggcctgggctccggctcttacagcatgttccgttgcgacgtggccgacagtgagctggtatttggccagcaagcgcgggaacgcgccttggacgccaaaagagaagagctgcagcaaattcgcattgagcatcagcgcgccagcgaacagtggcaggagctgtccaatctgctgcgcgccgcggaccagatcaagccgttatcctatgccgaccgcctgaaagccatgctggacatccaccgggaactgcgcgaagcggaagatcggttggctcatctggatctggctgactttgaattgctggaacaagaactggagcaactcaagcagcaggacaaagaactcaagcagcgtattgaggttcttcttaagcgggaaggcagtctgcagaccgaactggcgcagaaggccgacctctgtaaagcgctcagcgaacgcaaagacgcctcggaaaccaagcaggacgagaaagaagagtccctgcgctcaattgcgtccctgtggccgaatttcgatagcgaagcgcgtctgcaggaagcggatcaatgtgcggaaagtatccgttccgatcagctgcatctggagttgcaagacacccagtccaacattgaaagcctggcgcgacaattcgaaaacaaattgatcgagcataaccagtcgagcaatcctttggatcagatcgcctatctgcctgactatgaccagatgcacaaccgcgccttcttcagccgcatttgtgaagtcagccgggaaatcgacaaaatccgcaaccgcctgaaaaacaacattctggtggagaaacaagagaagctgtcgcagttgaaactggcgttcaacaacaccttcgtcacccacctctgccacgccatttatcaggccatcaatgacggcaagaagatcctggaggacatgaaccgggagctggaacaccatcgtttcggcgccgatcgcgaatccttccgtttcgactggacctgggtgccggaattcaaggaatactgggatttcttcaaggaaatcatcgctctgcccaatctcggcgaaggcgcgacgctgtttgacgcagagttgtcgaagaaagcttcgcaagtgcgcgatcgcatgatggcgatgttactgtccgacgacgagcaaaaggcgatgcgggaacttgaacgcatctcggactatcgcaactaccgcaattacgaaatctacaaggagccgcagggcaaacaaccgattccgctgtctcaatacggcaccggcagcggcggacagttggagaccccggcttacatcatccgctcagcggcgatcacctccgcattccgcttcaacgaaggcgacagccatctgcgtatggtgctggtggacgaagccttctcgaaaatggacgaaacccgctcccgcgaagtcatcaactatctgacccagacgctgggtctgcaactggtattcattatgccgaccagcaagtccggccccttcatggacctgatcagcaaccaattcgtgttcaccaaatgccccaccacccgaccagtgggagaactgcaaacccgcgttctggtggacagacaaaagtgcaaccaggaaaaaatcgccgaactctgggccaaccaccgcaaacaaatacgccaccagttcgcgctggattttatggaggaatttggttaa

SEQ ID NO: 41717 - DNA, 1383 bp, Bacillus cereus Q1
atgaaaaaactatttgaatgcattccggaaaattatttcaatttgtttgctgggaaaaatcgggggttttatgctgaagttgcttttttactatatgaacaattccatatcaatcgagctggtattttatacagtttgatgaaagatgaggttcaagaattaatagaaacgaaagaagagttaggagaatgtattgatatagaagatgaaatagaagaaaaagagcaagacagtgctgggagagcaaatgaggtgcttcgacgtttaaagaaacttaaatggattgatgtagaagtacgtgatcaatttgaagagtttatagtgcttccagtgtattctagccgtattttggctgtgctaaaggaaatttgtgaaaatagaacaattgaatatcaaagatattgttttacgacatatcaattattaacaggagtggaggcggaggagcgcccagcttcagctattttggagtctgaaaaatatagtgagcaactttatgatgaattaacaattttactgcacaatatgaaaaatcatatggaaacaattgcagctaaagatgatatacaacaagtgttagagcatcattttggagaatataaaaaagatataattgataaaagttaccatcgtttaaggacatcggatcatgtgtcgagatatcgaaataaaatattggagcgtatacagacttggtttttagatgataaattcatgaaacgtgctgccgaagatgctgtagaaagtggatattctgctaactgggaagaagcaatggatggattaagtaagaaaatgtatagggttgaagaaatttatagtaatttagatgaaatttgtaatcaaattgatgcacgccattatcaatatttacgagcagttttagatcgttctagatatttaagtacttataatgacagtatcaattacaaaatatcttatattttagaacatatagggcaaatggacgagaatatactcgattcttctctgtttcgtttagtacagttgcggcaacttcaagaagcgtcactgttatccccacgtaagaaaaaaggtgtatatgaaccagaacagcatgaggttaatgaaattagtgatgagatgcgagaggagctaaaggctgaaaatataagacgtatggaaaaggttatgaatcgaaagaaaatccaaaaatttgtgttagaagcaatgaaggggcgtcaagagatagagatgagtgaattgaatttgcaaaatgaggatgacgctttgtatttaatttacgtttatttgtatggttatagtaagggaactggatacaagcttagtgaagagccacctgaatttattacacaaaaggggtatacattttctaatcgtacgataaaacgagaaaattag

SEQ ID NO: 41718 - DNA, 594 bp, Bacillus cereus Q1
atgcaaaatgtatcggaaagagaaagagaagagatggggattgttgttaattatttattctcccataattttttattgaaagaatttgaacgtgagaagtatcacctggcagtacggaataaagatattattaagcaatatttacaggtaattggttgggattttattgtggatgaaaagcatgggtgtattgttattgtttcgccacattacgagcatcgtttgaaattgaagaaagacgaaacgatttggttgttagtattaagacttatttatgaggaaaagcgtagcgctctatctattagtcaatatccctttaccactcttcaagaaatcaaggggaaatatgagacgtttcgattaccgtttgtatcaaaaacaaaattacgtgaacttgtgcagattggaaagcaaaatcaacttttgagaccaattgataatgacatagagtcggatgattgtcgttttcagcttttccattcatgcattcatgtgctgcaacaaggagatttaaatgtattgtatgaaaaaataaaatcttatagtgagggtggggatcacagtgaaatggatgaagaaactacgattaattaa

SEQ ID NO: 41719 - DNA, 3336 bp, Bacillus cereus Q1
gtggggatcacagtgaaatggatgaagaaactacgattaattaattggcattattatagtgatgaaacaattttatttggaaaacaaacagtgatatctggacatacaggagcagggaaatcgactgttattgatgctttacaagtcctatttatttccgatgagcggaagattaaatttaattcagcagcatatgaggaggccaatcgtactttaattaattatttgcgggggaagataggtacagaagaaaaaccttttgtaagagaagggtattttacaacatatattgttgctgagttttatgatgagaaggcaggagagagttttgtaattggtatttcaattgatgtatttaaagatgatgaaaaagtaaaagagtattttattataccgaaatctgagattaatatgatttcgttttttagtacaaaagacgagaaacgttatgtggaaaagcaagcagacttttgtaaaaaaataagagaacaatttccagaggctataattgaaaaaagttcaaatcaatatcaaaaggctttattacaacgttttggtggattacatgaaagatttgttaaaacgtttgcaagagcattatcgtttaaaccaatcgataacatgaaagattttgtatataaaaatatattggacgaaaaagaattaaaaatcgacgttatgaggaatatttttcaaacacatgaagaattgcaaagagaattagaagaattaaaagaacgaaaggaagagctggagcgaatagataatatttatttggaatgtgtaaagctggaagcggatatttccatacaagaatatgttcttagagggctagagtatttattaatacaagaagaaaagagcatgtgtaaaaaaagtattgaacagagagaaaaagaattaagaaaatgtgaatcagatcaaaaaaagacagcggaacaaaaagagcatgctagaaaaaaagagactgagtatgaaattaagattaaggatagtgctgaacaaaaaagacaaaaacaattacaagaacaaatagctcaagcgaaaaaagaatgtggtgatttagagtgtaccaaaaacatatatgttcatagtttagcaagagaagaaaaggatgtttctagtcttttaaattatcaaggtaatgaatatttctctttaagcaaggacgagaagcatgcattggaaataggaagagattgtctagccttcttgtcacataatgatggtactggagggaatagggaagagcaaacattaaataaacttggagagagtttaaaaagaattagtgggcgtttttataagagtacagcagaattggaacacagatctgctgaattgaaaacagaagagaaagaattactttctgatatagagaatttaaaaagaaggaagcgtccttatcccatgtctgttgaaaagttgaagggattactagaaaaacatttagaggatcaatcgaaggtatggattctttgtgaagagttagaaataaaaaatgataaatggcgaaatgccctagaagggtatttgaatactcaaagatttgatattttggtagaaccacatatgtttgcgactgcactgtctatctacgaaaaggaaaagtggaatcttggtcttgaaggtgttggacttgttgatactgaaaaagaacaaacatatttagggaaagttgagaagggttctttagctgaagagatagtaggtggtaacccaatagtacaggctcgaattcatcatttattaggtagggttataaaggcagacaatgaacaagaattacgaaagtataaaacagctgttactgcgacatgtatgagttatcaacgtcttgtagcacgccaaattcctagaaaagtatatgaaaccccatatataggtgcacatgctattcaaaagcaattagaaattaaagaagaaaacttaaaggaaattcaaacagaactgcaaatagtaggatactatattaaagactttaagaaatggattgaaattttagaagataagcaatcggattataaaaattatatattaaatttttcattaaatgatagtattttggagtttaataaaaacataaataaatggaagagtgaactaaatactcttgatttgtcacgtttagaaagtttacgccaaaagttgaaagagtggaatggaaaatataatcaatttaatggagaagaaggtagactgtttgaacaaattgggaaggtgaaggaagaacttcaaagagtgaatgctgagttatggaaaaaggaaaaggccgcaacagagattttagagaagtggaaaaattggaagtttgaatatagaatcgaattattacaagaggctgagcaaaggtacgagcaagctatttctacaaataaagcttatggtgctataaaaaataaatacgaaaataataaaaaagaaaatcaaaataaatacgaagaaaaaaggggttttctagaaagtgaacgtaagtcttataatgaagcgcgaactttccaaggaattatacaggctaaagataataagcagtacgaagaagcgctccggaaaattgcaaacctcgatatcccaaagtttgaacaagagatcaaggaaacgttgcagcaagctgaagaggaatttcagtctcactttatttacaagatgcgtgaggctattcaagcggcgcgtagagaatttaatcaattgaaccatgcgttaggaagatttaaattccgaaatgacacgtatcgatttgtaataaagccaagtgaacaatataaaaaattttatgatgtaattatggatgaaagagtacagccggagatatctctatttgattttggtgatgaagatagggcggagattttaaaggacttatttggtagattagtggtgggcgagtatggtgaaaacgaagagtttgtggactatcgtaattatctcgattttgatttaagcattaataatgaaaatggaacaagatttatgtctaacttattacgtgagcaatctggtggagagacgcaaacacctttttatattgccatcctagcatcatttcaacacctttatcgaaataaaaataccattcgtttagtagtgtttgatgaggcttttaataaaatggatgaagagcggattcaaattagtttacgtcttattaaacagttggacttgcaattaattgcagctgtgccagatgagaaaatggctcatatggcagctgaggcagatacagctataataattaaccgaatagggcattcatgttttactgacatattatcttatccaagggaggacgaggcaattggattacaagagcaagattctttcagtcttattgaataa

SEQ ID NO: 41720 - DNA, 1230 bp, Bacillus cereus Q1
ttggattacaagagcaagattctttcagtcttattgaataaatatgaaaatagtaaaactgctcatacaggtgagagaagtgctcagcgccctcaattttcatttcggcaaaaacatgaactttctaaagcatataatgatgaaatggattatacgaaccgattagaaattaatactgcattaaaggacttaattcgtaaaaaaattattgaagtgaaatgggaaaagtgggaagagaatcgaattgctgaaaaggtttatttacagtatgattttattccacaagcttatagagaagctggtatagaaccaaaaattgaaaagatgaataggattttaaaagtgttagaaccacttgctgttcattcatgggagtgggttcgacaatggtataaagaagtacaacagtcgtttcaaaataataaaacggcacgaattaatttaaacgatgttaaaggatatgaactacttgtaaaagcactttctagattagaaggtttggaagatagtataccgaaaaggacctttagccaattagtattcggggatacaaaactttttgaaactacgatacaaaaccgattattaataatatataaaaggtacggagatatagaatatgaaagtgataaagaatatttagagagtattgggattttagagaatatccaacctgtctatataaaaggaaatgttgatattcgtgttagaggagagaagattgctctcggttcctttcctggtgggttcggtttaatggatgaaacaataaaagaactagaaattcagtatgtacacgatgaaagtataatgcttattgaaaacatgaccacatactatgaacaaattaaaaaaaataataatattttatttatctatacaggtgggtttcctaaaaagaatgtacagcaattgttaaaaaagttgaatatatatttggaaaatcatccagttccagtatatcactatggagatctggactacggaggaatccaaatatttgagtacattaagcgttcgtttttttcagggcttgagccgtatatgatggatgtagctacctacaggcaatttgtaaagtacgggatggaatttggtgaagggtatgaagaaaaattactgaagatgttagagaatgagcagtattctttatggcatgagttaattaaagaaatgcttaaagaaaagaagcgtgttgagcaggaagtgatagttagaaacgtaatttag

SEQ ID NO: 41721 - DNA, 1458 bp, Moorella thermoacetica ATCC 39073
atgaagcttttcgaggtcataccggaacgcctgttccaggttttcagcggccgtaacaggtatatttacgccgaggccctgctcctcctttatgagcagtaccgggtcaaccgctttggcattcagtatgaagttatgcgggatttaatgcaggagctgatcgagagccaggaggaggccggcctggcgtttgaggtggaagaggaacaggaacaggagcctgctgccagcgggctttttaacggcgacggcgaggaccaggcccggttgaaggccggcgttattttacgtcggttggaaaagctgaaatggatccaggtggaagtgcgggagaatttccgccattacattgtcctgccccactacgccagccggctgctggccgttttccaggaattatgcgagaatcggaccgttgaataccagcgttttgccttcgttacctaccagctcctttccggtgaggaggccaggcagcggcccggctttgccatcctggaggcccagaggatgacccaggagttcctggaggagctacgggtgctggccaacaatatgaaataccatatggagcaggtggtagccaaaacatccatccaggaggtcctggaccaccatttcgaagagtacaaggcccacatcatcgaccgcagctaccaccgcctcaagacttcggaccatgtttcccgttaccggcagcggatcctggccacggtccaggagtggctcctggacccggaatggatggcccgggccgtggaagacgccctgcgcaacgaattttttgccactcgggaagaggcggcggagcagctgcgccgcgccctcatggacattgaagagatttaccgcggcctggacgagatcttttaccagatcgacctgcgccacaaccagtacctgcgcgcctcctttgagcgggcccgttatttaagccagcacagctccggcgtcgaccagtacctggcgcggatcctggaatggatggcagcaggaatcaggagaggcgacctgccggaggaagattgcctgcccggcatgtttaacctgatgcgcctcaatcaattaaacgagcagtccctttatacgccgcgccggcggcgggcgccccaccggccggaaccccaggtggtggtggctgtccccgaagaactgaaaaggcagctgcgggagcagaacctgcagcgggtgcggcaggccattaccagggaaaaggtgagcgcctacgtcctgggccgcctgggcgagcgccgggagatgggcatcgaggagctggcacccaccaatatggaggaattcctgtatctcctctacgtttatctctacggctacgacggcctggccggctaccggctggtgccgcggggcgcgaaccgtatcctcgacatcggcggctatcgcttttatgatcggcgggtagtgcgggtggatacgggcaggaaggggcgggccgtttaa

SEQ ID NO: 41722 - DNA, 612 bp, Moorella thermoacetica ATCC 39073
gtgcttaacctcggggaaaacctcagtgaacaggaagcagggcggttgcgggaggtcatcaaccgcctgctggctgtaaatttcctaaacaaggaacaggagcgggagcattacctggtggcgcggcgccaccgccaggttctggaggagtttttccgcttcctcggctgggagatcgtctttgacgaccgccacgagtgcctctttgtcctgtcccctgaggccggctgccggcgcaacctgacccgggatgagagcatctggctcctggtcctgcgcctcatctaccaggaaaagcgccagggcctttctttgagcgagtttccggtgaccaccctccacgagatccgggccaagtatgaagccttccgcctgcccctttttaacaaaaccaggctgcaggaactggtgcgcctgggcacccagtacaaactcctggaacccctgaatgacgacatcaggtccgacgattgcgccttccgcctgtttcatacccttctttatgccgtccaggcggatacggtagaaaagctgtatcagaagatagctgcttatgaacaggggaaggaggaactgccgaatgaagtggatgcgccgcctgcggttgattaa

SEQ ID NO: 41723 - DNA, 3624 bp, Moorella thermoacetica ATCC 39073
atgaagtggatgcgccgcctgcggttgattaactggcactatttttatgacgaaaccctggagttcggccgccagactctcatcgccggccgcaacagcgccggcaagtccaccatcatcgacgccctgcaggtcctcctggtggccaaccagcggcagatccgcttcaattcggcggcccacgacgaggccaggcgttccctgatcagctacctgcggggcaaaaccggcggggaagaaaggaagtatttgcgggaaggtgattttaccagctatatcgtcgccgagttttatgaccagcaaaagagggaaaactttgtcgtcggcgtggtgatggacgtctacggcgacgataccatcgacgacgaatactttatcctgtccggggttgagctggccgacctggatttttggagcccggcggaacgctggaaaaaccgggaggagtttcaccgctattgtcaaaacctgccgggacgccatatcttcgagcggagcaaaaccggctaccagaaggcccttttaaaccgcctggggcaggtaagcgagcgcttcttccctgtcttcgtcaaggccctttcctttaagcccatccagaacgtgcgggatttcgtctaccagtatatcctggatgagaaggagctgcagctggacctcctgcggcagaactttgaaatccacgagcgctaccaggcggagctggaagccctggaagagcgccgggagcagctggaggctatctgccgccagttcgacacttttgcccggctgcgggatacggtggctatccaggagtatgtcatccggggcctgaagcacacccgggaggtggagctgcgggaccgcctggaggaggagatacgcttcctgacagccgaggtcgaacggctgggccgggagctggacctggcgcgggccaagcagctggaggccgggcagaaggccagggaggcatatcaaaagtggcaaagccaccaggccaggcagcgggagcaggagttaaaggaaggcctggcccgtgtggataaggatttgcgggagcaggggcggctgctggcgatcctgcgccagaccctcgaacgggagaaggccctgctggccggcctgcaggagatggaagcggatgaatactggcagtggcagccgggggagcgggagcgcttgggacgggccctggagctgctgtccggattggttccggccggggacgctgattggttaccgggggaggataccgtggccgctgtgcgggatacgggtcttttcctggccggcctgcacagccgctgcgcccgggctgttggccgcctggaggaccggctggccctgctccagcaacaaaaagcggaactggaggggcagatccgcgacctggagaacaagaagcggccctaccccccgcacgtcctcaacttgaaaaggctcctggaagagcgcttgaacaggcgttcgccggtgtggatcttctgcgaagaaatggacctgaaggatgaaacctggcgggacgccgtggaggggtatttatacactcagcgcttcgacctgctggtggaaccccgggtctttgccgaagccctggccatttacgagagggaaaaagggaagcaccagatagaaggagtcggcctggtggatacggagaaggagcagaagtacctgggtacggcgcaggagggttccctggcggaggaaatggtaacgggcaacccggtcatccaggcccacatcgaccatctcctgggccgggtcatgaaggcccgggacgagcaggacctgcgccgttaccgcaccgccatcaccaggacctgcatgtcctatcacaacctggtggccaggcagctggaaaaacaccgctacgccgtaccctatatcggcgcccgggctattgcgcgccagttagaaatcaagcgccgggagctggcggagacgaaagaacagatagaggtactgaaggataagagggagaagctggcggcctggctggaacgcctggccgacaagaagtccctttacgccggcatcagcgagcagctggacctccccgcccgcatccggcgtttagaggaggagcgggctgccctggccgccgaactggagcggctggacctgggggaagtggagcggttaaaggaagaatattactactgggagcgccgcggcaaagagttgctggatgaagtcaccgaaatcagcggccttaaaaaaagccgcgagaacgagttaaaccagaagcagacggagctgcacctgcaggagacgagggtgcaggaagcccaggccttttggcagtcctggcgggagcagtatcctgtcgagctcctgccccgggccgaggaacgctggcgggaggcggcagggcaggaactgcctgtggccagcaagctcatcaactgggagaacagccagaagggcaatactaccaggcgggagcaggagttccagcgcctgcgcgacttgcgccacgagtacaacctgcgctacacctataacgccgatcccggagccccggataatgaagcctaccggcccctgctggcggaaatcgccacggtggatattccccgttaccgggaaaagctggccgaggccctgaagcagtcggaagaggaatttaaatcccattttatctttaagctccgcgaggccattgaagcagcgcggcgggatttcaacgagctcaactacgccctgaaaaactttcccttccacgaggaccgctaccactttgagattaaacccagcgagaggtacaggcgtttttacgacgtgatcatggaccccggggtgatggagcagggttcccttttcgagctgcccgaggacgaccggacggctgtccttcacgagctctttgagaagctcatccgcggcgaggccggggaattggaggagttcaccgactaccgcaactacctggatttcgatatcgtggtcaccagcggtgaacaccgctattccttctcccaggtgctgcgggaaaaatcgggcggcgaaacccagacgcccttttatgtcgccatcctggcctccttcaatcatctttatgacacgggcaagacagtacggctggtggtcttcgacgaggccttcaataaaatggacgaagagcgcatccagaccagcctccggctcatcaagcgcatgaacctgcagcttatagcagccgtgcccgacgagaaaatgcagcacatggcgccggaagtcgataccaccctgctggtgcaccgtaacggcttccactgttttgtggacatgatcagccgccaggaagtactggccggagatgaagtgccaaccggtgacgggcagccggccggccctggcgataccgacgggggccgggcaggagggcataaagaagcaggctacgggggcaccggtggtgaggactccggagatgccggcgatgatgctgatgatgccgggaatgatggcccgcctctaaatgatgccgcctctttatctcgccccgccgggggagaagacggtcaccggggccaggccggcggtagcggcggtgaagatagcggccggccgcggcgagggggtgtaaggaatggccgggacgggcagagacctgcaagcgcagtaccggtacaggattctctctttgctgatcagtaa

SEQ ID NO: 41724 - DNA, 1278 bp, Moorella thermoacetica ATCC 39073
ttgctgatcagtaaatacgaagggagccgctcttttcaaaccggcaccccgggcaagcagcggccccagttcgccatgaagaagagccccctggccggcgattattttgatgagatggaccaccgcaaaagggaggccatccacgccgccctggccgaactggcggctgccggggtggtggaggtcacctggccccgcttccaggaaggccgccaggtggaaaaggtgtatttgaactttgacgccatcccccgggcctatgagctggcggggctggtgcccagggcggaacggatctgcaggctgcgccaggtcctggctcccctggctacccacccctgggagtgggtgcggcgatggtgggccggggtggacgcatctttaggagaacggcggtccgcaggcctggacctggaggacccggaaggctacggggaactggtcaaggtgctcctggccctgccgggattggaagacagcacaccggagcgcatcttcagccagcgggtcctgggggattccaaggccttcgagcaaagggtgaaaaagcggttgctggccctgctcaagtcttacggtccggaggaatatgaaaccgacgccgaatatctggacagcgtcggcctgaccgataatcccaaaatggtcctggtggccggacccatgactttccgggtgggaaggaccaccgtcaatgtggggggacttccgggcggcctgggtctggccgctcatatggtgcgggccatggagataacggccgttaccgctccttgggttctcctggtggagaatttgaccagttactatcaggttgtccaaagtgtaagtgagctggctgtaccttgccgggaagggggagggggccggggtttagcggttgagggccctgctggcttagtagtatataccggcggcttcccccaccgcggcgtgcagctttttttacgccggctccaggattaccgggaatcccctggagccaccgccaggcccccggtctaccactggggcgatatggactacggcggcatccgcatttgcgaatatatccgccgcaacttaattcccgatttgcagccctaccttatggatgtcactacttataccaggtatttgccggccggaatacccttcggcgacgagtatgccgccaggctccggcacttggctgaggacccggcttacgccccctggcaccccctcctgcaggccatgctgaagcaccgcaaatgggtggagcaggagagcattgcgatcaatgtaagctgggcgtaa

SEQ ID NO: 41725 - DNA, 1446 bp, Syntrophus aciditrophicus SB
atggcactggactacaccacattagaactgctccgccagaaccacccggcctggcggttgttgcgcgcccatcatgcgccgctggtggccggttttctccaccgggtgttcatcgtgcccaatgtgcggaatcttccccaggcagacttggtcgaggcgttggaagatgagctcttcgccttgcgcgagcagctgggggccgaagcctttcccggaaccgcccaaggctatctcaatgactgggccgaaaacgacaaagggtggctgcggaaattctatccggcagaaacggacgaaccgcactttgacttgactccggcgacggaaaaggcgctggcctggctggaagggttgaccgaacgcgcctttgtcggcacggaatcccgtctgctcacccttttcgaactgctccggcagatgagcgaggggagccagaccgatccgcacgttcggatcgccgaaatgcagaaacgccgcagcgatattgatgcggaaatcgctcgcattctggcgggcgacatcccgctcttggacgacacggccctgaaggaccgtttccagcagtttctgcaacttgcgcgggaactgctggccgactttcgcgaagtagaacacaatttccgcatgctggaccggcgggtacgcgagcgcattgcactgtgggaaggagccaagggggcactgctcgaagagatcatgggcgagcgcgatgccatagccgattccgatcaagggaagagctttcgcgccttttgggacttcctgatgtcccagtcccggcaggaagagttgagccgcttgctggaacaggtcttgtcccttccgccgatcctggccatgcgccccgaaacccgtctgcagcgcgtgcattacgattggctggaagcgggggaacatacccaacgaacggtggccaaactctccgagcagctgcgtcggtttctcgacgatcaggcctggctggagaatcggcgcatcatggacatcctgcacagcattgaaaaccacgcgctggcgttgcgcgaagagtttccgacgggggattttatgcctttggtcgagacctctgcgacggtcgagcttcccatggagcggcctctttaccggccaccgctcaagcccctcattgttgagatggcgctggatgaaggggatgcggatgtggatacggcagttctctacgagcaggtggtggttgaccgggctgaattgaccagaaatatccgccaggagctccaggtccgcagccagataagccttgccgaggtggtgggtcgccatccactgcgtcacgggttggccgaactggttgcctatttgcagctggccggtgaatggcccaaaacggccgtggacgatgacgtacaggagcaggtgagctggcagttggagacgggtgtcatgcgccgggcgaccttgccgcgcattattttgctgaggaactga

SEQ ID NO: 41726 - DNA, 636 bp, Syntrophus aciditrophicus SB
atgatgaatgtgaccgatatcgactccagccacccggtcaggccggatcacgaactctcgtccgtggtggttcctctgctcaaaggggtgctgtatcgggaggagaatccgggattgtggggcttgcttctgaatcggcaagcgggggttcgggattatgtggccgtgctcggcctggagttgatgctcgacgaggcggaaggatacgcttttttgcgttcccggcaggatgacgatgaggacagtttggcggccggtccacgcctggttgtccggaggcagctttcctatccggtcagtttgctgctcgcgcttttgcggaagaagctggccgagtttgacgccggtggcggcgacacgcgtctgatcctttctcgggatgaggttgtggagatgatccggatttttcttccggcgggcagcaacgaggtgaagctgatcgaccaggtcgatgccaccttgaacaagattgccgagctggggttcatccgccgcttgcgggggcagggacagatgattgaagtgcggcgcattatcaaggcgtttgtcgatgcgcagtggctcgctgactttgacgaacggctggcggaatatcgacaacaaattgcgaaaccccgggaggggatggatggctga

SEQ ID NO: 41727 - DNA, 3423 bp, Syntrophus aciditrophicus SB
ttgacgaacggctggcggaatatcgacaacaaattgcgaaaccccgggaggggatggatggctgagccccttgatctggaatttatggccgatgaccggctggccggatttcgcctgcaacggctcgaggtttttaactggggaacctttgacggccgggtctggacgctgcgcatgggcgggaagaacggccttctcaccggtgatatcggttccggaaaatcgaccttggtcgacgccgtcaccaccttgctggtaccgagtcatcgcgttgcctacaacaaggcggcaggagccgacaaccgtgaacgttcgctcaaatcctatgtgctcggctattataagtcggagcggcaggaaacccttggcagcgccaggccggtcgcactgcgcgactttaacggttattcggtgatcctcggcgttttctacaacgccgggtacaaaaaaaccgtcaccctggcgcaggtcttttggatgaaggaagccaatacgcaaccggctcgcttatatgcagcctgtgaacgagacctttccattgcggctgatttttccgggttcggcagcgagatggtcggtcttcgcaagcagctgcgtgggagcggtgtcgagctgtttgacagctttccttcttacggatcatggttccgtcgtcgttttggcatcgataatgagcaggcgttggatctttttcatcagaccgtgtccctcaagtcggtgggaaacctgaccgacttcgtgcgcagtcacatgcttgagcccttcaatgtcgcaccgcgcatctccgccctgatcgggcacttcgaagatcttaaccgggctcacgaggcggttctcaaggccaaacgtcaggtcgaaatgctggagcctttggtggccgactgtgaacgacatcgggaactggctcgagcggcggatgatctgcgagcttgccgcgatgccctgcgaccctggttcgccacactgaaactggatctgctggaaaggcgtttcacctcgctcaacgaggagttgacccggcacggagccgccatcgagcgtctggaggagcagcggcgtgcccagcaggggcaggagcgcgagcttcgccgcaccatcgcggaaaacggcggggaccggatcgagggcatcggtgaagaaatccggcagaaacaggacgagctggaacgtcgcaagcggaaggcctcccgctatgaggagctggtccgcgacttggggcagcaccccgccgcgactgaggaagaatttcttcgtcagcggtctgaaaccgcaacgtggcgtgaaactgctgaagaagctgaagcgaaggctcagaatgatcgaactcaggccgaggtcgacttttcccaggggagaagtgaatacgatcggttgaaaaatgaaatcaacggtttgaaagctcgggtcagcaacatcgacgaaaaagagatcgccatgcggcgtttgctctgccaggcgttgaatttagccgaagaggagatgtcgttcgccggtgagttgctgcaggttcgcgaggatgagcgtgattgggaaggggctatcgaacggctgctccacggtttcggattgtctctgctggttccggatcgttattaccccaaggtgactgaatgggttgacgccacgcatctgcgggggaggctggtttatttccgggttcgtgatgggaggcgcggcgagttgccgacggtacatcccgattccctggtgcgcaagctacaggtcaaacccgactcgcccttttacgactggatggaacgggaggtggctcaccgctttgatctggcttgttgcctgtctcaggaacagtttcgccgcgaaaccagggccatcacccgggcagggcagatcaaggcacctggggaacggcatgaaaaagatgaccggcatcgtctcgatgatcgtcggcgctatgttcttgggtggagcaatgccgagaaaatcgccgctttggaaaaggaagccgggcggcaggaagcacacctttctgaacttgccggtcgcatcagcacgctgcaaaaggaacagtccgccctcagggagcgtctttcgatcttctcgaaactgggcgaatacactaattttcgtgacctcgactggaaacccgtggcggttgccatcgccaggctggaagccgagaaacgtgagcttgaagcggcctccgatctgctcaagaccctcacgatgcgattgaccgccctcgaaaacgagttgaaggaaacggaggatcaactcgatgaccggaaggacaagcgatcgagaacagaacaaaaaataagcgccgcaaaagatctgcagcaacaggcaaaagccttgttggctggaacagcagaagatactgtccggcaatttgccatgttggaagaaatgcgcgaggaggcgcttggcagccagtcattgacggttgagtcctgtgacagtcgtgagcgcgatatgcgcgaatggctgcaggacaggatcgacgccgaaaattcgaagatcaatcatttgtccgaaaagatcatcaaggcgatgaccgaatacaggaaggagtggatgctggaaacccgggatgtggatgttcatatcgcagccggtcctgaattcaagtcaatgcttgatcaactccgggcaaacgacctgccccgttttgaagggcgtttcaaggaacttctgaacgaaaacaccatccgagaggtggcgaattttcaatctcaattggcacgcgaacgtgaaaccatcaaggagcgcattgctcagatcagcgaaacacttatccagattgattacaaccccggccgatacatcagtctcgaagcacagatgaatctcgatgccgatatccgtgacttccagaccgagctgcgtgcctgtaccgaaggagcgcttaccggctcggaggatgcgcagtattcggaagcaaaattcctgcaggtgaagcgaatcatcgaacgatttcgaggccgggaggaacattcagatctggatcgacgctggactgccaaggtgaccgatgtccgcaactggttcgtttttgctgccagtgagcgttggcgcgaagacaaaaccgaacacgaacattacgcggattccggtggaaaatcgggcggccagaaggaaaagctcgcctacaccgtacttgccgccagtctggcgtatcaattcggcttggaatggggagcggtgcgctcgcgctccttccgcttcgtggtgatcgacgaggcttttggacgaggttccgatgaatcggcccaatatggtttacagttgttcgcgcaactcaacctgcaactgctgatcgtcacgccgttgcagaaaatccacatcatcgagcctttcgtcgcaagtgtcggctttgttcacagtgaagatggtcgcaactctgttctgcgcaacctgagtattgaggaatatcaggccgaaaagctaaggatgcaaggatga

SEQ ID NO: 41728 - DNA, 1176 bp, Syntrophus aciditrophicus SB
atgaagtggacgaccccggccgatctcaaagcgcaggtgcggaaactctgggatcgcggcttactgctcgcttccctggctggtggggaggcactcttccctcgtcgattgacgctcaaaagtccggattcacggggactgagcgagcggtttcccgaggtgcgtgagtggatcgcccaattgtgctcagccgccggtttctatcggatcgaatggcgcagcgtaaaccaccgcgttcttggagccaatgaaattcccgcggcaatctggatcgatacgctggaggaggcgctcggactgatcggtaagcgccgggctgcggatcagtttgccacgttggttgaactgaccaggaagaaacagcctgaattggttccatggctggcaaagcgcccgctacgagctttggaattgtccgaagactggccgcgcctgctggagattgtcacctgggtgctcaagcatccccgccccgcgatttacctgcgccagatagatctgccgggtgtccataccaagtttattgaagggcatcgaggcgtgctggcggaattgctcgatctcgtgttgccgggggaagccattgatgcaacacacacgggcattggtggattctgccgccgttatggttttttggacaaacctttacgggtgcgcttccgtgtgttggaccggaatatccggttgccggcggtggaatccgatcaggatatcactctgacgcaggcatccttcgcctctcttgatctgccggcatcgaaagtgttcatcaccgaaaatgagatcaactttctggcttttccggatgttcctgatgcgatggtgatttttggggcggggtacggtttcgacaatctcgctgctgccccctggttgcaccagcgaggcatctactattggggagatatcgatacccatggattcgccattctcaatcaattgcgtggattctttccccacgccgtgtcttttctcatggatctgcaaacactcttagcccataggtcactctggggagtggagaaacagcctgaaacagggaccctcgcgcggttgaactccgaggaaagcgccctttacgatcagttgcgccggaaccattggggggaacgggttcggcttgagcaagagaggattgggttcggttttctgcatgatgttctccggaggctgtga

SEQ ID NO: 41729 - DNA, 1473 bp, Burkholderia xenovorans LB400
atgagcacacaggacacattcgccttgtatgaagacttgcgtgctcgcaaggaggagccggcttggcgtcttctggcgacgcaacagtcgccggcaatctgcacatgcctgcacgtgctcttcctgtccgagcgtaccttgccgtcgtcggcattccacgagcgactgcaccggcaacttgaaatcgttcggcgcgccggcgccgacctgcccaagctggcagccgactactccagcgactggattgcggaaggttggttgcggcgggattttcctcatggcgcgactgaagagatgtttgagctgacggcgcctgccgttgatgccacccgctatctcatgcggctgagccgcccgcgtgccacggccaccgagagccgactcgcctccgtcgtccaactgctgcagacgctggctgaggagacggataacaaccccgagacccgcctagctggcttgctggcggaccgcgacgccttgaacgcacaaatccaggccgtgcgttctggcaaagtcacccagttgccacccgaacgggcaattgagcgcgcccgtgaggtgctgacgcagtccaacgagctgctagaggacttcgtccgagtgcaggagtcgctcgctgccattaatctgcagttgcggcgtgagctagtggaaaacgacggcgcgcgggccgatacgctcgagcgcattttcgacggcatcgatgtcatcaagcagaccgaggctgggcgcgcgttcgacgccttttggcggatgttggtcgacccagtagcatccaccagattcgaggcggcgctgacccaggtcatcacccgctcgttcctgggctccatggatgctactgagcgtcgctcactgacgaagctcaaaagtcggatggtggagcgggcggcggacgtgcacacagtgcaggcaaccttcgcctcaggcctgcagtcgttcgtccgcagccgagaatttcgtgagcaacgccgcctggtcgctcttctccgctccgcaacggtcgcagccatggccgccgcagaggacattcggcccactcagaaggtcgatgcgttccttttccggacaagcgccgccatacggtctgtgtcgcagtggatgctccacgacccgactgcgcatgtcgtggatgccacaatgaccgaaatcgagagcagcgacgcccgccttgaggacatcgaggagctggtgcagcgttcggaaatcgacatgcgctccttgaaacgcaacctcgttgcggcgctcggcttggccgatggccccatcagcattgcccatgtcctcgagcgtttccctgctgagcaaggcctgggttcggtcgtcggctacatacacttggcaactcgccatgccgaacccacggagagacgcgaacgcgttcgctgggaaggtggcgacggcatttggcgaagcgcagatgcaccgcttttctacttctacaaggaatgcatcgatgagcttcgagagtga

SEQ ID NO: 41730 - DNA, 750 bp, Burkholderia xenovorans LB400
atgcctgcgaacctgccgtcgaatgttgcccactggctggatacggcagacaacgacgagcctgcgaagcccgccgccccaccatcgacgctgctgttcaacggggacaccggcaatctacggctggacacgcgccggtgcctggtcagtctgctgaacggccccagcgtagatggccgacggcaagccgggttgtggtcagtgctgctgcgagaccgcgaggtcatccagacctacctccacaacatcttcttggacctagtcgtcgacatcgcccagcaggtcgcttttgtacgccaggtaccggacgagagcgagacggacatccccatcttgcttcgccgccaccaactgacgctggttgagtcggccctggtgctgttcctacgccagcgcctgaccgaggcggactcagccaacgaacgcgcggtggtgtccaccgaggagatggtcgagcacctctcgctcttcgaccaggctcgcaataccgacctcgcgcgcttcgaccgacagtgcgacggcgccatcaaaaagtgcaaggcgctcaacctcatccgccccattcgctcaagcgccacgcgtttcgaggtctcaccgacgctaaagctgctgttcaatgccgaggacatccaggccctgaccgccgcgtacgaggcgctcaagagcgcacctggtggcaccagtgagttgaccatggaccaggccatcgccgaaggcgagcgtgaggccgacgaagacgaagatgagtga

SEQ ID NO: 41731 - DNA, 3414 bp, Burkholderia xenovorans LB400
atgacgacaacttccaaaacgacactgctccctgacttcgacctgccgcctacgccgccagacggcccggacaatgtgcgcctaaagcgagagcgtgaggagcagttccggctggttcgaatccagagctacaactggggcacgttccacggcctgctgaagctggacgtctccgagaaggggatgctgttcatcggcccgtccggctcgggcaagtcgaccatcttcgactcacacgcagcgctgctcacgcctccccgctgggtgcacttcaatgtcgccgcgcgggaaagcgaatcgaagcaagaccgctctgacctgacgtacctgcgcggtgtgtggggagagcagacggccaacactggcgagatagcacagcagcagttgcgtcccggcccaacctggtcggcaatttccgaggtctaccgaaacggactgggccaggtcatcacgctcgtccacgtgtactggatcaagggcacgtccaaccagcgaaaggacgtgcacaagcgcttcatagtcgcggagcgtctgctcgacctcacagagctcttgttctttcccgactctggctttaacgcacggcgcttcaagtctgacctacccgatgtctgggacacagattccttcccggagtatcaggagcgcatgcgctcccgtctgggcatcgagaccgagaacgcactgaagctcttgcataagacgcagtctgcaaagaacctcggcagcctgaccgacttcctgcgggacttcatgctggatgagcccaagactcaggacatggctgaccagttggtcacccagttcgagcgcctggaaaatgcacacaacgaggtggtgtcagcagcgcggcaaatcgccacgctgttgccagctcgcgagttcaatctggaacggcagaaaaagctctcagacaaaggtcgcttggatgaggcccgcatgggcatcgaccacgtcgccaaggagatgctccaatcgctgcgtgttgagcgcagggacaccctcgaagccaagctggcaggcgaacaggctcaggagctggcactcgaacaagcgctcgcggccgtcaggacgacagtccaggggttgaagcagaggcgtgatggcttgggtggccagcagttggcggccctcgaggcatccaaggtcagtgccgaacgtgacgaaggcgagcggagccaacgatatggcaaggtcgctgaggcctgcaaggcgctgggctttaccgtacccgccaaggcagagggatatgccgagctggtcacccaaggacggcgagaactgccctctgccgcctctggcgcgggcgacaccgcgcagaagcaagacgcgcttgctgtgcagaagcatgagcttgacaaggagcgctcgaccatcctcagcgaactggccgtcctcgcacggatgcccggctcgaagatgggcgcagacctcataaccatgcgaaagctcatcacggacggcctcggctacgacgagggggcgctgccgttcgccggcgagctcatcgaggtcgagccatctgagaagggttggactggcccggtcgagcgagtgctcaggaatttctcccggacgatgcttgtacccgacaacttgcatgccgcggttgccaagttcatcaacagcacgaacctccgaggccgactggtctatctgcgggtgatgcggcagccgccaaggacgcctgctcccaagccgaacggcgtctatcggaagatcaaggtctccgacggcccgttccaggactgggttgagacggagttgctccaaagctatgacgccgaatgcgtcgagaccgaacgcgacctcgaagatgtggtcttcggcatcacgcgcgctggattgctcaagacgggtggtcgcaggcacgagaaagacgaccgctcggatatcaacaacacccgcaactgggtgctcggcggcgatacccgttcgaaggccttggggctgcaagaccgtgaacgcgagctgaccgacgccatcgacggtgttgaggctcagctcgagcagctccgcaagaaggagctggcacgcctgaaccgcgcgctgcactggcagaccctggtcaatttcagctggaatgagatcgaccatcgtggagcggcgcttcttgtggcccagttcgacacacagattcaagagctgcgcgcgacgacgcccgatctggacatcctcgaggtcaagattgtggtcgcggcagagagcgaggcaacggccgagaagaagtacaaggcccagtcgcaggcgtccatggcggtccaaatcaagttgaacgagctgcgagaggaactggagaacgtttccaagctagctcttacgtctcccacccccttgcaacgcgagacgtttctccagaagctcgatggagccggacgcaagccgaccatcgagtcgatgcctgatgacgtccggttcgtggaccgcgaaattggcaaggacatcggcaccctggagagcgaggccgccaggctgctgacccgcattgaagccaagttcgcggactacgcacgcacttgggaagcggagtcggacgggctggactcgacgatggccagctacgacgagtttgacgccaagctcacgcggcttcaggtcgacgacttgccacgatttgagaagaagttcaaggacttactcaatgagcagagcaatcagcacatcgcattgctctcagaccggttggagcaggagcgccgggacatttcggaccggatggacactgtcaacgagagcctcaggcaggccgagtacaacgagggcacgcatctggtcatcgaggtcgaagagaccaccccgcccgaggcgcaagaactgaaatcggagctccgtgccgccttgagtcactccttgagcatggacgacaaggtggccgaggcacgcttccagagcatgaaacgcctcatcaagcgactggccagccaagagccgcagcatgtaaactggaagaagctagcgctcgatgttcgactccatgtcgagttcgtagctcgagagctcgatgaggaaggccgcgaagtacaaactcaccgcagcggtgcaggcaagtcaggtggccaacggcagaagctgacggcgacctgcttggccgcggcactgcgatatcagctcggcggcccaggccgggtgctccccaccttcagcacagtgttcctcgacgaggcctttgacaaggcagacgcggacttcactgatgcggcaatgaagattttcaagtcgttcggcttccaactcatcatcgctacgcccatcaagtcggtcatgaccatcgaaccctacgtggggggagccgtctacatccatatcaaggaccgcatgcattcgcgtgcgctcgtgctgccctacgacgacgagacgcagagcatcgactacaggcagattgacggctcgagcgccaacgatgaaaagtcctga

SEQ ID NO: 41732 - DNA, 1290 bp, Burkholderia xenovorans LB400
atgaaaagtcctgaggaggtcaccaagtgggtcaggcagcgctaccagcgccaacgttgggcctggcttgacgggggcggcgcctggccgctccaagtgagtcttgaccttccgacccagaaggtcgcgcttgccgaccctagcgctgtccgcacatggtcgtcttcctgggcggactggctcgctgtccaccctgccgatgcgtctcgaccactgccagagcttttgacggccacggtcgcctggcgcaacatgggcgaacagactctgcccggcgccttggccttctcttctccggagtgtgtggccgactactgcggagacggcaaggtctggcgccgcatcgtctcccgacgggccacgatgctggcccggtggcccgcactgcatgcttcagggtttgggtccaactacaccgctctgggcgaattcaaggacgaggacttcgagcgactgcttgccgtgctggagtggctggtcgctaacccgaagtcaggcatctacttgcgccaactgccggtccccaacatcgacaccaagtggattgacctccaacgacgaggtgtggtcgccgacctgttcagccgcatcatcaagccgcaagccgccctccaggctgtccagtcgttcgtggagggtgaaggcgcagaaatcgacgccaccggccaggcatactccattgaaaaggaaagttcgaacttctacgacacctgcgggttgctacgtcctcccgtaaaacttcgcatcctgatcttgtgcccaaagttgagaacgcaagtcgggggcctgcgagacatcgaggcgaccatcgaggactgggcacaattgcagctcaaaccgcgccagcttctggtcgtcgagaacaaggacacatgcctggctatgccagacgtcgacggtgtcgtcgcggtcatcaagcttgggaacgccgtcgcattggtgaccagaatcgcctggctcgtgcgtgtgccggtactgtattggggcgacatcgacacctacggatattcaatactggttcaggctcgcaagaagttgcatgacgtgcgctctgtgctcatggaccgcagcaccgtcgaaacccaccttgaccgcctcgtcgaagaaggacagcaaacgaagtccatcgaccggtcgctcctgactgcggccgaactcgatgtctacgacgcgcttctcgcgcacgactggggtacatcaaggcgcctcgagcaggaacgcctagagtggccgagtgcgcttcgcactgtcttgtccgctctccaccaacgcgaatcgaaaagtgcatga

SEQ ID NO: 41733 - DNA, 1455 bp, Saccharophagus degradans 2-40
atgttttttgaagcccaccgctatcagttctttaggccccttgtaggcaagtaccgcgaacaggtggtggaatgcctgcgtctgctgtaccagcgcttgtacagctctaatgccgattacggtcactcgctttcgcgcgagcaagtaatagaaatactggaagaagcactggtgcgcgcaccggtaatggagttggcagagggtgaagagggcgcagcggacgagcttgccccgcaacgctttaaaagtaaccgcgaacacgccagctggatactcaagcaactgctggattacggctggctagagaagcaggtggataccgctacgctgcagtcgacttaccccttctcgcgtatggggcgattatttacccagccgctcgttgaggccgacagcaaccaaattcgcacccgccatcgcaacacccgcaatacgctcaatgcattagaagcgtttctaaaccgtggcgaagtgcacgaccttttagatgcgtttgaatattcagagcgcattgttaccgactttaccgatgtgattgccgagctagaagaccgcaagcgccagctagtgcgcgaagtagaatcgcaacaactagtgcaacaggcaacagaccaattttttgaatttatggagaagcgttttcagcccgatgtgtcggttcgcctttcggctgatagcgtagaaaaacaccgcgaccaaataaataaggccgtgacaaaaattcgcagaaaaaacaaagaatttaatcgcgaagtagaaattcagttgcgccggttaattccggaaatggcattgccgggccagtcggtgttgtggactattttagataccatcgagcgccgcatggccaacgcttccgaaattatgctgcccgcattgcgccgcgcgctgcatagttttaccaagcgcgccgatattattattcgtcaactaagttatttaaccagccaaagcaataacgatttattgcgcgtgtgcaaagcggtaagtgagctaagccaagaagaggccgacgagcgcttaaacgctgcggccgagcatatggccaatatgaaactgcagctaatcgaccctgcgcaaattaaattgctagagcgcaagcaaacgcgcatggtgcaaaccgccgttatggagcaacaaccgctagatgccgaagctcagcgcgatttaaatattcagcagttgttagatcaagcgtttgcaatggataacaaaagcctgcgcggttatgtgtttaaggcattgcgcgaaggccgcaaaattaccagcaaaaatttacctgtagatagcgcaaaagatttgctagccatggcccacgtaattgaagtgggtggcgtaaacggcttaagcagcgactaccaatttatagtagagccaaccggtaaccgcattgagtcggattattaccacgcgctagacgagtttaccatcgagttaaaaaccaaagatgattga

SEQ ID NO: 41734 - DNA, 1359 bp, Saccharophagus degradans 2-40
atgattgatacttttttagaagagcagttaaaacctgcgggcttaagccgagaagaattttctgaggtggtaattcgccttttggattacggcgtaatatgccgtgacgaaagccaaatagaagcatcgctgtacgatcgctatttgcagtgcgccaacaccgtagaagattacttagccgtaattggtgtgcgcatacagcacgatcgtcaattttgctttttgcgcgtatttccacccggtgccaatgtgcccggtatggcagacgaagactgctcgccatttaacagtggctttcgcgctaaacccaatcagcaagaggtggcagctattttagtgttgcgcgcagaatacgaaaaatcgctgcgcgaagggcaggtagatgaaaaagggcgggccatgttatcgctagaaggcctagcaatagctatgaacaacctgcttaaacgcgccttgcccgatggcctcgtcgagcgcaaaaacttgtttcgccgattgcgtcaattgcgcttggtgcactttaataccgaagatgagctggataacagcgaaagctggttaagcattcagccctctattacaagctttgtaagcgatgaggttttatctaccctgttagaccaaagcgatgcttctgtaccggttaacaagccagctataaacgaagcgggcaaaagcgaagccaacgcaattgaagatgaagccgataaagaaatagaagaagaaaataaaattattccaagcgcgctttttggcagcagcgatgcagatagcagcgcaggcgctgatgaagtggaagaaggtgctacccaaaaagaaccagagcaagtagacgagcaacaagcgccgccagttgtggaagcaagagctacaaatgtagaagctacaaaggcagaagcagttaataaaaaaactgcagaagaaaaagcagctgaagcaacaacaagcaagcaaaaagccccagctaaaaaaacagcaactaaacccgctgccaaaaaagccgtagcagctaaaacaccagcaaaacctgcagccaaggcggcgcccgctaaaaaggctgcacctgctaaaaaagcaatggttgccaaacccgcggctaagcctgccagcaaacagccagctacaactaaaaaaccagcagctaaaaagcctacggcaaaaccagcacccgcaaaaaaagccacaacggctaaagctgcggtaaaaaaagcgcctgctaaaccggccgcaactaaagcaacagccactaaaacccccgtcgctaaaaaaccagcaaaaaaagcacctgcaaaaacagcagcagctaaaaaatcaccggctcgcaaagccccagcaaaacctaaagggggtaaagcctaa

SEQ ID NO: 41735 - DNA, 3645 bp, Saccharophagus degradans 2-40
atgtttttaaagaaaggcgtttttgtaaactggggtaatattccccacttagagttcgattttgggccaattaatttattttctggcggtaacggctcgggtaaaaccacagcggccgatgcgattcaaaccctaatgaccgccgcccacgaaaacctgtttaactacaaccccgggcaagatgaaacaactcaaaaaggtcgcggaggcaaacaggtgcgtacgctggcctcttatgttttagggtgcgatgacggcagctacgctcgcccctggccaaccgatggctatgtggcaggtattttccaccctactcagggcgaaaccggcgaagtgtttaccgcggttatgtgtattcgcgcgcatgtagatagcgcaggtaaccaaaagcaggcgcggcaagatgatttatttttcgttattgtgcctggcgaagagcttaccctctcgcattttgtaaaaacctattccgacggcaaacacgtagtacccattaacaatattactaccttacttaaaaaagagtacggcgcaaaagccatagaagtgtacgacaaaaaaggggcgtacctgcgccgcttatacggtgcactgcgcggcagacgcgatgcggtatccgaccgagaagccaaacacgcggcgcgcaccttctctaactttatggcctataaaccggtaaaaagtattaccgagtttgttgcgcgcgaaattctagagccaaaagatttaggcgatgcaatccgcaacgtatccgagttaatgaaaaccattaaccaaatggaatcggataccaaacatattcgcgattctatagatcgcctaggccaagccaatggcgcagccagtaaatatgtagatacttgggtcgagcgcaacctaacccaatacgccgaagccacgcgtttacttagcgtaaaccacaccaactatattgccgctaaaaacgaacagcaaaatattcgcgaaggcatagaagaaaacgaagagcgtcagcgtatttgcgaacagcgcaagcagcagttccacgatgagcgagttgcgttagaggcacagcgccaaggcattagcgcactaaaagataaagatcaactagagcaaactattgccgatcgcacccgcgagctgggcgaaaaagcgcggcccttgttggagcaaagccagcagttggcaaaaaacctagacgcaacccaaaaactaatgggccagttgtctgaatgttccctcgccatagaaattccccaattagatagtcgcgactttagaaaacaggcgaaggccgttaccgcagcagaaaaccaagtagatatagatctatcgcggctgctagccaaagactgggtgggcatagagcagctagagcaagatttggatcacattctatcggccgatgcattgcatcgtcgctgggcagaatatttacacaccagcgagcgcaccggtggcagcagcagtattcgcgatcaaatatcgctgtatttatcgggcagcgatcgccgccgccaagatttaataaacaagcaaaaacaaaagcaaaaagaaattcagctgcttgaaagtaaaaaggtaagttaccccgcctatgtcgaaacagcgttggcagctataaataaagcctgcccgcaggccgaagcgcgggtattgtgcgactacatagaagtgctagacccaacgtggcaaatggccatagaaggctacataggcggtgcgcgattctccattattgtagaacaagcctacgaagccgaagccatgcgcatagtgcgcgcactgcccgatgcacggcgcaacaaggcgcgcgttattcagggttacaaagcccagcgcgatgccgagcgcattagtttaccgcgcgactccattattgatgtaatggcttttagccacaaaaccgccgaattttatttgcgtgcctcttacggcagcgtagtgcgagtagacgatgccgaaacactgcgcaccaccgcgcgcggggttacgccagaaggtttagggtctggtagctacagcatgtggcgctgcgacttaaacgacagcgaattggtatttggccaaggcgcacgcgagcgcgcattaaaagccaaagaacgcgaatatcaccaacttacagaagatgccaacaacgcagagcaagattaccagcgcatagcccgcatttttgatttggtggatgccattaagcccgtgcactgcggcgatttaatccaagggatgttggaattgcaccgccaaataggccaggcggaatcggccttgtcgcgcttagacttaagcgattttactcagctagaagagcagcttgccaacttaaaagcgcagtatgccgagcaagaaaagcaatcgcgcaacttgggtgaagagtctggccgcttaaaagaaaaagcgcgccagtgcgagcgcaaagtaaaagattacgccgatgccgaagaaagcttgcaaaccgtgcaggaggaattcgaaaaagcggtgtacagcatggcagagttatacccgcaggtagataccaaccttgcactgcagcaagccgatcaaaaagcgcagcaagcgggcaaagattttagctttgtggatgaagtagataccctcaccaaacgcttagaaagtgccgagcgcgagctatacaacgctattatgacccataaccagcagtgcaacagccaagatgccgtggtgtacgataccggcgtgggcgaggtgcacggcgaaggcttcttcaaagccatactgggcttaaatgagcaggtagagcttattcgcaaccgcttaaaaaacaacgtgttggtggataaattcggccagctcactagcctaaaagacagttttaatacagcgtttgtcacaaacctttgccattctatttaccaggcaatttgcgatggtaaaaagatactcgacgatctaaaccaagaattagagcatcaccgttttggtgcagaccgcgagcgcttttatttcgggtatgaatgggtacccgaatttcgcgactattggcgttttttcaaagaagttatcgacgtacccaacctaggcgacggcaccagcctgtttgaagccgaactttctgaaaaagcctgtggcgtgcgcgaccaaatgttagctatgctattagataaagacgaaaccgtagccatgcgcgagctaagccgcataagcgattaccgcaactaccgtttctacgaaatttataaagagccgcagggcaaagcccctatcgccctaagccaatacggcactgggtctggtgggcagctagaaacccctgcctacattattcgctcggcggcggtcacatcggctttccgctttaacgaaggcaataaccacctgcgcatggtgttagtggacgaggccttctccaaaatggacgaaacccgctcgcgggaagtgattaactatttaaccgaaacattgggcttgcagttactgtttattatgcccaccagcaaatctggcccgtttatggatttaattagcaatcagtttgtgtttagtaaatgccccacaactagccccataggcgagctaaaaacgcgcgtgcttgtggatcgcaaaacctgtaatcaagaaaaaattaaacagctgtgggccaaccatcgcaaaactattcgcagccaagccatgttagattttatggaggacataacctaa

SEQ ID NO: 41736 - DNA, 1251 bp, Saccharophagus degradans 2-40
atgggatgcgtattagattcaacattagagcgaaccgacgaagagggatttttaacacggccgcgctggctggatgaggagcgattacccaatcgcgtgctcgaccgctttttaactaaattagaaagcggtcagcgtctgtccatgcgagttaacagtaaaaccacccccgagctattcgattttcaagacgaagatgtgcgctaccagtgggagttgttaaaaagtctcgacaaagaatttcatattcttaatatcaagctagagcgcaacaaagcgcaccaagaaagctacgaaaatgcccgcctgtattttaaccccgataaagaaccgctcgttcgccattggctaaaccgcccagctatagacccctacgcgctagtgtgggaagccgagctcgcgaaacaaaaacaccattttgacgattacggccaagcactgttcgagcgcatagtacgcctgcccgatcgcggcccagagcaaaccattaaagcctttgcccgcataggcaaagagctgcaaaagcccattacattgcgtgcgctatctgcccgctgcttttggggcgattctaaatttttagagcacaacgaacaattggtgcgcgatttatttccaagcgtagagcacaacattttaccgcgcccaatacttatgtgcgttcacttgcccgagcagctagagcatgtgttgtttgtagaaaaccaagatacatttttggctctggccgccgccaacctacctaactacgcactggtatatagcgccggttttcgcggcagcgcgctaagaattcgcacaccgggcaacgcagtgtttagctttataaaccacagcaataatgcaattaaagatgcgtttgaagcatggtggtttgaagctaataccaagcatgccagtaacaaagattccagtaacaaagtaagcacaataaaccccattaaaacgtggttgtggggcgatttagattttgccggcttcaccattttaaaagcactgcgccaaacatttagcactataaaagcgtggcaaccgggttacctacccatgttaaataaattagaaaccggttggggccatggccacgaagaaagcggcaaaggcctacaaaaagacccagagcaaaccggctgcgaatttaccgataccgtactattacctgcaatgcgcgaagagggcggctttgtggaccaagaagtggtgtcgctagaagagctaatggcggtgttagagcacggtggcagcgaataa

SEQ ID NO: 41737 - DNA, 1437 bp, Pseudomonas stutzeri A1501
atggactatgcgcaactgctcgccctgcgccagcgccatccggcctggcgactgttgcgcgccgaccatgcaccgctgatcgcgagcttcctgcaacaggccttcgtcgcgcccaatcgccgcagcctggacgcccgcagcctggcttcgctgctcgaggacaggctctacagcctcaaccaggaggcggacgaacccctctttccgcgcagcgccagcgcctatctcgacgaatgggccgacaacgccaacggctggctgcgcaagttctacccaccgggcaacgatgaggcccatttcgagctgacgcctgccagcgaaaaggccatcgaatggctggccagtctgggcaagcgccagttcgtcggtaccgaatcgcgcttgctgtcgatcttcgagctgctgcgacagatggtccagggcagtgagaccgatccccaggcgcgcatcctcgaactggaaaagcgcaaggcggcgctggacgaggagatcgccaggattcgagccggcgaagtcgcgctgatggacgatacgcgagtgcgcgagcgcttcctggaagtcgacgccagctcgcgcagcctgctggccgattttcgccaggtggaacagaacttccgcgacctcgatcgccaggtgcgcgaacgcatcgccacctggggcggcggcaagggcgagttgctcgcggagattttcggcgagcgcgacgccatttccgattccgaccagggccgcagcttccgcgccttctgggagttcctgatgtcgccggcgcgccaggaagaactgtccgagctgctgcacaaggccttcgcgctcgcgccggtacaaagcctggagccggaccggcgcctgctgcgcgtgcactacgactggctggaagccggcgagatggcccagcgcaccgtggcacggctgtccgagcagttgcgccgctacctggacgaccaggcctggctggagaatcggcgaatcatgcacctgctgcgcgatatcgaaacccgggccctggccgtacgcgagcagccgccgaacgccgaactgctcggcatcgatgcgcccgcgccagaactgaccctgccactcgaccggccactctatagcccgcccttgcggccgaagatcgaaaccctgatcctcctcgaaggcgaggacgagagcggcggcgaggcgctgttcaaccagttccacgtcgacaaggcgcgcctgcttgagcagatccgccaggccctgcgccagcgtccgcggatcagcctcggcgagttgctggagacgtatcccatgcaacacggcctggccgagctggtcgcctacctggacctggccgccagcgaccgccactgcgccttcgatgaacaccagccgcagctggtgcaatggcaggacgccagcggcaccctgcgccgcgccagcattcccctgatcgtattcggccaatga

SEQ ID NO: 41738 - DNA, 591 bp, Pseudomonas stutzeri A1501
atgagcgacaccacacccgacaatgccttctcgctgctgctgatcgccctgttcaagggcgtgctctaccgcgaggacgatgccgcgcagtggcagcaactgctcgaccggcaagctgccgcgcgcgattacctgggcgtgatcggcctggaactgatcctcgacgaggccgaaggctacgcctacctcgcgcagcgcgccgacgaggacggcagtgccctgccgcggctggttccgcggcgccagctcagctacccagtgagcctgttgctggcattgctgcgcaagcgcctggccgaagcggatgccgctggcggcgaacggctgatcctgtcgcgcgaacagctcgccgagatgctgcgcctgttcctgcccgagggcagcaacgaagcccggctggtcgatcgcatcgacgcgcacgtcgccaagattgtcgagctcggcttcctgcgcaggctgcgcggccaggacgaatcgctgtacgaggtgcggcgcatcctcaaggcgttcgtcgatgcgcaatggctcaacgagttcgaccagcgcctcggcgaatacgccggccagcacggcacggaggaacagccatga

SEQ ID NO: 41739 - DNA, 3384 bp, Pseudomonas stutzeri A1501
atgaacgctcccgacacgctttccctgctcgatttcgccagcagtgacgagcgcgccggtttccgcctgcacgctatcgaggtgtacaactggggcaccttcgaccagcgggtctggcgctttcccacccgcggcgacaatgcgctgctgaccggcgacatcggctccggcaaatcgaccctggtggacgccatcaccaccctgctggtgcccgcgcagaagatcgcctacaacaaggccgccggcgccgaggccagggaacgcacgctgcgctcctacgtgctgggttactacaagtccgagcgcagcgaagccggcctcagcgccaagccggtggcgctgcgcgaccacaacagctattcggtgatcctcggccatttctacaacgagggcttcgaccagcacgtcaccctcgcccaggtgttctacatcagcgacaaccgcggccagccggaacgcttctatgtggtcgcggaccgtccgctgtcgatcaccgaacacttcgccagcttcggcagcgacctcaacgccctgcgcaaacgcctgcgcgagctgccccacgtcgagctcgaacccagcttcgccgcctacagcgccgccttccgccgccgcttcggcatcgccgacgaccaggcgctggagctgttcagccagaccgtatcgatgaaatcggtgggcaacctcaccgatttcgttcgcgaacacatgctcgaggagtttccgctggacgagcgcatccaggcgctgatccaccacttcgacgatctcaatcgcgcccacgaggcggtgctcaaggccaagcggcagatcggcctgctgcgaccgatggtggacaactgccagcgttacgccgaagcctcggagcaggcgcaagggctggtcgcctgccgcgaagcgctggcgccctggttcgccgggctcaaggccgagctgctggacaagcgcctggacaacctcgcccaggacatcgcccgccagcgcgagcagcgccgcgcgctgcaggagcaccagcggcagggccagtcgaaacgcgacgaactgacccgcgccatcgcccagaacggcggtgaccgcctggcgtcgatcaggcaggaaatcgcccggctggaagcggaccagcagcgccgccagcatgccgccgaacgctatgaccacctcgccggcgcgctgcagctgccgcaggcgaacgacgccgagccgttcctggccaaccgtcaggcgctgcccggcctggtcgagcagtgccaacaacagcgcgacagcgcgcagaacggccagaccgaagccgccgtcgaattgcgcgacctgcgccagcagcatcggcagctcgaaaccgagctggagtcgctgcgcagtcgccgctccaatctgccggcgcggattctcgacatccgttcgcgcctctgccaggcgctggagctggacgaggccgcgctgcccttcgtcggcgaactgctgcaggtgcgcgaagacgagcgcgactgggaaggcgtcgccgagcgcctgctgcacaacttcggcctgtcgctgctggtgcccgacgcgcgctacgcccaggtcgcgcaatgggtcgaacagacccacctgggcgagcggctggtctacttccgggtccgtgagcggcgcctgcagacgccggccgaaacgcaccccgagtcgctgctgcgcaagctgcagatcaagccggacacgcccttctacgactggctggagcaggagctggcgcgacgcttcgactatgcctgctgcgcctcgctggaacagttccgccgcgaggacaaggcggtcacccgcgccggccaggtgaagtccggccaggagcgccacgagaaggatgatcgccgccggctgggcgaccgcacccagtacatcctcggctggagtaacgagcagaagatcgccgccctggccgggcaggccgacgatctgcaaacgcgcatccagcgacaggccatgcaactggccgagctgcagcagcgccagcgcgacctcgatgaacgcctcggcctgctcaaccaactatcggtattcgacagcttcgaggcgctggactggcggcccctgctcacgcagatccatggcctggaacaggagcgccggcagctcgaagccgagtccgacaccctgcgcacgctgcaacggcagttgcaggcgctggaagacgaactgcgcgaaggtcgcgacgcgctcgacgagaagaaccgcgagctgagccgcagcgagcagaagcacgaagacgcccaggccctgaccgacgaggcgcgcgcgctgcacaccgccgcaagccccgagcagcaggcgcgcttcgtcgaactcgacagcttgcgcgccgaagccctgggtgaacacacgctgacggtggaatcctgcgccaatcgcgagcaggccatgcgcggctggctgcagggcaggatcgacagcgagaacaagcgcctggaccgcctgagccagaacatcatccaggccatgagcgagtaccgcatcgagttcccgctggaaacccgcgaggtggacgccagcctggcggccgccgaggattaccgcgccatgctcgacagcctcgagcaggatggcctgccgcaattcgagcagcgcttcaaggcgatgctcaacgaaaacatcatcaacgagatcgccaacttccagagccagctgcgccgcgaggagcacgacatccgcgagcgcatcgaggagatcaaccgctcgctgcgggaaatcgactacaaccccggtcgcctgatccagctggaagcgcagtccagcggcgacggcgagatcgccgagttccgcgccagcctgcgcgcctgcaccgaaggcagcctctccggcagcggcgacgagcaatacgccgagggcaagttcctcgaggtgcggcggatcatcgagcgcttccgcggccgcgaaggcctgagcgaccaggaccgccgctggacccgcaaggtctgcgacgtgcgcaactggttcggcttctccgcctccgaacgctggcgcgaggatggcagcgaacacgaacactacagcgattcgggcggcaagtccggcgggcagaaggagaagctggcctacaccgtgctggcggccagcctggcctaccgcttcggcctggaatggggcgtgacccgctcgcgttcgttccgcttcgtggtgatcgacgaagccttcggccgtggttccgacgaatcggcacgctacgggctcgaactgttcaagaagctcaacctgcagttgctaatcgtcaccccgctgcagaagatccacatcatcgagccctacgtcgccagcgtcggcttcgtgcacaacgagcagggccgcgaatcgaagctgcgctgcctgagcatcgaggaataccgcgagcgcaaggagcagttgggcgcaacgcagtga

SEQ ID NO: 41740 - DNA, 1185 bp, Pseudomonas stutzeri A1501
atgaccgtctggaccacccccaccgacctcaaaacccagcttcaacgcctctgggaccagggcacgctgctgcgcgcctcgctggccgatgaggcgcttttccccctgcagctgcgcctgaagaagcccaacaaccaggcgctggccgaacgtttcgacgaagtgcgccagtggattcggctgttgcaggcgggcgaaggggcctatcggctgcaatggaaagagatcaatcaccgccagctgggccgcaatcaggtgcccgatggcgcctgggtcgacagcctggacgccgccctgacgctgctcggcaggcgccgcgaggccgagcgttttcgccagttggccgaggccaccctggcggcgtttcccgcgctgcacggctggctatgccgctatcccctgcgtgtactggaacagggcgaacactggcacaaggtgctggcggtgctgcactggttccgcgcccatccccacagcggcctgtacctgcgccagctggacatccccggggtcgacagcaagttcatcgagcagcggcgcggcctgctcggcgagctgctggacctggcattgcccagcaccgccatcgatgcccaagcgcgtggcgcccgcgccttcagccgccgctacgggctgcgcgacaagccgctgcgcatacgcctgcgaattctcgatccgcgcctggcgatcagcggcctcagcgacctggaaatgccggtggagcaactggccgcactgcacctggagcaccggcaggtattcgtcaccgagaacgagaccaatgccctggcgtttcccgcgcaggccgggagcatcctgctgttcggccagggctatgcgctggaccgcctgggcgacatcccttggctgcaccgatgcccgctgcactactggggcgacatcgacacccacggcttcgcgattctcgatcgcctgcgtgcgcatttccccctggcccgctcactgctgatggaccgcgaaaccttgctggaacatcgcccgctctggggcgaagagccgccggacaagcgctgcacggccacactgcggcgcctggacgatgccgaactggcgctcttcgaggacctgcgcgacgaccgcctgggccagcgcatccggctggagcaggagcacatccgtttcggctggctggaacgggcgctgcgcgggctgcacagcttctag

SEQ ID NO: 41741 - DNA, 1440 bp, Mycobacterium ulcerans Agy99
atgttgaggcgtccgaccaactacagatcgaggacgcagatgcacggcgacaacgcgggactgtcggcgaccgagctgctcgatctcaatcgcgacttgcagggctctcgcgccattcgcctgctcgccaccaccaacctcagcctttacgcgacgctcatggagcgccacctcagcgacggggcgctgcctgagaccgagctcgtcgtacagctcgaccgcgacctcgaagacgtcaacgatccgcagcccgggctcgccctgatcaagtcctgggccgcgcagggctggctgcaccgcatcgtcgacgagcgccacggccagaatgtctgctatctgacccaggacgctcgccgggcgctggactttctccgcggcttgcgtcgccaggacaccatcgccaccggcggctcgattacgggcatcgccgcgcgcctcaagcaagtggccgtcaaagtggataacgaccccgcccggatccgcaaacacatcgaagccgaaatcgccgcgctccacgaggagcttgaccagctcgatgctggccagcgtccccaaaccgatgtcaccgactgctacgacgaggcccgcgcgatcgccctgcagatggaacgcctgatcaccgatatcggccagtacggcacgatgatcgagcgggctacctccgccctcgatgaacccatcgattccaacgccgagtaccgcgaccgccaacgccagatgtacagcgactaccaggccgcatgggactcccagggccgcgactcccaccgcgccttcctgcgcatgatcaacgaccccgaccaacgcgccgagttcgaggccgacgtcgccgccgtcgccgaagccctgcccaggctcgacccggccctgtgcaaggtcatggccggcttcttcgagctcgtgggccatcagatcgacgaagtcgagcgcatccagcagcgctgcgcccagcgcgtcaaacgcttcaccgcgttcggcaccatggaacagagccgcggtgtcgcccgccaactcaacgaagccatcgccgcagccgcgccctgctcaagtcgtcgttcaccgactcacgcctggacatcgaggtcccgctggcgcggcacgcgatcagttccgtcggtgccctcggcttccggatcggcgacctgtccaaccccaagcccgccaaacccggcgacaccgaggtcgacctcaccagcttcgccgccttcaccacccaggtcgacgcgcccgcgatgtccgacatgctcaaccacgcgatcaccgcggggcctgtcgcgctacccgacgccgtcgccatgctcgacaccgcctacctgggccacgtcatcgtgctgtggtcctgggccctcaaacagcccaaccccgacaccgccgagtcgaccgccgtccgcttccgctccctggacggccgtgacctcgaaatcgcggtacctcgtttga

SEQ ID NO: 41742 - DNA, 696 bp, Mycobacterium ulcerans Agy99
gtgaccctccaagacgatgaagtcgacatcgacttctcctcactccctcaggtcgaccagaatgcccgcccaccggttcagcgccggccgcgcttcgacggcgacgtctccgaactgcccgaccgggcctgttgggccctccagcaccggcttacccgccgctacatcagcgccgaagccgacgccgacgtctacagttgggtgcccgaataccgcaaggacctggccgtccggctctccgaactcgacttgctgctgcgcatcgtcgacgccgccgatgtcgcttttgtcgaacaggcccgctacgagtctgcgaggggaatcaagcttttacgccgcgagccgctcggcacctacgactcgatccttgccctgcacctggcccagatgatgcgtgcctccggtgggcagaccgtcctgatcagccgtgaggagatacacggcctattctccggggtgctcaacgacaccgaccgcgacgcggtctcgttcgccggccgcatcgacggcgccatcgcccggctgaccggcctagagatcctgcgcaagacccgcgacgacgaggacagctacacgatcagccccgtcatcaccgccgtgatgactgcctcggtgatcaccgagctgcagcagcagttcgagcagctgctcaacggcggtgcgccagcagaggaagaagaacccgaaggtgactga

SEQ ID NO: 41743 - DNA, 3342 bp, Mycobacterium ulcerans Agy99
gtgactgaacagttccacctgtctcggctgcaggtcatcaactggggcgtgttcgacggctaccactcgatcccgttcagcgtaggcggcgcactcatcgccggagcctccggcagcggcaaatcgtcactgctggatgcgatttcgctgggattcctgccgttcaaccgccgcaacttcaacgcgtccggagacaacaccgccgccgggtccagcgccgggcgccgcactgtcgacaagtacgtccgcggcgcctggggccagcgcagcgacggcggcaccagccgggtgatgtatctgcgcggcgacggcaccgcctggtcggccgtggccgtcacctacgccagtgactctggccgcaccgtcaccggcctggtgctcaaatggctgacaggcgagtcccgcaacgactcgtcgagccgcttcgtactcggtgacggtgacctcgacatcgaggaagtctgcaaccgctgggcctccggccgtttcgacgcaggagtcttcaaagaagactggcggttttccaccaaggtcgaatcgcagtacctcgcccagctctacgcggcgatcggcattcgcgcgtccgacgccgcccagcagctgctcggtaaggccaagtcgttgaaaagcgttggtgggctagagcaattcgtccgcgaattcatgctcgacgaacccgacagcctggcccggctgcccgaggcgctcaagcagatcgaccccctggtcgaggctcgcgaactgctggccgttgcgcagaagaaacgcaagatcctgggcgacatcgaacagatccagcagcgctacgcctcggagtcctccgacctcggcatcatcgacctcgtcgacgcgccgatggtgcgcgcctacaccgaccacgcccggcttgcgcaatgtcccgcccagatcgccacgctcgacggcaccgtcgaccagctcgaaaacgaatacgaggacgttacccgcagcctcaatctggccaaggccgaggcggattcgctcaacgcgcagatcagcggttccagcgcgaacatcgctccgctgcaatcgcaggtcaccgccgccgagacccaggccgagcaggtggagcgccgccgaacgacctacgaggacatgctggccgcccagggtatcgaaatacccgacaccgcagacgagttctggaaccttcgcgaggaactgctcgcgcaggccaccgaactgctcgccaaggtcgaacgaaaccgagaggcatccaccgacgccgagtacgcgcagaaggctacccgcatcgcccgcgacgatgtcgccaaggagctcaagcgcgtcgaacacgtcggttcggcgctgccggagttcgcgctcgcgatgcgcgaccacatctgcgctgcaatcaaagtcgacgccgccgagctgccctacatcgccgaactgctggatctcaggcccggccagacccgctggcgcctcgctgtcgagaaggtgctgcgcggggtgggcctgcggctactggtgcccgaccagcattgggagaaggtcctgcggttcgtcaacgagaccgacatgcggggccgactgcagctgcaccacgtgcgggcgaagttcctcggcgccgaacctgctgagcccgagccgaacacgttggcgggcaagcttttccccgtcgatccgaagcatctttgtgccgccgaagctgtcgacgtcatcaccggagccggcgaccatgtgtgcgtcgatactcccgacgtattctcgcggttccgccgcgcggtcaccgacacggggctgtacaaggactccgaccggctggccgtcaaggatgaccggcgaccggtcaagctgtccgagtacctctaccagggcgacgtcaccgcgaagatcaacgcgctgaccgtcgagctgacggccgccgaggaggcctatcagaaggcccgccgcaccgccgacgacatcgccgcccagcgccagcagtggcgcgaccgggcggcggcgtgcaaggcgatctgcgagcaatacccgcagtggagtcagatcgacaccgagaccgccgacgggcatgccgagcggctgcgcgagcagtacgaactgctgatggccgacaatcccgacatcgaggcgctcaacgcccgtgccgacgaatgctggtcgcagattcagaaactgatgacgcgccgcgacagcctcgacgagcggcgcacccggctgctggagctccaggagcggctgtccccggcgttcgtgtccgagccgttgacagagctgctgcagcgctacgccgcgcagctgcccgtcgcgctagagctgcttgacccggaacctcaccgcgatgcgctgttcgccgcgatcaagaaggaacgtgaacaactgcgtgaaagccgccgtcgttcctatgacgaattggcccgcatcctgaacacgttcgacacgtcgtttcccgatgcgattccgaatgactccgacgattttgacgagcgtgtgcacgattacgtcgcgctgtgccgcctcattgacgaacgcgaacttcccgaagcctacgagcggatgatgcggctggtcaccgagcaggcgcccgatgcgatcctcacgctgcaccgtgtcgccgagcaggaggagcggcggatcagcggccagatcgaccgcgtcaacacgggtttggcggcggtggagttcaaccgtggcaccaggctgacgttgcgggcgaccccgcggcacctggtagcggtggatgagctgacccagatcgtgcggtccatctcgcggcgcatcgccgaggtcgggctgggcgacaagcaggcgatcctcgaccagtacgccgagatcctccgactacgcaaccggctggcctccacggcgccggaggacaaggcgtggacgcgcgacgcgctcgacgtgcgcaaccggttcacgttcgactgcgccgaatgggacgtcgacaccgaggaactgatccgcacgcacagcaacgccggcgacaactccggtggcgagcaggagaagttgatggcgttctgcctcgccggcgcgctgagcttcaacctggccagccccgaaagtgacaacaacaagccggttttcgcgcagctgatgctcgacgaggcgttctcgaagtccgacccccaattcgcgcagcaggcgctgcacgcattccgcaagttcggcttccagctggtgatcgtcgcgacggtgcagaacgccaccaccatcgagccctacatcgacagcgtggtgatggtgtccaaaaccgaacccaccggcggcaacgcgcgaccggtggcgtcggtggcgaccaggacgatctcggagttcacgtcgctgcgacaagagatgcgcaagacggcggaacgagtaccagccggggtgtga

SEQ ID NO: 41744 - DNA, 1443 bp, Mycobacterium sp. MCS
atgcaggtggacgacaacagggggctgtcggcggctgagctgctcgaactcaaccgcgacctgcacggatcccgggcgatccggctgctggccacccacaacctcgggctctacgccacgctcatggaacgccatctggccgacggcgtcgtcgccgaaaccgagctggtggtgcggctggagcgcgacctgcacgaactcgaccccgacggccagtccgggctggcgctgatcaagtcgtgggccagccagggctggttgcaccgcatagtcgacgagcgcagcgaccagaacatctgctatctcacccaggacgcccgccgcgccctggacttcctccgcgggatgcgccgccaggacaccatcgcgaccggcggctcgatcaacggcatcgcctcgcgcctcaagcaggtcgcgatccgcgtcggcaacgaccccgcccgcatccgcaagagcatcgaagccgagatcgcggcgctgcaggccgaactcgacgacctcgaggccggcacccgcccggagccggatgtcaccgacgcctacgacgaggcccgcgcgatcgccctgcagatggaacggctcatcaccgacatcgggcaatacggatcgatgatcgaacaggccaccgccgcgctcgacgagccgatcgacagcaacgccgagtaccgcgaccggcaacgccagatgtacgccgactaccaggccgcgtgggactcgcagggccgcgacagccaccgcgcattcctccggatgatcaacgaccccgaccagcgcgccgagttcgaggccgatgtcgccgcggtcgccgaggcgctgcccctgctcgacccggcgctgcgcaaggtgatggccgggttcttcgaactcgtcggccaccagatcgacgaggtcgaacgcatccagcagcgctgcgcccagcgggtcaagcggttcaccgcgttcggcacgctcgagcagagccgcggggtggcccgtcagctcaacgacgcgatcggcgccgcccgcgccctgctgaagacctcgctcacggactcgcggctgggcatcgacgtgccgctggcccgccacgcgatcagctccgtcggcgcgctgagtttcaagatcggcgacttgtcggcgcccaaacccgccaaacccgctgggggcgaagtggatctggcgactttcgcggcgctgaccacacaggtcgacgcgcccgcgatgtcggacatgctcaacgccgcgctcccggtctccctctcccgcgccgtcgacatgctggacaacgcgtacctgggccacgtcatcgtgctgtggtcctgggcgctcaaacaaccgaacgacgggcggccggcgtcgaccaccgtccggttccgctccctcgacggccgtgaccgcgaaatcgcggtgcccgacctgatgttcaccgaaccgatcaccaccctcgctggagtttcgcagtga

SEQ ID NO: 41745 - DNA, 699 bp, Mycobacterium sp. MCS
gtgacctctccgtccaccgaacatgacgcggacttcgccgcgttctcagagctcccccaggtcgaccagaacgcccgtcccccgcaccagcgcaggccgcgcttcgacggcgacgtctccgaactccccgaccgcgcctgctgggcgctgcagaacctgctcacccgccgctacatcagcgccgagaccgacagcgacctgttcagctgggtgctcgaataccgcaggcaactcagcgtgcggctctccgaactcgacctgatccttcgcatcgtcgacggaactgatgtggcgttcgtcgaacaggcccgctacgaatcggcaaggggcgccaagcttctgcgccgcgaaccgctgggcacctacgactcgatcctggcgttgcacctggcgcagatgatgcgggccgcgggcgggcagagcgtgctcatcagccgcgaggagatgcacgggttgttctccggtgtgctcaacgacaccgaccgcgacgcggtcacgttcaccgcgcgcatcgacggcgcgatcgcgcggctggccgggctggagatcctgcgccgcagccgcgacgacgaggacagctacaccatcagcccggtgatcaacgccgtcatgacggcctcggtgatcaccgaactgcagcagcagttcgaacagctgctgggcggcggcacgccggccgaggaggtccacgttgactga

SEQ ID NO: 41746 - DNA, 3363 bp, Mycobacterium sp. MCS
ttgactgaacagtttcacctgtcgcggctgcaggtcatcaactggggcgtgttcgacggctaccactcgatcccgttcagcgccggcggcgccctgatcgccggcgcctccggcagcggcaaatcgtctctgctggatgcgatctcgctcggcttcctgccgttcaaccgccgcaacttcaacgcctccggtgacaacaccgcggccgggtcgagcgcgggacggcgcaccgtggacaagtacgtgcgcggcgcgtggggccagcgcagcgacggcggtaccagccgggtgatgtacctgcgcggcgacggcaccgcctggtcggcggtcgcggtcacctacgccggcgactccgggcgcaccgtgaccggtctggtgctcaagtggctgaccggcgagtcccggtcggattcgtcgagccggttcgtactcagcgacggcgacctcgacatcgaggacgtctgcaaccgttgggcggcgggacgtttcgacaccggtgtgttcaaagcagacggctggcggttcaccacgaaggtcgagtcgcagtacctggcgcagctgtacgcgacgatcggtatccgcgcctccgacgccgcccagcagctgctcggcaaggcgaagtcattgaaaagcgtcggcgggctggaacagttcgtccgcgagttcatgctcgacgaacccgacagcctggcgcggctgcccgaggcgctcaagcagatcgacccgctggtggaggcccgcgaactgctggcggtcgcgcagcgcaaacgcaagatcctcggcgacatcgagaagatccagcagcgctacgcctcggagtcctcggatctgggcatcatcgacctggtcgacctgccgatggtgcgggcctacaccgaccacgtccggctggcgcagtgcccgacgcagatcgcccagctcgacaccacgatcgaccagctcgacaacgagtacgaggacgtcacccgttcgctgaatctggccaaggccgaggcggattcgctcaacgcgcagatcagcgggaacagcgccagcatcggaccgctgcagtcgcaggtgaccgccgccgagaccgaggccgagcaggtgtcacgccggcgcagcgcctacgaggacatggtgaccgcacagggcctcgacgtcccggacaccgccgacgagttctggaacctgcgcgaggagttgctcaccgaggccaccgaactgctcgccaaggtcgagcgcaaccgcgaggcgtccaccgacgcggagtacgcgcagaaggcggcgcgcatcgcccgcgacgatgcggccaaggaactcaagcgcgtcgagcacgtggggtcggcgctgccggagttcgcgctgctgatgcgcgaccagatctgcgcggcgatcggtgtcgacgcgggtgagttgccgtacgtcgccgagctgatggacctgcggccgaatcagacgcgctggcggatcgcggtcgagaaggtgctgcgcggggcggggctgcggctgctggtgcccgaccagcactggaccaaggtcctgaagttcgtcaacgagacgaacatgcgcggccggctcgcgctgcaccacgtgcgggccagagtctacggcgccgaaccggtggaacccgaaccgaacacgttggcgggcaagctgttcgccgtcgacccgagccatccgtgcgcggccgaggccgtcgatgtcgtcacgggcgccggtgaccacgtctgcgtcgacacccccgaggtgttcgcgcggttccgccgggcggtcaccgacaccggcctgtacaaggactccgaccggttggcgatcaaggacgaccgccgcccgctgaagcagtccgagtacctgtaccagggtgacgtgtcggcgaagatcaacgccttgaccgtcgacctggccgccgccgaggaggcctaccagaaggcccgccgggtcgccgacgagatcgccgcgcagcgtcagcagtggcgcgaccgggcggcggcgtgcaaggcgatctgcgagcagttcccgcagtggagccagatcgacgtcgagaccgccgacggtcacgccgaccggctgcgcgaacagtacgagctgttgctcgccgaccatcccgacatcgaggcgctcaacgcgcgcgccgacgaatgctggtcgcaaattcaggtgttgatgacgcggcggggtgcgatccagacccgtcgcgacgatctggactcccgtcgcacccaactgttggagctgcaggaacgtctgcagcctgcgttcgtgtcggagccgttgaccgagctgctgcaccgctacgccggacaggtgccggtgacgctcgagctgctcggcccggaaccgcaccgcgatgcgctgttcgccgcgatcaagaaggagcgcgagcagctgcgcgagagccggcgtcgctcgtatgacgaactggcccgcatcctcaacacgttcgacaccgcgttcccggacgcaatcccgaacgacagcaccaacttcgacgagcgggtgcacgactacgtggcgctgtgccggcacatcgacgaacgtgagttgcccgaggcctacgagcggatgatgcggttggtgaccgagcaggcgccggatgcgatcctgacgctgcaccgggtcgccgagcaggaggcgcggcgcatcgccgagcagatcgaacgggtcaacaccggcctgggtgcggtggagttcaaccgcggcacccgattgacgctgcgggccacaccgcgccagttgacggcggtgtcggagctgacggagatcgtgcggtcgatctcgcggcgcatcgccgaggtcggcctgggcgacaagcaggcgatcctcgaccagtacgccgacatcctccggttgcgcaaccggttggcgtcgacggcgccggaggacaaggcttggacgcgcgatgcgctcgatgtgcgcaacaggttcaccttcgactgcgcggaatgggatgtggccaccgaggagttgatccgcacgcattccaacgccggcgacaactccggaggcgagcaggagaagctgatggcgttctgcctggcgggcgcgctgagcttcaacctggccagccccgacagtacggacaacaggccggttttcgcgcagctgatgctcgacgaggcgttctccaaatccgatccgcagttcgcccaacaggcgctgtcggcgttccgcaagttcggcttccagctggtgatcgtggcgacagtgcagaacgcgacgacgattcagccctacatcgacagcgtggtcatggtgtcgaagacggaggcgacgggccgcaacgcccgccccgtggccacggtggcgacgcggacgatctcggagttcggcgagctgcgccgggagatgcgggcgaacgcgaaggtccccgccggggtctga

SEQ ID NO: 41747 - DNA, 1530 bp, Rhodococcus jostii RHA1
atgtcggtcattgctcgctatcacgatgtttccggcgcgtttgatcgcgacacgctgcggttgctacatcagaagtacgcgccggtgatcgtggcggtgctgggcgaggtgttctccgaagacgaccagcgcgtggtggccgaagacgacctgcacgatcacgtggacttcctgctggagcagatcggcgacgccgttcccgggactgaactgccgcaacagcggggtcgcgccttggcctattcgtgggtggagggcgcagcgcgagggtggctgcgatacaaggacgggtcgacgccgagtggacccaccacgtatgagatcaccaacgaggcgctcgacgcgttgcggtacgtgcgcgagaccggtcgtcacgcgatggtgtccgagtctcgagtcaaggacctcatcacaaaggtgcaggacaccgcgctaatgatcagcgaagatcgggagcggcggatcggcattttgagcacccagatcgagaagctgacggaggaacgtgaccgtctgctctccggtggtgatttggagttcgccgggacgggtgaggtcatcgaggtcttggaccagatactctccgaagtcaacaacttgccgtctgacattcgtaaggtcggcgagctgttcgcggatatgcgtgaacagttgcgccaggagttccgtgacgacgaccgttccaccggtgaagtgttggatttgtaccggcagcgcatggatgcgttgctcaataatgacgaccgtgggcgggcgttcgtgggcgcggtcgagttgctgcagaagaccggcatgatgcgggcgttcgcgacggacatggacatcgtgctggcgcacgaagccgcgcaggggttgaagccggaggagcgacgacggctcaagcggacctcgagggagttgagccgggaggtgcagcaggtgatggtctcgcatcggcacatcgtgcagaccatctactcgtatttgagtgccccggatcgtatccaagcaacagagctgcggactctgttgcgggagttggatcgtcggctttcggagcgaaaggccgtggcgaaggtgcgcagtcgggttccgatcgctttcgtacccgccacgatcgagctcgatcgattgcgcacaaaccttgctgatcctgccgatttcgccgcgcccccggcggcccgtccacatctggccatccccatgtcggccgaagaacagcgcgagctgctgcgcatgggtgggccggacgtggacaagatgcgaggcatcctgatcacccggttgaaggcgtccccacgcgccaccgtcgccgaggtcttcaatgccttgccccgagaggaccggaggctggtggacctgttcgccttgttcgaggcgtcggcggacacgatggccctccgtcgctcccacacagtcggattgaccgacaggtatctcaccgtacatccgttggggatcgaggagcgtgtcttcgaagcgccccggctgacctacaccgatgaagaccgcagcgtattgatcgccaacatggaacgagcacagcaatga

SEQ ID NO: 41748 - DNA, 789 bp, Rhodococcus jostii RHA1
atgagtaccgatcctttggacgagtgggatgacctgctgtcgcaggtcgtcgacgactgtgagcccgccgagtccgacgacgaaccggacgagtttcggttccggccgtcggacaccatcttgttcaccggcgatcagggcacgttgacctatgaggcccggtcggtgctgacggctattctcaaacgtaattacctgtcggcggaccagcatccgaagctgtgggcgttgctgctcaaacaccgttatgacgtcgaatcgcggctcaacgacctgttcctgatgttggtgtgcgacaccgacgccgggatcgcttacaaggtccaggtccccggcgcccggttccccacgctgatgtcgacacagaaccgtgcctacacctggaccgagacgatcctgcttcggcatctgcgggaaacctatgccaacgaactgggccgggacggtaacgcgaacgtggtcatctccaggacggagatggtagagcggctgcaggcagacaagtcgatccagcgcaacgacgagaagaagcaacgcgagaatgcggagaaggcattcgaacgcatcgagagcgcgggcattctcgtctcgacgcgcgacaccggcgcggaccgctaccgcatctccccggtgatcgtgccactgatatcgctggacaaactgaaggcgctcagcgcttacctcgacaccctggacgccgacgacacggtggagcccacggacaccgacggagagatcgccgcggtcgacctgggccccggcgaagggtcagacgatgacctcgactga

SEQ ID NO: 41749 - DNA, 3432 bp, Rhodococcus jostii RHA1
atgacctcgactgagacgggcacgttgttccccgacaccggcagcccgcagtggcggatcgaatccatgcatctgctcaattggggcggttacgacggctaccaccgcatcgacttctcacctggatcgaccatgatctccgggccgtccggggtcgggaaatcgaccctgatggacgcttacaccgcgctgatgatgcccagcaacgttccgttcaacggtgcctccaacgccggccagggacgtgctcggggcggcaaccagcgcaatgtggtctcctacgtgcgcggtaagaccgacagtgtgcaaaactccagcggcgaactcaccgaccgccggcttcggggaatcgatgcccggggcctgccctgcaacgccgcggcagttgtggcggtcaccttccgccacgacaccggcgcatacttcaccgccgccaggctcttcttcgttcgagcatcgatcagttccgacggcgagttgggaaacccgttgcgcctcaccattgacgggaccgtcgacgtcgagcgactctacgacctgttcgtcgagggtctcgggcagcagggctaccagcggaagctggaagccactttcgttgggtcgaaggtgcacgacacctacaccaagttcctcaccgtcgcccagagcaccctcagcatcggtaggaagggcgagggcgataaggcgctggccctcttggcccgcatccaggccgggcagcaagaagccacgattgatgacctatacaagaagctggtcttcgagcagccctccacgtttgatacggccaagcaggcactcgatcacttctcggagctgtccaacagttacgagacgatgcagcgcgcgtacgaccaggtagaggtgctctccgacattcaggagcgccacgaccggtaccagcgcgcgatggccaacgcctccgacatcgttgctctgcggcacaaggattcgggggacactccgtgggtgctgtggcagagcagcgtcggtgacgccgagtacggggccgccctgaacgcggccgaacaggacctcgaggaggccgaagacgcctgccgacggaccgcaacagcatttgacgcggcagaccgtaaggtcgacgagctgaagaacgcaatccgcaccgagggcggggaacgtctcgaccacatcacagcggaactcaagggctggagcgagacactcgagcagcgggcgcgcaaggaagcccagttccatgcccgcatcgcccatctcgacgacgtcgtagctccggccaacgcgagagagatgtcatcgctacagctccgagcgcgcgctttcatggacggacacacagaacaactggaggctgtcaccgcggcagctcgcgaggccgacgcccgtcacgccgacgcacagcgcgcacacaaatccgtgtccgacgaattggacgatctccgtacccgtccggactcgaaaattcccgcctacctccaccaacggcgcaccgagttggccgagttgtgcggtatcaccgatccgcgccgcgatcttccgttcatcggagaactgatcgatctgcacgccgacgacgaacgctggcgcaccgctgccgaagccgagatgggcggcatcggccgccacatcctctacaacgagaacatccgggcacagttcgtccggaacgccgaccgcctctccaagggcgtgcggttacggtcagaagcggtccccttcaacgcgtccgccccgacatcgatccccgatccctccaccctcgcggggaaggtccagtacaagcccggccccttcatcggttggctcgaaggattcatcaacaccacgttcacccatgaatgcgtcgacactgccgacgcgctgctcatcgacgacgggcgcaaacgtatcaccgcccacgggcagacccggcaaggacggtccggtgcccacggtgcgccgctacccaaggactacgtcctcggattcagcaacgccgaacgcatcgccgaactggaaacggaggtcgaacgcctcaccgacgaggtacacgcagcccaccaacgggcggaacagctgcacagtcagcgctcgacgatggtcgagcaccgcgtcacatgggaagcggtgctcgatttgaactggaccgagatcgacaccggatccgcccgcgccgccatcgacgcgttggagcaggaacgcgacgcaatcctggctgccagcgacagaatcgccgaattgaaacgacagcagaaacaggcagaggaggaccgcgacaccgccagcgaggccaaagccgtggcacgcacccagcgcaaggacctcaatgcctccatcgccgccctcgagccgctggccgaacgctacgccagcacccacgccgcactggtgatcacgggttcggtcaccgtgaccgacgcgcagcaaagtctgctcgacaaaatgctgggactgtcctacaccggcgacgcccacaccctgcaggaagcgttcgggaaggtctttgacagcatcaccgacaggttggccgacgccactgacgaaacctttaatgcacgacgagcactggaggacatgttcaaacggttcaaagcggaatgggacaactacgagtggggcaccgacatcgcgtcctacccgaactactacaaccactaccgccgactcgtcgactccgacgtcatccgtcatcgagacgacttcctcggggaggtcaacaagtggaccggaatggagttggggttgctcagtagcgagttcgagaccgagaggcggcgcatcatcgaccggctgcacgacgtgaacgcgatcttggaaagaatcccgttcggccgcgacggcgaccgcctccgcatcgaccccgccgaacgcgaaaccccgacgtcgcgccacttctggtccagcctgcagcaattcatcgaaacatccagcagcgcaacacccatgacactcgacgtggccaaggcgcgttatcacaccattacccagttcatccggcagatcatgcctgccgaccaactacctcgcggcgagtcctcccagcgagaggaaatcctcgatgtgcgccgccacatcagcatcaaggcccagaaagtcgaccccgccgaccccggcaacatcaagggcacctacgccgaattcgacgccaagtccggtggcgagatgcaggagatggtggcgttcatcgtcggtgcggcgctgcgataccagctcggagacgaacagaactcccgcccgaccttcgccccgatcatcctcgacgaggcattcatcaaggccgactcccagttcgcctctcgggccgtgcaggcctggatcaccctggggttccagctcattgccggatcggttgtcgacaaggtctccgcgatctcccgcaaggtcgatcgggtcatcctcatcaacaaggacacggaaggctactccacggcatcagcattcatcgcagacgcaccggtgccgacatcatga

SEQ ID NO: 41750 - DNA, 1173 bp, Rhodococcus jostii RHA1
atgaaagaccctgccgccgtcatcaccgacctcaccaaggcgctcaccaagcactgggcggcctgggttgtcgacgagccaacaggatggccacgcacctacccgatcggcacacccgcccgcggcgacctcgagaccaactacgccaccacccaccggccggtcatgcaggcctgggaccggtggggtgctcagcacgtccacctctcgtgcagtctccgctacgcgcgccgccgtgtgggccggcttctcctgaacatccccacacatctcgacatctacgacctcgacacggccgccgctctcgccgccgaagactggtccatcacgatcgcccgcgcccgccatcgccgccaaatcctgtccgacaccctcgacttggacctacagccacgccttcttcaacagacagttgccctcgccgacaccgacttcacgctgctctgtcgcaccgtcgactggttccaccaccacgacgcgaccggcctcaccacccggcaggtcccgatccccggtctagacgcaaagtggctcgacaagcacaccgcgctggtcctggccctcctggaccgggacagcctcgacctgatcgaccggccccagcgcatcgacctgacctatttggaccagaactggcgtgctcgcggaaaccggatgcgcgacagcctcgccaccgacgacaccaacgccaccgtcgcctacccacccgacatcatcatcatcaccgaaaacaaggacagcgcactgttcttccctaccctcccgcgagggatcgccgtcgagggcggcggatgggcgatcacccaccgcatcacccgccacacctggttccagcaatgcccacggatcgtctactggggagacatcgacgcccacggctacgaaatcctcaacaaactccgcaccgaacacagcgcggtcgattcgatactcatgggcccacaaacgtacgacgaataccaccaattcggtgtgcgcactgatcggcgcggaaacccgatctccgctcagcgtaagccacttccgaatctcaccgattcggaaagagttgtctacaaccgcatcaccgactcagaacattccgggccgctacgaatcgagcaagaacgcattccactccaacttgcagagcaagtcgtccgatcccgcacgcctcgccaaccccctgactag

SEQ ID NO: 41751 - DNA, 1617 bp, Pseudomonas aeruginosa UCBPP-PA14
atggcgcaggctattccggcgattgaacaggcccatccgccaggacaaatacgtatcatgaggccacgactgacttcggtagtctcgtgctgggactacctttggaaagtggccgccatggaagaaagcgcacaacaacgctcggaacgttatgtctccgcccgcagccaacaccctgcctggcttttgctcgcatcacgccgagcgccgcttgtgttgggttgcctgcgaacgctgttcgagcgggcgcatgatgggatccccatggaggatgcgctgcaagcgctgtccgaaatgctggctgcttatgccagccaggagctctacgagatcgacccggatgcaacgcatctccaagcaggtcgtgaacttcgtgaatggatcaagcggcgcctcgtcgtagaacgagaggggcgtatctacgcaaccgacgcgctggagtccgccatccagttcgtcgactcgctggatagtcggatcatgacctccacggcatctcgcctttcggtggtccagcgcgagattgaaaacctggaaacgggtctgaaccccagcccaactggccgtattgccagcctgcgccgcagaatccaggatttggagcacgagctggcgcgggtagaggccggccatgtcgacgtgctggatgaagcgcaggcgatagagggcatgcgcgaggtatataacctggccaccagcctgcgcgcagactttcgacgagttgaagactcttggcgcgaggcggatcgcgcccttcgacactccatcatcagtgagcagtctcaccgtggagaaatcgtcgatcgattgctggatggtcaagatgctctactcaacacaccggaagggcgtgtgtttgaaagcttccagcagcaactgaggcagtccgctgagctggaggtcatgcgtgagcgcttgcgcaccatccttcgtcatcctgcggttccaaaggcgctgaatcgtccccagcaacgtgagctacgttggctggcgttacgcctagttcgtgagtcgcaggctgtgctccaggcgcgcgcccgaagcgagcgcgatgtccgcggcttcatgaaaacggggctggccgccgagcatcatcgcgtcggacagttactcaacgacttcttcaatctagcgctcagcgtcgactggcaacgtcagtcagagcgccgtaagcctgcctgtttaccaccggttggcgtagccattaccggtgtcccggcaatcgagcgtctccgcttcaagactctggatgacgatgatgcgggcgagctggatctgagtttgaagcctgcggggttggagcagattgatgatgacttctgggatgccttcgacgggctggatcgtgaagcgctgattcatgacaccctggctgtgctggtggagcaggggcgccctgtgagtctcggggagcttgcgtctttgcttccacctgctcacgacctggaaacctttgcgctctggttggcgatggcgcgtgaggcaggtatcgaggtgctgacagaggagcgtcagttcgtggagctagttgacgaggatgagcaacgctggggcttcaatctgccttatgtcggactcgaccacgaggcactcaaggacatcgattgggagttgtga

SEQ ID NO: 41752 - DNA, 750 bp, Pseudomonas aeruginosa UCBPP-PA14
atggcagggatcttcgatcgaattgcaggcgcttctggcgccgacgaaacggagctgacggcggagcccatggcgttggatgacggcatggatggtgagcaacctgccatgagcgccaatatacaggtcgatgagcgacggactccgcaacgggtacgtgaggccgtacaggaaatgctcaagtacgggctgctggaagaaagccacaaacccaacctatatcgctcagcgctcaccaatatcgaggtggtggacagaatcctggagccgctcgaccttgccatgggggtcgacgaggttcgggggctggtgtttgttaccgttcgccagggcgaggtggctgagcaggatgactggtcgcaccccctcgtgcgtcggcaaagactgaatctggagcagtccctgctgatagccattctgcgacagcatttcatcgcgtacgaacaggaaagcggtacgggcgctagtcaggcgctggtggcggttgatgagctgattccccaattgcaggtttacctgggcgaactgggcagtgaggcgaaggagcgcaatcgcatcatcacgctgctggatcagctcaaggggcatggtttggtgtcggctctggacgcacatgatcgtgtcatcatccgtcccatcattacccacttggctaacccggagaacctgcaggcactcgtagtatggctgcgagagcaggtggagggtgcggttacgccggctgccggtggtgaggaggacgaggcgtga

SEQ ID NO: 41753 - DNA, 3138 bp, Pseudomonas aeruginosa UCBPP-PA14
atgaccttgctgtgcgccaatccgcgctacaacctggcatccacgggcgggcatgaaagcgaccgcgatctggtgtcctatgtgcgcggcgtcaccggccccggggacggaggtgtagagcaatctcatatcgcgcgccagggtaagactgtcaccgccattgccgccacgctcgagcgtgacggtgcgcaggttcgactgggcgctgtgctctggttcgagggcaccagctcctcggcgtccgatctgaaaaaactttggctgttaagcgagtcccccgagcagacgctggagcactggctcagccagcatcacgcaggcggcatgcgggctctgcgtcagatggagaaggatgggatggggatctggccgtatcccagcaagaaagccttcctggccaggctgagggattacttcgaggtcggtgaaaacgctttcaccttgctcaaccgcgctgccggcctgaagcagctcaacagtattgatgagatctttcgagagctggtactggatgaccgctccgccttcgagcgggctgccgaggtcgccagcagcttcgatgatctaactgacatccaccgagaactggaaaccgctagaaagcagcagcgctcgttgcaacctgtcgccgatggctgggaacgttatagggccttgcaagaacagttgcaggataaacaagcgctcgaaggcatcctcccggtctggttcgccgagcaggggtatcgtctgtggttggctgaaaccaacaggcttgagaaggagcacaaacaggccgaactggatcaggcgcaatgcaggagtcagcttgagatccagaagggcgtggtcgatcaacatcgtcagcgctacctgcgagtagggggcgcagggatagatcaattacgcgggcgcattgctgattgggtcagggagtgcgataagcggcgcctgaaagccgagcaataccaacgcttggccaaggggcttggactcgcggatgagttatcggccgctgcgctcgaagaaaatcagcagcagatcgcggcacgcctggaaatactggcccagcaaactacagacgcgcgccagaaggcgttcgatgcaggtctcgtccagcaggaactcaatggccgcctgcagagcttacagcaggagcgtgctgaggttgagagacggccaggctcgaacctgcccgggcattttcatgcttttcgaggtgatctggcgcaggagcttggcgtcgatgagtcggccctgcctttcgttgccgagctggtgcaggtcaagcccgaggagctggcctggcggggtgccatcgagcgggcaatcggtagccaccggctccggatcttggtgccgcagggctcatcccaggccgcactgcgttgggtgaaccaacggcacaaccgcttgcatgtgcgcttgttggaggtaaaagagccgtcgtcgcgccccgttttcttcgacgatggctttacccgcaagctgaccttcaaggagcatccgtaccgagaagccgtaaaggcactactggcggacaatgaccgccactgcgtcgaaagcacggagcaattgcgtcatacccctcacgccatgacggcccaagggctgatgtcgggtaaagaacgcttcttcgacaagcaggaccagaagcgcctggatgaagactggctgaccggcttcgataaccgcgaccgtctggccttcttggctgagcagattcgcgaggtcaatgaacagctcgtgcccgccaagctggccctggatgctgcccagggcgatgtcggtcaattggagagtcaagcttcgctgctgcaacgcatcgaagagctgcagttcgacgatattgatcggccgggcgccgagcgtcagctgcagtcgctgcgtactcagctggacaccctgacgcgtcccgattctaaccttgccgtgatcaaagccgagctggatcaagccgaggccctgcgggagtctctggaccaacagctgcaacgactgattgagcagtgtgtgcagttgaaaactcaatttgaccaagccgcatctgctacccgtaaggcctatcgcggcgccgaaaaggggctgagcgatacacagcgtgaactggcgcaagcgcatttcccgatcctgagcacggatgacctcggcgatattgacgagctggaacgcaagcatacgcgtgagcttcaagggcaactcaaaacgctcggcgagaaactgggcgaccagaaaacagagcttgccaaacgtatgtccgacgccctgaaagcagacaccggggcgcttgcagaggtcgggcgagaactggtggatgtacccaggtatctggagcgtctccgtgtgctgaccgaggaagccctgcccgagaaactcaagcgcttcctggaatacctcaatcgctcctcggatgacggtgtcacccagctgctcagctatatcgaccatgaggtctcgatgatcgaggagcgcctggatgacctgaacagtacgatgcagcgtgtcgactttcagcccggacgctatctgcgcctggtggcgaaaaaggtcattcatgaaagcctgcgcaccttgcaacacgctcagcgccaactgaactcggcgcgcttcatcgatgatgaaggcgagagccattacaaggcattgcaggcgctcgttggcctgctcaaggatgcctgcgaacacagcaggaatcagggggccaaggcactgctggatccgcgcttccgcctggagttcgcggtatcggtgatcgatcgggaaggcaataatctcatcgaaacccggacaggttctcagggcggtagcggtggcgagaaggagatcatcgcctcctatgtactgaccgcttccctgagctatgcgctctgtcccgatggcagcagccggccgttgttcggcaccatcgtgctcgacgaggcgttctcgcgcagctcccatgcggtggccggtcggatcatcgcagcgctgagggagttcggcctgcacgctgtcttcatcacccccaacaaggaaatgcgcctgttgcgccaccatacgcgttcggcagtcgtcgttcatcggcgcggcgtggaatccagtctggtttccctgagctgggaagcgttggatgagcatcatcaacagcgcatcagggccatgcatgaagtcgcccactga

SEQ ID NO: 41754 - DNA, 1146 bp, Pseudomonas aeruginosa UCBPP-PA14
atgaagtcgcccactgacatcggccgtaacctggccaggcaatggcagcgctccagcgtgcgcttggagcgcttgctcaatcccggtagctggccgcaaagcctcaacatcggtaagccttcggcacgtctattcactgacaacatccaggcggtgctccggcatgtggagaactggcggagcgtgaacgtgggtaaggtcgactgggaacctgtcagctaccgagcaggtctggcccccatttccttgccgatgcgttggcatttgcgtagcccctccgaatggattgccgcgagcgatgatccaagggtcagccaggaatacgctcaactcgagtatttggtcgagcaggtagacagtgcctttcatacgctgctggtggcacaacggagcttatggttgacgaggacgcctgaagaagtcgtcgccacggcgcaactcgctactcaattagctccgggctgcgctcaaggccgcccattgcgtctgcttgcagagcacggagtggacaccaagttttttgagcgaaacgctaccttactgacgaagctcctcgatgagcgcttcgaaggtgccgcgtcggagcaaggcctgacgacctttctggatgcctttgaagaaagcagtcattgggttctagtcgttcctcttcagcctgggctgctgcccttcaagcggctcaggctgacaacttcggaactggccgaaaccccacttcctggttcgcgattgctcgtagtggaaaatgagcaatgtgttcacctgctacccgaaacgttgccggacaccttagcggtgctgggggcaggactcgatttgcattggttggcgtctgcgcatctggccgggaaacagatcggttactggggcgacatggatacctggggcttgctgatgctggcgcgagcgagactccatcaacctgcagtcgaagcactcctaatggagcaggagctgtttgaacagcactcacaggggaatacagtcgtcgagccggctaaagctctggaatcggctccccctggtttgctggctgacgaggctgatttctatcggtatctgttggtgcaagagcgggggcgtcttgagcaggagtatcttccaaaggctcaggtggagttggccataagaaagtgggccagatga

SEQ ID NO: 41755 - DNA, 1437 bp, Alkalilimnicola ehrlichii MLHE-1
atggatcacgatcacctatacagcctgcggcgcacccatccggggtggcgcctgttgcaggccggtaacgcgccgatggtcgtggcctttctgcaccgctgtttcgtggtgcccaacgtgcgggcgctgccggcctcggagctggagaatgcgctggaggactacctctaccacctgcgcgcccggttgggtgacgaggcctaccagcagggcgctcacgagtacctggcatattgggctgccgatgagcgcggttggttgcgcaagtactacccgcagcacagcgacgaaccccactacgacctcaccccggccaccgagcaggcgatccagtggctggcgggcctggagcaggcccactttatcggtgcggagtcgcggctcaccctggtgtttgatctgctgaaacagatcgtggagggggcggagaccgacccggaggcccgcctgcgcgatctggaggcgcggcgcgacgccatcgagcgcgagatcgacgaggtgcgggccgggcacctgaacctgatggaccccacccgcctgcgcgagcgttttctgcagatggccgacacggcccgcgggctgctgggggacttccgccaggtggaggccaacttccgcgcgctggaccgccaggtgcgcgagcaggtggccacctgggagggcggcaagggcgatatcctcgaccaggtcttcggcgagcacgaccgcatcgccgattccgaccagggccgcagcttccgcgccttctgggatctgctcatgtccccggctcgccaggaggagttgaccgaactgctcgagcgcaccctggcgctcgagcccgtgaccgaggtggcgcccgacccgaccctggcccgcatccattacgactggctggcggcgggcgagcacacccagcgggtggtggcgcggctctccgagcagttgcgccgctatctggacgatcaggcctggctggagaaccgccgcatcatggggctgatccgcgagttggagcagcaggccctgcacctgcgggaagccccgccccgggatttcaccatggccctggacgaacccgcgccccgggtggagctgcccatggagcgcccgctcttcagtccgccggttacgccgcgcatcgagcagcaggtgctggaggcgggcgaggcggagggcgacgtggcggcgctgttcgaccaggcctacgtggaccgcacccggctgcaagggcaggtgcgccgggcgctgcagacccgcgagcagatcagcctggcggccctgttggagcaacacccgctggagcagggcctggccgaactggtggtctacctggccctggccacagaggatcaccgcagcgtgatcgatgaaacccgccagcagaccgtatactggcgcgaccgtgacggcgttgcccgcagcgccacgctaccgcaggttatcttctgccgttga

SEQ ID NO: 41756 - DNA, 600 bp, Alkalilimnicola ehrlichii MLHE-1
atgagcgaacaggacgccgacttctcggccatgctgatcaccctgttcaagggtgtgctgtacaaggaccagaaccctcgctactggcaggtgcttgaggaccaccaggcgcgggtgcgcgaccacgtggccgtgctcgggctggagctgatgctggacgaggccgagggccacgcctgcctgcgccagcggacccccgccgaggacgagccggagctgccccggctggtgccgcgccgccagctcacctacccggtaagcctgctgctggcgctgctgcgcaagaagctggtggagcacgatgccggcggcggcgacccgcggctgatcctctcgcgggagcagatcgtggagctgatccgtgtcttcctgccggccagcgccaacgaggcgaagttggtggaccgggtgcacgcggacatcaacaaggtggtggagctgggtttcctgcgccggctgcgcgggcaggataatcagtacgaggtgcgccggatcatcaaggcctatatcgacgcccagtggctggcggagttcgaccagcgcctggccgagtaccgcgagcacgccgaggccaccactaccgccggcgacgggcagtga

SEQ ID NO: 41757 - DNA, 3378 bp, Alkalilimnicola ehrlichii MLHE-1
atggaaacccagggactggatttcgccggctccgaccagcgcaccggttttcgcctccagcggctggaggtgttcaactggggcaccttccacgaccgcgtctggtcgctgcagcccggcggcgacaacagcctgctgaccggggacatcggctccggcaagtccaccttggtggacgccatcaccacgctgctggtgccggctcagcggatcacctacaacaaggccgccggcgcggaggccaaggagcgcagcctgcgctcttacgtcctcggctactacaagtcggagcgtagcgacgccggcttggccagcaagccggtgggcctgcgcgaccataacaactactcggtcatcctcggccacttccacaacgagggcttcggccacgatgtgaccctggcccaggtcttctggatgaaggacacccagggccagccggcgcggtttttcgtggtcgccgaccgcccgctgaacatcgccgagcacttcgccaatttcggcaccgacctggccaacctgcgcaagcgcctgcgcgggctgccccacgtggagttgtacgacacctttccgccctacggcggtgccttccggcggcgcttcggcatcgacaatgagcaggccctggagctctttaaccagacggtctccatgaagtcggtgggtaacctgaccgagttcgtgcgcagtcacatgctggaggccttccccgtcgaggagcggatcgaggcgctgatccgccatttcgacgacctcaaccgggcccacgaggcggtgttgaaggccaagtcgcaggtggcgcagttgattcccctggtgcgcgatgccgacgagcacgaccaacgggccacccgggcccgggagctgcgcgattgccgccaggcgttgcggccctggttcgcctcgctgaaggccgagctgctggaccgccggttggacaacctgggccaggagcacgagcggctgcagcagcgcattgaggggctgagcactcggctcaccgagcagcgggcccggcgcgacgagctcaagcaggcgatcgccgagaacggcggcgaccgcctggagcggatcaaggcggagctggagcgcaagcggcgggagaaggcggagcgcagcgagaaggccgagcgctaccggcggctggcgcaccggctggagctgcccgatgccaccagcgacgaggtctttcacgccaaccgcgaggcgctcaccgtggcccgcgaggccaccgagaccgcccgcagcgagctgcagaaccggattacggaggccagcgtggagctgcaccagctcaaggggcggcacgaggacctggatgccgagctggcatcgctgcgcggtcgacgctccaacatcccggcggagatcctcgccatccgcaccgccctgtgccgcgcgctggaggtgcccgccgaggacctgcccttcgccggtgaactgctgcaggtgcgtgacgacgagcgcgactgggagggcgccatcgaacgggtgctgcacaacttcggcctgtcgctgctggtgcccgacagccactacgcccgcgtcgccgagtgggtggaccgcacccggttgcgggggcggttggtctactaccgcgtgcgcgaagcccgcgacgcgccgccgccgtcgctgcacgccgactcgctggtgcgcaagctggccatccggccggagtcggcgttttatacctggctggagcaggcgctggcgcagcgcttcgattacgcttgctgcaccgatctgcagcaattccgtcgtgagaagcgggcgatcacccgtgccgggcagataaaggccggcggtggccgccacgagaaggacgaccgccaccgtatcgatgaccgcacccgttatgtgctgggctggagcaacgaggcgaagatcgccgcgctggaggccgaggccgacgggctggccgagcgcatgcaggccatcgccaagcgcatcggtggctgggaggacgaacggcgggcccaggaggcccgccgcgacaccatccaggagctgaccctgttccaggattttcaggccctggactggcgtccgctggctgccgacattgaggcgctggagcgcgagtaccgggagctggccgagggctcggacgtgctccgggcgctggagcggcaactggatgagctggaaaagaccatcaagggcgtcgagggcgaggtccgccaggcggatcgcgagatcagcgccaacgagctgaaacaggagcaggcccgggcccagtggcaggattgccacacgctgttggagtcgacaccggaagaggcgcagcagacctactttccgcgcctggccgccatgcgcgacgaggccctgggtgagcacaccctgacggtggagtcctgcgacaaccgcgagaaggacatgcgcgaatggctgcagggcaagatcgacgcggaggacaagcgcctggcgcagttgcgcgaccgcatcatcgacgccatgcgccgctaccaggacgcctggccgctggacagccaggaggtggatgtgagcgtcgaggccgccggcgactatcgcgccatgctcgagcagttgcaggcagatgatctgccccgcttcgaggcccgcttcaaggagctgctcaacgaaaacaccatccgcgaggtggccgccttccagagccggctgcatcgggagcgccaggcgatcctggagcgcatcggcaccatcaaccgctcgctgcgtgagatcgactacaacgacaaccgttacatcaccctgatggcggaaagcgccccggacgcggagatccgcgactttcagcagagcctgcgcgcctgcaccgagggggcggtgaccggctcggacgacgatcagtactccgaggccaagttcctgcaggtgaaggccatcatcgagcgcttccgcggccgggagggaaccaccgacctggaccggcgctggacccgcaaggtcaccgatgtgcgcaactggttcgtcttctccgcctccgaacgctggcgcgaggacgacagcgagtacgagcactacgccgattccgggggcaagtccggggggcagaaggagaagctggcctataccgtgctggccgcgagcctggcctaccagttcgggctggagtggggcgagacccgctcgcgctcgttccgcttcgtggtcatcgacgaggccttcggccgcggctcggacgagtccgcccgttacggcctggagctgttccagcggttgaacctgcagttgctgatcgtcaccccgttgcagaagatccacatcatcgagcccttcgtggccagcgtggggtttgtgcacaacgtggaggggcgcgagtctatggtgcgcaatctcaccattgcggagtaccaggcggagaaggccgcccgccagcgtatcgcgccatga

SEQ ID NO: 41758 - DNA, 1188 bp, Alkalilimnicola ehrlichii MLHE-1
atgagttggacgacacccgacgagctgcgccagcagttgttgcgccaatgggagcgcggcgattggctggccgcctatgtgcgcggcgagtcgctctttccgctcacgctgcggctgcgccgccccacctcccgggatctggccgaggacttcgtcgccgtgcgccgttgggtgcagcagcttcaggccggcagccgcgatgagcgggggtacggctacgggatcgagtggcggcgggtgaaccaccgggtgcatggggccaatgacctgcccgccggggcgattgtcccgagcgaggcggacggcttgcgcctgatcggccgtgagcgggaggcggcccgctttcgggcgctggccggggagaccctgcgccgcttcccgtcgctggcagactggctggcccggcggccgctgcaggcgctggcggaggccggggcctggccgcgcattctggacgtgctggactggttccgcgcccacccccggcccggtatctatctgcggcaactggacatccccggggtggacaccaagttcatcgaggcccggcgccggctgttcaccgagttgttggacgcggtgctgcccgaggccgccatcgacccgtcggccaccggcgcccggggcttcgaacggcgtttcgggctgcgggagaagccggcgctggtgcgcttccggttgctggaccccgccctctacgtgcaggggctgagcgacctctcggtgcccccggaacagttcgccgacctgcgcctgccggtgcgccgggtcttcatcaccgagaacgagatcaatggcctggccttccccgaccacccgggcggcctggtgatcttcggtctgggctatgggctggagcggttggcgggggttggctggctgcgggaggtggcggtccactactggggcgatatcgacacccacggcttcgccatgctccaccgcctgcgcacccgcctgccccacgcccgatccctgctcatggaccgcgagacgttggagatgcaccgtgagatgtgggggcgggagccggctaacaagcggttcacagggcgcctttcgctactcaccgaggcggaacaggcgcttttccaggacctgcgggaagataccctgcaggattgcctgaggctggaacaggagcggatcggctttgggcatttggagcgtgcgttgcggcagatctga

SEQ ID NO: 41759 - DNA, 1533 bp, Candidatus Solibacter usitatus Ellin6076
gtggaggacctcacgcggcgcacgcgttcccgccctgccaacctcccctcgctgtaccatagaggcgtacccgtggactatcgcagcctcgagcaactcagaaaatccaaccccgcgtggcggctgctggtggcggatcacgcacccatgatcatcgccttcctccacaagaccttcatccagcccaacgtgcggaccatgccccagcaggagctcgcctcacgcctcgccgacttcctctacggcctccgcgaaaccctcggcgaagaagccttccccaaacgcgcggatcagtacctggacgattgggccggcgaccagcgcggctggcttcgcaaatactacccgcctggcgacgacgagccgcattacgacctcactcccgccaccgagcgcgccatcgattgggtcgccggcttccaccagcgcgaattcgtcggcgccgaatcgcgcctcatgaccgtgttcgcactcctccgcgaaatcgccgagggcaccgagctcgataccgccgtccgcatcgccgacctcgaacgccgcaagtccgccatcgacgccgaaatccagcgcatccgcgccggacaccttcccctgctcgacgccacccaggtcaaggaccggtttcagcagatggccttcaccgcacgcagcctgctctccgatttccgcgaggtggagcagaatttccgccagctcgatcgcgccatccgggagcgcatcgccctatgggaagggggcaagggtacgctcctcgaagaaatcttctcccagcgcgacgccatcgccagctccgatcagggcaagagcttccgcgccttctgggatttcctgatgtcgccggcgcgccaggaggaactctccgatctcctgcacgatgtcttcgcgctcaaggaagtacagcagctcgcgcccgatcgccggctcctccgcatccattacgattggctgcaagccggcgaagtcgcgcagcgcaccgtggcccgcctgtccgagcagcttcgccgctacctcgatgaccaggcgtggctggagaatcgccgcatcatgcaaatcctccgcggcgtcgaacaaagcgccctcgccgtccgccgcgcgccgccgcaggaacccttcatggagcttgacgagcctgcgccgcgcctcgatctggcgatggatcgtcctctctattccccgcccttcaaagcccgcttcgcccagaccgcggtttccgagggcgatcagaacgtggacgccgccgccctttacgatcaggtctacgtggacaaatcgcggctcaccggccagatccgctgggccctccagacccggccgcagatctcgctcgccgatcttgtagagcatttccccctgcagcacggcctcgccgaactggtagcctatttcagcctcgccgccgaagagcagggagcggtcatcgatgaccggcacaaacaggaactatcctgggaagatgccgcgggccaccggcgccgcgccaccctcccgctgatcgtcttcagccgtccggcggttcaggagcaccgtgtatga

SEQ ID NO: 41760 - DNA, 585 bp, Candidatus Solibacter usitatus Ellin6076
atgagtgctctttcccctgtgctgatcgcgctcatgaaaggcatcaccacgcgcgaagaagagcccgaaatctggcaggctctcctcgatctgcaggcccgggcgcgcgagtacgtcgcggtgctcggcctcgaattgatgttggatgaagtagaaggctacgcctacctgcgccagcgcgtcgcggccgaaggcgagccggaactgccccgactcgtggcgcgccgccagctcagctatcctgtgagcctcatgctcgcgctcctgcgcaagaagctcgccgagttcgacgcaggcagcggcgaggcgcgcctgatcttgagcgcggagcagatctccgacatgatgcgtctcttcctggccgagaccggcaacgaagcccgcctgatggatcgcatcgataccgatatccgcaagattgtcgaaatgggcttcctccgcaaactccgcggcaacgacgatcgctacgaagtccggcgcattctaaaatcgtacgtggacgcgcagtggttggcgcagttcgaacagcgcctctccgagtacaaacagcacattacaggcgaggtgcgcgatgaggcagtctga

SEQ ID NO: 41761 - DNA, 3381 bp, Candidatus Solibacter usitatus Ellin6076
atgaggcagtctgagagcctcttcaccgcgctcgacgccacgagcctcgcggcacagcgccccggcttccgactggtgcgtttcgaagtttacaactggggaacctttcatcaacacgtctggggcctcgatctcggcggcagcaacgcgctgctcaccggcgacatcggctcgggtaagtcgacgctggtggacgcgatcaccgcgctcatggtgccgcgcgccaacttcaacaaggccgccggagctgccagcggagagcgcaccaccgagacctatttctttggccgctacaaatccgagcgcggcgaagccggcctctcctccaagccggtctccctacgcggcgccgatagctactccgccatcctcggccgcttcgtcaacgaggctctgggccaggaggtcacgctcgctcaggtcttctgggccaaggcgccgcagggtgcgcctgcgcgcctcttcgtgatcgccgatcgcgcgctctccatcaccgatcacctctccggcttcggccaggacatcaacacgctgaagaagcgcctgcgcaagctgccgcaggtggaactcttcgacgccttcgcaccctacggctcggcctaccgccaccgcttcggcatcgagaacgaacaggcgatggatctcttccaccagaccatctccatgaagtcggtcggcaacctgaccgatttcgtgcgcgagcatatgctcgaagcctccgcggtggaagagcgtattcacgccctgatcggccactatcaggatctcgatcgcgcccacgagctggtcctaaaggccggagagcaggtcggctttctcaccccgatggtggccgattgcgacgagcgtgcccggctcgcggagaaggtcgagtccttgcgcgcctgccgcgaagcgctgcgcccctggtttgccgcgcgcaagcagtccctcctcgagaaacgcctcgccaaccttgccgcggagctcgccaaactcgaacacgccgtcctcacgtcccaggaaacccgcacccgccagttcgccgatcgcgattccatccgtcaggccatcgcaggccatggcggcgatcgcatcgagagcatcaagcgcgagatcgccggcaaacaacaacaaaaggacgagcgcttccgccgcgccgcgcagtacgatcagcgtgccaaagccctggaactgccgcccgccaccgccgccgaaatcttcgtggccaaccgcgaggaaatccgcgaagcgcgcgccgcctcagagcttgcgcaggccgaagctcagaacgcgctcaccgaagccacggtggaattgcgccagatgcaacaccagtatgacgagctcgaagccgagctcgaatcgctacgcagccgccgcagcaacctgccgcgccagatgctggaactgcgcgccgagatgtgccgcgccacaggggtgcgcgaagacgacgtgcccttcgccggtgagctattgcaggtccgcgccgaagatcgcgattgggaaggcgccatcgagcgcctcctgcacggcttcgcgcttgcactccttgtacgcgacgaccagtacgcccgcgtcgccgagtgggtggaccgtacccacctcggaggccgcctggtctactaccgcgtgatcaagcccaaagccgccgatcgcgccggcctttaccccacgtcgctggccaataaggttgccataaaaccggaatcgccattctatccgtggctggattcggagttgatcgcgcgcttcaactacgtgtgctgcgaaaccctcgagcagttccgccgcgagccgctggccgtcacccgcgccggccagagcaaaggccgcggcgagcgccacgagaaagacgatcgccacgccatcaacgaccgcactcgctacgtgctcggctggagcaaccagcccaagatcgacgccctggaacgcgaacaacaaagcctggccgcccgccgcgagcccttgctcactcgcattcaagccctgcaggcccagcgcgacactgcagcgagccgcgcgcgcaagctcgccgaactcgccgtcttcgaagatttccgcgaactcgactggcgccccctcgtcacggaaatcgaacgcctcgatagcgagcgccgcgagctcgaagaaggctcggacattctacgcaccctgcagcagcagctgggtgcgctcgaagcctccgtacgcgaaaccgagaatcgcctggtcgcgcagcgcaaagagcaggcccaggccgaagagcgccgcgaacgcgccagggagctcttcgccgcctgcgaaaccctcctcgcagccacctctgaaagggtcaagaccgaactcttcccgcgcctcgaagccatgagcgcggaggccctcggcgatcgcgcggtgaccgtcgaatcctgtgagaactgcgagcgcgacatgcgcgagtggctgcaggcccgcatcgatgccgaggacaaacgcatgcgcgtcctcgaggagcgcatcgttaaagccatgcaggcctaccgcgggcgctatgctctcgaaaccaaggatgccgatgccagcgtggaggccgcgggcgaatatcgcgccatgctcgagcgcctgctcaccgacgacctgccgcgcttcgaaggcgagttcaagcgcctgctcaacgagaacaccatccgcgaagtcgccaacttccaatcgcagctcaatcgcgagcgcgaaaccattcgcgagcgcatcgagaccatcaaccgctctctccgcggcatcgattacaatcccggccgctacatccagctcgaagccaccgccaaccccgatccggagatccgcgatttcctccacgacctgcgtgcctgcaccgaaggctccctcggcacgcccgaaaccgccgcctactccgaaaagaaattcgtccaggtaaagcgcatcatcgaacgcttccgcggacgcgaaggcaccggcgatctcgaccgccgctggaccgaaaaggtgaccgacgtgcgccactggttcaccttctccgcctccgagcgctggcgcgagggcgatctcgaattcgagcactacaccgattccggcggcaaatccggcgggcagaaagagaagctcgcatacaccgtgctagccgccagcctggcctatcaattcggcctggagatcgacgcgccgcggcctcgaaccttccgcttcgtcgtcatcgacgaagccttcggccggggctccgacgaatcggcccgctacggcctggagcttttcgcgcgcctcaacctccagctgctgatcgtcaccccgctgcagaagatccacatcatcgaaccctacgtgtacagcgtcggcttcgtccacaccgataacggccgcatctccatgctgcgcaacctgactatcgaagagtaccgtgccgaacgggcggcccgcgccaaatga

SEQ ID NO: 41762 - DNA, 1152 bp, Candidatus Solibacter usitatus Ellin6076
atgaggagcagcgcctggaccacgccggctgaccttcgcgcccaactcctccgtcactgggaaaatggccgcatcctggcggcgccggagagcttgtttccgatggagctgcgcctccgcggccccgacacccgcgcgctctccgagcgtttcgaagaggtccgcacctggattcgcgagctggaagccggacatgggtacgagatccattgggccgagatcaatcaccgccagttgggccgcaatcggatccccgcccgcatcgtggtcgcgagcgagcgcgatgccctggaactcatcggaaaagtggaagaggcagcgcgattccgagctctggctgtgtgtacgctgcaaacttttccggagctcgcggagtggttcgaccgccggccgctgacggccctcgcctcggcgcatgagtgggatcgcgtgctggccgtgctccgctggtttcgtgagcatcccgcctccggcctctacctgcggcagctcgatatccccggagtagacaccaaattcatcgagcagcgcaaacctcttcttgccaccctgctcgatgtgattctgaccggtgagagactcggcaagaccttcgaacagcgctacggtctcgcgaccaaaccgccgcaaatccgttttcggatcctggaccggaacctcgcgatcgccggcctcaccgatctagccctcgtcccgcgcgagtttgccgccctcgacctgcccgccttgcgcgtcttcctcaccgagaacgaaatcaacggcctcgccttcccgaaaacccccggcagcatcgtgatcttcggcctgggctacggcctcgaccgcctcgccgacgcgaaatggctccgcggacgtgagctctattactggggcgatatcgatacctacggcttccacatcctagaccgactccgcgccctcttcccggcggcccgctctttcctgatggatcgcgacacgctgctgcaacaccgcgacctctgggtgaccgaaagcaatccgtgcacggtagagctcacgcgcctgacgccacccgagttggcgctctacgacgaactccgctacaaccgcctcggcgctcaagtccggctcgaacaggagcgcctacccttcggccgagttcgcaacgctctttcgtttgtggggtcctga

SEQ ID NO: 41763 - DNA, 1443 bp, Paenarthrobacter aurescens TC1
atgtcctcggccgatgccattagcgcgcggctccgtgacctcgaacagttgaccaggggccccgcgtgggccctgacacggtcggcgccgtgggtgatcgcggtgctgcaagcatccttcacccgcacccggccgcagcttcctctggaagagttccatgccgacgtcgacgctttcctggagcagctccgcaggcaggacccggcgctgggtggccagcagaacggcaagctctttggcgacgaatggacccggaaacagttcctgacccggcgcaaccaatcaggtcagatcgtttacgaagtcaccgaacccgcggctcgtgtgcttgcgttcctggacagcctctccagcgagcgttccactctgaacggttcccggctgggcacgctgctgggcgacgtggagaagctcgccaacgagaccaaccctgaccagagcgcacgactggaagccctcgaagaggaaatccaggagcgccagcaactggtggaagacatcagttccggcgagttcgacgggctcctggatgatgaggaagccgttgaagcggccggcaacatccttgacctcgcggccagcctgcctgccgactacaagaaaatgcgtgaccgcatcgaagaactggtgggagagctccgcaaccagatcatcgaagaatccctgagcaagggcgccaccatggcccaggttctggaagccgacaagcgcctgcggcagagcccggaaggccgtaccttccgctcattcaccgctttcctggaggatccgcagcagcagttgcggttccgctcggcgatcggcgaggtactgagccggcaattcgcggacgacctcagccacgaggaccgcgaaacgctgaaaaacctggttgccgaactgcgcactcagcacagccagatccagcgcatctacggcaagctttccgaaagcctgaacacttacatccagagcgacgacgtccggcaatcagtcagcctgcgcaaggtgctggccgaagccgaacaagccatccgatccatgccctacgaacgtgaccgccccagcctggtccgcgggcccgtgctgttcaacgccgggttcgagtcgttggccatggtcaaacttttcgaccccgacgaatttgccacacccccgcgcctggccgatcccatcgccttcagcgactcggaccgggtgcggtcagcgcgcaccggaaaagcaaaacccacggtggttcgggcagccatggccggtgcagccacgctgggcgacgcctgggaaaacctgcccgccgaagaacggcacatcaacactgtgcgaaccctgctgtccatggcgctgcaaacgggcgccgccttcgacagggccgcatgggaacacatcgacttcgaacaaatcgacggcagcatccgcacggcgtacttgcctgtcgtctcgctgaatgaggattctgatgcctga

SEQ ID NO: 41764 - DNA, 903 bp, Paenarthrobacter aurescens TC1
atgcctgaggaaatcacgacgacggacgtcaccgaagcggaccaagtcaccgaagcggtggctgaagtcggtgtcgaggctgagccggctcccgaggtcagccacgcggatccgttccgcattactccgcgggacaccttcgtggacggcgccgcgctcttccccggcgacactggtgtgctgcccatgaaggtgcggcatgcactggtgaaactgctgaaggggccctacatcgacggtggccgcgacgagaaactgtggaccacgctgctggacaaccaactgatcctccgcagccgcctctccgagctgttcctcaccctccagctcgatcacgaccgcaaaatcgcggtccttcgccctgtggacccggaagtcatcggcgccagctcccgctccagcatcctcaggcagcagcgcgccctgagccgcgtggaaaccattgtgttgctgcgactacgcctcctgctggaccgccacgtcacagcccaaacagacccgaccatcacccgcgaagaaatctccgacctcgtcgccaactacacacccgcgggccaacaagacgccctccgcgactccgacgtggtcacccgcaccatcaccaaactcctggcacgccaactcatcctccccaccccgctggacgacacgtacaccatcagcaacgccctccctctggccctcccgttcgaaaacatcggcgacatcccggcccaaatagaggccctgatagcagtagcagctgacgaatccggaacagaaccattgctggatctcgactcctccgactccaaccaacccaacccctcaggtgatgacgtggacgacgaccctgaaggtgacgaccgcgctgacgtaagcaccgccgcggacgcaaccacgactgacgggacacagaagtga

SEQ ID NO: 41765 - DNA, 3372 bp, Paenarthrobacter aurescens TC1
atgcacgtggaccgcaagggaaccctcctgaccggtaactcgggcgtgggtaagtcgactctctttgatgcgatgctccgcgtttttgatgcccgcccgcgctccaacgaggccgctgcccagcgttccggcggtgctgtggaggacaagaggaccacgttcacgtacatgcgcggcaaggttggtgataaggcggtcggagacagctcggcgagtgccttccagcgtccgggcgccacgtggtccgccgtcgcgttgacgtttgataatgcggccggcacgaaggtgacggtgtcggcgctgttcgacttgccgaagaatggcacggagtcgagtgtcgggcgtttttatgtgatcgacagcaagccgttggaccttgaagcgatcgaggggattgcgcagaagcggttcaccaagggcgcgctggagtcgatcttcccggacgggcaggtcttcgatgtgcacaaggcgttcgcggagcgcttccgtcgcttgctcgggatcaactcggaccaggcacttcctttgcttcgcgtgatccaggccggtaagggcttgggcggcagtgtgaatacgttcttccgcgatcaggtgctcgacgctccggccacgttggctgccgctgatgatgtggtggaagagttcagcaacctgatgtccatccggcagaggttggaagatgttcggcagcagcgtgaccagttggctccggttcccgggttgaacaaggagtacgcgcaggcgttgctggacgcgaaccgcctccgggagctggccggggaggaatttgaggcctacaagcagcagcttgcggtcacagtccacgccaagaccttggcccgtttcaaggagttggcccagtccaaggcccaggaattggcggctgagcgcactgtgcgggacgccttgtccaaagacctccgtgaccttgaactggattacaacaaccgcggcggcaacgcgatttcggcgattgagcagtcgttggagaacgccaaggttggcctgaagctgcgccagcaggttgaggattcggccaagaaggcgttggccgacgccggacttaaccttgaatggtcggccgagggctgggatcaggcgcatgagcaggcagctgcccgctcggccgagttgaaggacgattcggaagcgctcaaggagcttcgtttcgaggcgttcgacggccatgccacgaagaaacgagagcttgcggcggctcagcaggagctgttgtcgttgcgatcgcgcaagtccctgctgccgccgtcgagtattgaaaaccgcgccgccatcgcagccgcaacaggcgtcccggaagagcggatgccgtttggcggtgagctgatcgacctcgccgaagggcaggatcagtggcgtcccgctgccgaacgggcgttgcgcaacctcgctaccactttgctggttcccggcgagcacttcgcggcggtcacccgttacttgaacgacaacaccgtccggggcgcgctgcgcgctgttgatgtttccaagccactcgccggcggtgcgctggctgtggaggacgtgtccgacggcgatctcttgactaagttgagcatccttacctcgggtgccaatgccgacgccggtgagtggatccgcgagcggatcgccttggacttcgcctacccgtgtgtcgaggatccggatgagcttgcctcgatggacaagggcctgagcctgggtggcgtggtcaaacgcaacaggcacactgtggagaaggacgaccgtttcacgagccggcaggattacgtcctcggtttcgataacgcctccaagcttgaactggtcgccgcgcgagtgggggagctggaaaacgagctcgtcaaggccgcggaacttgcacaaagccgcgaggattcgcaccaaggcatggcccggcagctcgaagctctgcgtcgcgtcgctgaagacgaacggccctgggaacaagtgtccgcagccgtggccgcggacgaacttgctcgaatcgaacaacgcctgacggatgctttggccgcgcaggcggaccttgagccgttgcgtgccaacatcgaagccgtgcgcgaaaagcaccagtcctccacaggcgccgccgctgtgctccagagcgagtacaaagcgctggaccacaagatgacaaccgctgacggcctgctcgatgcggcgaggctgaagcttgagcagacaccgccgtcggcttccaccgtcaccgcgctggaaccgtacttcggtggtgccgctgaggtttccgagctgtacgaactcgacaacttggccaacagtgtccgcaacaagctgctcgacgagctgcacgccgcggaatcgcgcggccaggccacagccgaacgattgacccgtatgttcgaagcattcgttcgcgactggggaagcgccatcagcgcggaccacggaacgtcgatcggcgcggccggggacttcgaatcccgctaccacgcgatcgtgagtgacggcctacccgcccaagaggccgagttccggttgttcttcaaccagcgcacgcacgagtcgttcagcacgctcctgcatttgctggatgaggagcgccgcagcatcaccagccgcatcctgccgctcaacggcatcctgtcccaggtgaacttccatgagggcagcttcctggaactggacatcaagcagacgctcccggccacggccaagcagttcaaggatgcgatccaaaacgccctgaaggcgaagcacaccaggccctcgcgtgccgccgccgctggttcaacggcagaaatcgacgacgacgccgagctcactgcacgctataaatcgttggagaccctggtgaagcggctcggatcccagacgccggaggatcggcgctggcgggctgaggtgctggacgtccgcgggcacctgttcattcagtgcaaggaacaccgcgaggtagccccgaaatcgggcaaggccggtggctccggcaaagcaggcaagaagaagaccgatgtcttcatgcacgccgataccgggtccatgtccggcggtgagcgccagcgtttcacggcgttcatcatggccgctgcgctgagctaccagttgggcatcgccgagcaaggattcaccacttacggcacggtgatgatggacgaggcgttcgtgctggcttccgaagaattcgccggcgccggcatcaaagcacttcacgagttcgggttccagttgctgctggccgctccggagaacgtcattgacctgtcgaggcaccttggctccgtcactgaaatcctccgggacaagcgcaccaaccgctcgggagtgctcacggctccagtcattgccgagccaggcgagcccggggcgtggcggtcggaggcaaaccccgtggacatcgtcctgcggtag

SEQ ID NO: 41766 - DNA, 1431 bp, Mycobacterium smegmatis str. MC2 155
gtggattacgacgcgatcactgcactgcgtgaccggcatccggcgtggcggctgttgcgagcgggcaatgcctcgttggtcttgtcgttcctgggggagttcttcgtggaggccaaccgcggtgcatgcccggcaggccaggtcgccgaggcgctggacaaccatctctacgcgctcagtgccggatccggggagagtcgctatcccaaggagccgcgcgcgtatctggaggactgggcggccaccgatgccggctatctgcgtcggttctacccgccgggtgacgacgaagtgcactacgaggtgacaccggctttcgagaaggcatacgcctgggtcgtcaaccttcagagcaggtccttcgtgggaaccgaatcccggctgcacaccgtggtcgcgctcctgcgccagatcgtgcacggcaccgaggtccaacctgatgtccggctggccgaacttcgtcgccgccgtgctgaactcgaggcggagatcgcggctgtcgaagccggcgacatcgccgtgctggatccgacagcggtacgcgaccgctaccagcagttgtccaccaccgcgcgtgaactgctgtcagacttccgcgaggtcgaggagaacttccggctgctggaccgagccgcccgcgagcggatcgccgcgtgggagggctccaagggcggcctgcttgaggaactggtgggcagccgttcggagatcaccggctcagatcagggacgcagctttcaggcgttctacgacttcctgctgtccgagcagcgtcaggccgaactcgccgagctgatcgccaaggtgtccgcactcgacgtcctggaagccgacccgcggatacgtcgcatccatcacgactggtctgaggccgcagaccgagcgcagcgcacggtgcggcagatctccgaacagctgcgccgcttcctcgacgaccaggtgtggctggagaaccggcgggtcctggacctggttcgggcggtggagagcatcgcgctggaagttcgcgatgccccgccgaccttcgggctggaggtcgacgaaccgggcatcgagatcgcgctgccgtttgagcgtccgctgtatcaaccgccgacagaggtggcggtagagagccacgtctcggcggcgaccgaggaggtcaacgcggacctactcttcgcgcagacatacatcgaccaggcacgtctggccgacaccatccgcgccgtgctgcccgaggactcgtcagccctgctgtccgatgttgttgcggtgcacccgatcgagcagggggctgccgagattgtcggctatctcgccctcaacgaggacgacctggcaatcgacgtggatgacaccgaggagaccgtcctggaataccccgacccagccgacccggacatcaccaagcgggcgagactgccgaaggtgacggtgcgacgtcgatga

SEQ ID NO: 41767 - DNA, 723 bp, Mycobacterium smegmatis str. MC2 155
atgagcaacgaacgtgcagtggcaaccgccatcattcgtctgatgcagggcgtcgtctaccgcgatgcggatgaggacacgtggctgacgctggaacgtgcgggggccggcgttcgggaccacttcgccaccatcggaatcgatgtggtggtcgacgacgccgagggttacgcctacctgcgctcccggccttcggaggacggtgaggaggagttgccgcgcctggtgcgcaggcgcgcgctgacctacaacgtcagtctgctgctggtgctgctgcgtaagcggctcgtcgagttcgagaccagcggcggcgacggccgtctggtcctgagcaccgaacagatcgtggagatgctgcggctgttccaagccgactccaccaacgacgcccgagtcgtggaccaggcggagaccaccatcaggaagaccgcagagttcggcttcctgcggcagctgcgcgggcagcgcgaccactgggaggtgcgacgcatcctcaaggcctatgtcgatgcccagaccctgtcggacttcgcggccaaactgcgccaatacgctggagcaggagcaggcgatgagttaaacgatctctcggacagccgaactgagcgtgcgtcccggggcgggatatcgactccagtacgccgagatctacaactggggaacgttcgacggccaggtttggcggttcactcccggcgccgagaccgcattgctgaccggtga

SEQ ID NO: 41768 - DNA, 3246 bp, Mycobacterium smegmatis str. MC2 155
ttgctgaccggtgacatcggatcgggcaagtccacgatcgtggatgcgctcaccacgctgctggtgccgtcgcacaaagccgcttacaacaaggctgccggcgcggacgccaaggaacgcaccctgcgctcctacgtcgaaggccattaccgatccgaacgaaacgaggccaccggaaagtctcggccgaaggggctgcgggagaacagacggacctactcggtgatcctcggtgtcttccgcaaccacggccacgacgagacggtcacgctcgcccaggttttccagcagcgtgagagcaccggacagccctatcggttcttcgtcaccgcaaccaaggagctgtcgatcgccgtcgacttcgccgacttcggctccgatctgcgcgaactgcgaaagcggctgcgatccgcaggagcggagatcttcgacgagttccccaagtacgcgacctcgttgcgacggctgttgggaatccggtcggaacaggcactcgagctgttccaccagacggtctcgatgaaatccgtgggaaacctcaacgatttcgtgcgcgaccacatgctcgagccgagcgactcgaccgaacgcattcgcgagatcatcagccacttcgacgacttgaccagggcccacgacgccgtcaagcgggcacgtgagcagctcgaagcgctggaaccgattgccgacactgcggccaaatacgatgccgcactggctgaacgcgacggcctggagcacgaacgatcggcagttcggctcttcatcgccgaactccgttccggacttctcgccgatgagatcggtcggttagaggccgacggcgccgctctatggcagcaacaggatgccgccgaagccgaccagcgcagactcaaccacgaacgcgactccctgatcgaggagcgtgccaaggccggtggggatcgcatcggcgagttggagcggctggcccacgaggcccgtgcccaggccgagtcacggcggcaggccaggacattgttcgactccgcggtcggcgaggccgggctgacgaccgtcgccgatgaagaggcgttcctcaacctgcccactctggtcgctgccgaacgcaccaggctggccgccgagaagcgcgaggtcgatgccgccactgtcgacgcgatcggccgtgagcgtgactgtgaacgcaagtgcaccaccctcagcgcggagatcgagagccttgaacagcgcaccagcaacctgcctcatgagcaggtcgtgatgcgcgaagagttgtgtgccgcaatcggactgacaccggagcagctgccctacgccggtgagctcctcgatgtgtacgacgaacgcgccgagtggcgaggtgccgctgaacgagtgctgcggggcttcgcactctcgctgctggtgccgcagccgcactacgacgccgtgacccgatgggtcaacgaacgcaggctcaccgtcgccggcaggggtgccaaactggtctatgagcgggtcgctgcgcgccgcgtgcggctgcagccagcggagtctgacgggctgctgctggccgactgcatcgaagttcgggagggcccgttcgaggagtacctccgcaacgaactgatgaagcgcgccgacttccggtgcgccaccacactccaggagttccgtgacctgcgacgcgcggtcacccgagaggggcaggtgcggtccggtgaccggcacgagaaggacgatcggcaccgcgtcgacgacccacgccgctgggtgctgggctgggtcaacgaacgaaagctcaccgccctgcgcgacgagttcgccgacctggaacgcgatcggcaggaggccgctgccgtcgcggccgccctgagtgcgcgcagggaagtgctgcagcatcggctggacgcccttgtgcgaatcgagggctttcggtcctggactgagctcgatgccgacgaggccgtatcgcgcgccggggcccacgacgcggagcgggctcggttgcagtcaggatcctctcgactggaggagatcacgagggcactggaacgcaatgccgaagaagccggcgttgtcgccgagcggatcagacaactcaccggtcagctcgccaccacggccgcagccgtgcagcgcgcgcagcaggaccgaaaacgagatcaggagttcgtgactgcacagtcacccgagcaactcgaggtggcgcgggcgtcctaccccgctctcgaccgccggctcgctgcgagccggcccactcgagccgacgactgcgccgccgccgagtcggcgctgtcggaagacctgtaccggcgcatcgagcgattgacccgtgagctcggcgggtatggccagagcctggcacagtacatgctggaggtgcttcgccggtggcccgagctgcgtgcggacatggatgccaccgtcgaggcacgcggcgacttcctggccttccgccgccgcgtggcgaccgatgacctgccgcgttttgagtcggagttcaaggaacagctcaacaagaacgctatccaggagcttgcggggttcaacaactggctcagccggcaggcctcggccatcgacgaacgcatcgaccgcatcaacgaggcgttgggcgcggtgccctacaacccaggccgcttcatccggttggagaaggagcccaccaccaatcaggatgtcgcacagttccgttcagatcttcgcaacctgaccaacgacgcgctggcggtcgacggcgaccagtactccgaacagcgcttcctcgacgtgaagcggatcatcgagcgtttccgaggtcgcgagggctacgccgaatcggaccggaactggacccggcgggtcaccgatgtccgcaactggttcgtgttctcagcctcggaacgagacgtagacacgggcgccgagtgggagcactacagcgactcggacggcaaatccggcgggcagaaggagaagctcgcctacaccatcctagcggcgtcgctggcctaccagttcgggctcgaatggggcgccgaggagtcacgcgacttccgcttcgccgtcatcgacgaggcgttcgggcgcggatcggacgtgtcgacacggtacgcgctcgatctcttcgcaactctcgggctccaactgttgatcgtcacaccgctgcagaaggtgcacgtcatcgaaccgtacgtgaaggcgatcggcatcgtggacaacccgaccggaacatattcgcgtctgcagaccatgacgatcgaggagtatcgcgcccggcgcaacggaactcggccgtga

SEQ ID NO: 41769 - DNA, 1170 bp, Mycobacterium smegmatis str. MC2 155
gtgagcaccatgtgggccacacccggtgacatcgcggccaaggtcaggcgccgctgggacgacggctccctgctgcgcgcctatggagagggggagccgttcgcgccaatcgaggtgccgcttcgtggtccgaccccggcgcagatcggtgacgacgttgcgcgtgtgcgcgactgggtgacggctctcgacgcggggcggcacgacgatgcgcggtacatgctggaatggaagtcggtgggcggcaagaagttcggccgcaacatgcttcccgctcgtgcggtgatttgctcatacggccaggcgtggacactgctgggggtgacggcggctgttgggcgtttcgacgagctgctcgcgtcggcgcacgatcatccccgaattcgtcaatgggtgatcgccaacccgcaccgggcgctggcactggcggcggacatgccgaagctgatcgcggcttgcgagtggctcgaccgacaccggcactcgcagcgttacctgcgcgagatcagtgcgcccggcgtggacacgaagttcgttgaacgccgccggtcggacttggccgggattctgggcgtgccatcctcggcccagggattcctcaccgaactcgggctacggtccaagcccagccttgttcggctgcgaccagcgccgtcgctggggctaccggcacctctctcggagctcgcggtccggcctgatgaattggcgcagctcgacctgcggccacgcacagcggtgatcgtcgagaacgagatcagctatctcagcgtcgacgtccctgaagctggtgtggtgatctgggggaagggcttcgatgtcgacaacgtcgggcggctgccgtggttggccggtgtccgcgtcgtgtactggggcgatatcgatacccatggatttgcgattctcgaccgacttcgggcgtggcagccgacagcagagtccgttctgatggaccgagccaccctgatcgcccatcgtgaccgctgggtggtggaggaccgtcctgctaggtcgatcctgcctcgactgtcacccgaggaacagcagctctaccgggaactcgtcgaggacagcctcggcgatcgcgtacgcctcgaacaggagcggatcgactggggctgggtcgagggccgattgaaggcgatctatcaaggtcgtatagattcatga

SEQ ID NO: 41770 - DNA, 1467 bp, Mycobacterium smegmatis str. MC2 155
atgcccgacgctgatgtcggtcgtccgtcgttgcagcggctccacgagctcaaccgtgaggtggccgagtcgcggtcggtgcggctgctcgtggccaacaacctggccggatacctcacgctgatggaacgtcacctcgatcgcgggaccaagctcaccgagcccgaactcgtcgcccggctcgagcgcgatctggccgatctgggcgccgacggcgagcagtcggggctggcgctcatcaagtactgggcgagccagggctggctgcaccgcatcaccgaacaggccggcgacggtgagcgcaacgtctgctacctgacctacgaggcccgcgcggtcctcgactttgcccgccggatgcgccgcgaggacaccatcgccaccggcggctcgatcgcgggcatcgcggcgggtctgcgcagggtggccggtcaggtcagcaacgaccccgagcgcatccgcgccgacatcgaggccgagatcgaccgtctgcgcgccgaactcgacgcgctcgacgagggacgccgccccgagcccgacccgctggacgtcgaggacgaggcgcgtgcgatcgcactgcagatggaacagatcatctccgacatcgggcagtacggcgcgatgctgaaccgcatcaccacacgcctgctcgacgcgtcggccgacagcgacgtcggctaccgcgaacgccagcggcagctgttcgacgactacgaatcgctgttcgcgtcgcgcgagagcgcgtcgtacaccgcgttcacgcgcatgatccaggatcccgagcagcgcgccgcgctggtggccgacatcgagctggtgaccagccagctgccgcagctcgacccgagcctgcgcgaggtgatgtccgggttcttcacgctggtgtcggcgcagaccgccgaggttggccgcacccgtcagcggtgtgcacgccgcatcaagcgcttcgtggcgtcgggcacgctggaggagagccgtggcgtcacccgccagctcaacgatgcccttgcggccgccaacgccctgctgagcgtgtccctggccgacagccgcgtcgggttcgaggtccctctggcgcgtgccgacttcaactcgatcggcgcggtggcgttcaagatccgcgacgcggtgccgcccacgcccgcgcagccgtccgagggcgaggtgaatctgtcggcgttcggcgcgctcgccgcgcaggtcgacgccaccgaactcgccgaactcgtcaacgacaccgtcgtgtcgcggccgctgccgctcaacgaggccatcggcatgctcgactcggcgtatctcggccacgtcatcgtgctgtggtcgtgggccctcaagcagcctgccgtcggcaacgccgagtcggtgcgggtgcggttccgttctctggaaggccccgaccgcgaaatcgaagtgccgaaactggttttcaccgaaccgatcccgatcgtcagcgagagtttgttatga

SEQ ID NO: 41771 - DNA, 723 bp, Mycobacterium smegmatis str. MC2 155
atgagcgacacgtccatcgacttcgacgcgctaccgagcatcgacgcggtcgaacgttccgcaccggaacgccgcgccccgcggttcgacggtgacgtctcagagttgcccgaccgggcgtgctgggccctgcagcacctgctgtcgcggcgctacatcagcaagcacaaccacaccgagctgtggtcgtgggtcacccggtaccgcaccgagctcacggtgcggctgtccgaactcgacctgcggctcgtggtgtccgatgaccacgagatcgcctacgtcgagcaggccgaatacgaatctcactggcgccgtaagctgttgcgccgcgagacactcaacacctacgactcgatcctggcgctgcacctcgccaagctcatgcgcagcgcgaaccgcgacgagaacgtgctgatcacccgcgaggacatccacgagttgttcgccgccgtgaacaacgacaccgaccgtgacgtcgcgtcgttcgaccggcgcatcgacaacgcgatcgagcggttgaccgacatcgagatcctggtccgcaaccgcgaggacgaggacagcttcacgatcagccctgtgatcaacgcgatcatgaccgcgtcgacgatcaccgagctgacccagcagttcgaacaactcaggcgcgccgcgagcggcgacccggatccagaccccgacccagccgcagccgaggatgaagtggacgccgatggcatctga

SEQ ID NO: 41772 - DNA, 3357 bp, Mycobacterium smegmatis str. MC2 155
atggcatctgaaccgaccaaccagttctatctgtcacgtctgcaggtcatcaactggggcgtgttcgacggatatcactcgatcccgttcagccccgcgggcacgctgatcaccggttcgtctgggagcggcaaatcctctctgctggacgcgatctcgctggcgttcctaccgtcacaccgacgcaacttcaacgcctcgggtgacaccaccgcggcgggttcgggcaccggcaagcgcacggtcgacaagtacgtgcgcggcgcgtggggcgaacgcagggacggcaccagccgtcagatcatgtacctgcgcggcaccggaccggcctggtcggccgtggcggtcacctactccgaccgcaccgggcgtgccgtgaccggccttgtcctcaaatggcttgccgccgagaagacctcggatccaggaagtcgctactacctcatcgacgacgaccgcgacatcttcgacctgtgcaaccggtgggctgcaggcgggtacgacgcctcggtgttccgcgaggcgggctggaacggcggccgcagcgagagtcagtacctggcgcagctgtactcgatcatcggcatccgggcctccgaggcggcgcagcagctgctcggaaaggccaagtcgctcaagagcgtcggcggtctcgagcagttcgtccgcgagttcatgctcgatgagccggcgagcctcgcgggcgtcgacgaggcgctcgagcagatcaacccgctcgtcgaggcgcgcggcatgctcgacgtggcgcggcgcaaacgcaacacgctcggcaacatcgaggccgtgcaggcgcgctacgccgacgaggccgcgaagttcggtgtgatcgacacgatcgacaacgccatggtgcgcgactacgtcgaccagttgcggctgcagcaggcgggcccggagatcgagaacctcgacgaccagatcaaccagctcggggcgcagcgcgacgacttcggcgcgcagcaacgccagctcaagaacgagcacaacgcgttgatggcgcagatcaactcggcctcggtcgatctcgtgccgctgcagcagcggctcagcgaggccgagaagctcgccgacgaggtgggccgcaggcgcggggcgtacgaggacaaggtcaccgcgctgcagctcacaccgcccgacacggccgaggagttctggtcgttgcgcgagaccctcatggaggaggccgaccggctgcaccgcgagctgttcaccggcaaccaggcctacgtcgaggcgtcggcgaaagaggtgcgtgcccgcgaggcgcgtgacgccgtccagaccgagctggaacgcgtgcggcgcctcggctcgtcgctgcccaagaccgagtacgagatgcgggcccgcatcgcgcgggcgatcggcatccccgagcgcgacctgatgtacgtcgccgagctcatggagctcaagcccgatgagagccgctggcgcatggcggtcgagaaggtgttgcgcggcgccggtctgcggctgctcgttcccgaggcacacctcgacgcggccctgcggttcgtcaacgagaacgacatgcgcgggcgcatccagttgcagcacgtcaagcacgacgcccagttgcgcacacccctcgaggggacgctggcgtccaagctgcaggtcgtcgaccccacgcatgacagcgcggtcgaggcgctcaacgtcatcgcgtcggtcggcgactacatgtgcgtcgacagtcccgacgagttcacgacacacacccgtgcggtcaccgaccagggcctgcgcaaggacagcgggcggctgtcgatcaaggacgaccggtccaagcttcgtccgtccgactacatcttcgtcggcggcacggaggcgaaagtggccgcgctgcaggcggatctggccgcggcagaggatgtctacgcggcggcccgcaaggcgcgcgaacggctcgaccagcaccgcgcggcgctgcaggcgcgtgaacgggcctgccgggcgctgtgtgaccagtacatgcagtggaccgacatcgacaccgactcggcagacgaggcactgacccgcctgcaggacgaactcgatctgctggtgtccgacaaccccgacgtcgagaaactgcagcagcgcgccgacgaatgctgggagcgcgtcgagaaggtcatccagcagatcggctcgctcaacgaacgcgagacactgctcgacaaccggcgcaccgcacttctcgagctcaccgagcggctcaagcccggcgagatctcgcagcatgcgcgcgacaccctcgacgggtacgcagcagacatcgcgctaccgctggacctgctcgactccgagccgttccgcaacgaactcgtgcgcgtcatcggccgcgaacgtgaccggttgcgtgccgaccgcaaccgcagccacgacgagctcgcgggcatcatggcggcctacgacagctcgttccccgacgcgatccccaacgacagcgacgatttcgacgagcgcgtgcacgactacgtggcgctgtgccggcgtatcgacgagcgtgaactgcccgacgcctacgagcgcatgcagcggctcatcaccgaacaggcacctggcgcgatcctcaacctgcacatgatcgccgacaacgaggcgcggcggatcaccgagcagatcgcgcgcgtcaacaccgggctcggcgcggtcgagttcaaccgcggtacgcggctcacgctgcacgcgggcacgcgtcacctcgcggccgtcgacgagctcaacgagatggcccagcgcatctcggcgcgggtgtcactcgtgagcttcggcgacgagaccgcgatgttcgagcagtacaccgacatcctgcagctgcggaaactgttggcgggcaatacgcccgaggaccggcagtggacgcgcgacgccctcgacgtgcgcaaccggttcgtgctgtactgcgaggagcgagacgccgagaccggcgtggtgatccgcacgtacagcaattccggggacaactcgggcggtgagcaggagaagctcatggcgttctgcctggcgggcgcgctgagcttcaacctcgccagccctggcagcgccgacaccaggccgatgttcgcgcagctgatgctcgacgaggcgttctcgaagtccgatccgcagttcgcgcagcaggcgctgtcggcgttccgcaagttcggattccagctggtgatcgtggcgaccgtgcagaacaccaccaccatccagccgtacatcgacagtgtggtgatggtgtcgaagtccgacgcctcggcgcccaacgccaggcccgtggcctcggtgaccgcggcgtcgatcgcggagttcggcgaactccgccgcggggccgagcctgaggcggtcccggccccgtga

SEQ ID NO: 41773 - DNA, 1449 bp, Chlorobium phaeobacteroides DSM 266
ttggctctcgactataccaccctgaacctgctgcgtcagaaccatccttcatggaggctgttgtgcgcccagcatgcaccgctggtggccgggtttctgcatcgtgtttttatcgtgcccaatgtgcggattctctcgcaggccgatctggttgaggcgcttgaggatgagttgtttgccttgcgccagcagcagggggcagatctctttcccggtacggcacaaaactatctgaacgattgggccgataacgagaaagggtggttgcgcaaattctacccggaaggaacggatgagcctcattttgacctgacggcgtcaaccgaaaaggcgctggcctggctggaggggttgactgaacgtgcttttgtcggcacggagtcgcgactgcttaccctgtttgaactcttgcgtcagatgagcacgggaagccaggctgatcctgaagtgcggattgctgagctgcaaaagcggcgtgacgatattgacgctgaaattgagcgcatccgtgccggggagatatcgctgctcgatgacaccggtctcaaggatcgctttcagcagtttctgcaactggcccgtgaactgttgaccgattttcgggaggtggagcataattttcgaactctcgatcgccgggtgcgcgagcgtattgctttatgggaaggttcgaagggggcgcttcttgaagagatcatgggcgaacgtgatgctatcgccgattcggatcagggaaaaagttttcgggcattctgggattttctcatgtcccagtcccgtcaggaggagttgaccttgcttctcgaagaggtgctcggcttgcccccgattatcgacatgagccccgacagccgtttgcgacgcgttcactacgactggctggaggccggagagcatacccagcgcacggtagcccgactttccgagcagttgcgcaggtttctggatgacaaggcgtggcttgagaatcggcgtattatggatatactgcacgagatcgaaacccatgcccttgagttgcgcgaagattctccttcaggcggcttcatgcctcttgacggttttgccgcggtcatcgagctgcctcttgaaagagcgctctatcgtcctccattcagtccaatgattgccggtgtcgctctggatgaaggcgatgcggagatcgataccgctattctttacgcccaggtagtggtcgatcgggtcgagctgttgcgaaatatccgcatggaacttcaggtgcgcaatcaggtcagtattggcgaggtggttgcacttcatccgttgcgaaacggtctggccgaactggtagcctatctgcaacttgcaggggagtggccccggatgactgtagatgagggagtagaggaaaaggtaagatggcagagcgcgacgggtatgacccgacaggcgattttgccgcgaattattttattgagaaaccaatga

SEQ ID NO: 41774 - DNA, 636 bp, Chlorobium phaeobacteroides DSM 266
atgacgaacccattagacattgatactggtcgaccgtcgtatcctgttcaggagctctctttcatcgtcattccactgttaaaaggggtgatttatcaggacgagagtcctgcattatggagctctttacttaatcagctggctgccgtacgcgattacgtggcggtgcttggtcttgaattgattctcgatgaagcagaagggtacgcttttttacgctctcactccgagagcgggacagagggcgcgaacgccacaccccgactgatggcccgccggcagcttagttatccggtcagcctgctgctggcgctgctgcgcaaaaaactggcggaattcgatgcgggaggcggcgatactcgcctgattctgtcgcgtgatgaggttgttgaactgatccggattttttttcccgccgtcagcaatgaggtcaaattgatcgatcaggtagacgctacgctcaacaaaatcgccgagcttggttttatccgccgtttgcggggggagcggcagatgatcgaagtccgtcgcattatcaaggcgtttatcgatgcccaatggctcgccgattttgataaacgtctcgacgaatacctggagcggcctgtgcaatcgatggagggaaaagatgagtga

SEQ ID NO: 41775 - DNA, 3366 bp, Chlorobium phaeobacteroides DSM 266
atgagtgatgtgattgaaatgggatttgttgccgatgaccgtctggccggtttccggttgcaacgtctcgaggttttcaactggggcacctttgacggaagggtctggacgctaaaactgggaggaaaaaacggccttctcaccggcgatatcggttccggaaaatcgacgctggtcgatgccgtgaccaccttgctggttccaggccagcgaattgcctacaacaaggcggcaggagccgataaccgtgaacgcacgctgcgctcctatgtgctcggttacttcaaatctgagcggcaggagagccttggaggcggcgccaaaccggtagccctgcgcgaatccaacagttattcggttattctcggcgtctttcataacgaaggctacgacaagaccgtcacccttgcgcaaattttctggatgaaagacgcatcacagccagcccgtctttacgccgtctgcgagcgcgatttatctatcgccgccgacttttcggcttttggtacagaaatatcgaccctgcgcaagcgcttgcgcgggtcgggcatcgagctgttcgaaagctttcccccatacggagcctggttccgccgccgcttcggtatcgacaatgaacaggcgcttgatctctttcatcaaaccgtatcgctcaagtcggtggggaacctgaccgatttcgtacgcctccatatgcttgagcccttcaatgtcgagccgcgcattgccgctcttatccaccatttcgaagatctcaaccgggcacacgaagctgttctcaaagcgaagcggcaaatagagatgctcgctcctctggtggatgattgcgatcatcatcaaaccctcgtgcgaacaaccgaagagctgcgagcctctcgcgacagcctgcgccactggttcgcatccctgaaactcgaattgctcgaaaaacgccttgtctcgctggatgaagagctgagtcgtcaccatatagccatcgaacgtcttgacacagagcgtcgcagccaacagggtcgtgatcgcgagcttcgccgaaccatcgccgaaaacggcggcgacaggatcgagagtatctcggcagagattcgtcagaaacaggaagagcttgaacggcgcaatcagaaagctgcacgatatgaagagcttgcccgcctgcttggggagcatccggcagcgacagccgaggaatttcatagtcagcaagccggtcattcagccatgcgagacgcaacggctgaagttgaagcccaggttcaaaacaatctcaatgaagcgggcgttctctttacccaggggcgtcatgagcatgagcaacttaccgaagagatcaaggggttgaaagcccgtatgagcaatatcgacgaaaagcaggttgccatgcgtcgctcgctctgtgaggcgctcaatctttctgaaaaagagatgccgtttgccggcgagttgcttcaggttcgggagcaagagcagctctgggaaggagccatcgagcgtctgcttcgcaatttcggcctgtcgctgctggtgtccgaccatcactacccgaaggtggcggagtgggtggaacaaaccaatctgaaaggtcgtctggtctattttcgcgtacgtcagcactctcgaagcgaacagttgccggatcatccggcctcgctggcgcgcaagctcgccatcaaagcggattccccctggtttgactggctggaaagggaggtcgcccatcgttttgatctggtttgctgcatgaatcaggaagagtttcgaagggagaaaaaagctctcaccctcggcggccagatcaagtcaccgggtgaacgccacgaaaaagacgatcgccatcggcttgacgatcgcagccgctacgtgctcggatggagcaatgccgccaaaatcgcgacattggaagagaaggccgggcggcaaaaaagagatcttgccgaacttgcaggtcgcataagcacgctccagcaagagcaaacaaaactcaaggagcgcctgaccattctctcaaagctcgacgagtattccgattttcgcgatctcgactggcagccggtggccatggccatagccaggcttgaaactgaaaaacgcgatcttgaagcgacctcgaattttctgcaaacccttgcttcgcaacttgccgccctcgaagaagagatgcgggaaacggagcggctacttgacgacagaaaagacaaacggtcgaaaatcgaacagaaaatcactgtcatcaaggagttacagcagcagacgcatacgctgctttctgaagcgggagccgaatccgcttcccgattcgccgcgctccggcagatgcgcagtgacgctttcggcgaccagtcggtgacgatcgagtcgtgcgacaatcgcgaaagagagatgcgcgactggttgcagacaaaaatcgacgccgaaaacgggaaaatttcccgactcagccaaaagatcatcaaggcgatgaccgaatacaaggaagagtggaaacttgagactcgcgaagtcgatgtcaacattgccgccggctcggaatatcgctcaatgtttgaacaacttcgggccgacgatctgcctcgcttcgaggggcggttcaaggagctgctcaacgaaaacactatccgcgaagtcgccaattttcagtcgcaactggcccgcgaacgggagaccatcaaggaacgcattacccggctcaatgaatcgctcacgcaaatcgacttcaatgcgggtcgatacatcaccctcgaagcacaactgaacctcgacgccgatatccgtgattttcagtcggagctgcgagcctgcaccgaaggttctcttaccggttcggacgacgcccagtactccgaagccaaattcctccaggtgcggcgaatcatcgatcgcttccgtggtcgtgaagcctatgccgacctcgatcggcgctggacagccaaagtcaccgacgtacgcaactggttcgtttttgccgccagcgaacggtggcgtgaagatgacagcgaacacgagcactacgccgactcgggggggaaatccggaggacagaaagagaagctcgcctacacggtgcttgccgccagtcttgcctatcaattcggtttggagtggggcgccgtacgctcccgttcgttccgcttcgttgtcattgacgaagccttcggacgcggttccgacgaatcggcgcagtacggcctgcaactcttcgcccagcttaacctgcaactccttatcgtcacccctttacagaaaatccatatcatcgaacccttcgtctccagcgtaggctttgtgcacaatcaggaagggcgctgctcggtattgcgcaacctcaccatcgaagagtatcgcgccgaaaaagagaaggcggcagaatga

SEQ ID NO: 41776 - DNA, 1176 bp, Chlorobium phaeobacteroides DSM 266
atgaactggacaacccctgccgaactcaaggcccaggttcagaaactctgggatcggggcctcatcctctccgctctgaccaacggcgaagaacttttcccccgtcgcctgacgctgaaagggcccgactccagagagttaagcaactcttttgccgaagtacgcgactggattatgcgactttccggtgctgccaaacagtaccggattgtatggcgcacggtcaatcaccgcattctgggagccaatgaacttccggcggaaatctggatcgattcactcgacgacgccctcgggcttattggcaaacagcgagaagcccggcaatttgccgccatggtcacgctcacccgcgactggcaacccgcacttctaccctggctcgcaaaacgccccctgcgagccctcgaactggccgaagagtggtcgcatattctcgaaattgtcgcctggcgtctcaaacatccccacccggatatctacctgcgccagatcgacctgtccggcgtgcacagcaagttcatcgaagggcaccggggcgtacttggggagctcttcgacctcctccttccaccggaggagattgacgcaacggttacaggagccggagggttctctctccgttacggctttagggacaaacccctccgggtgcgattccgaatcctcgacccgaaactggcgcttctcccgacgaataccgatcaggatatcaccctgacgcaggcaacgtttgcccgacttgaaatccccgttacaaaaatcttcatcaccgaaaacgaaatcaatttcctggccttccctgaggttcccgaggcaatggtgattttcggagcagggtatggttttgagaacatggcttcagtcgagtggatgcgtgaccgtgttatccactactggggagacatcgatacccacggtatggcaatcctcaaccagttacggagattctttccgcaggccgcctctcttctgatggaccatgagacgctgatggagcaccaaccgctttggggcgctgaaccatctcccgaaaccggtacgctcacgcgcctgaccgctcaagagggtgcgctttatgatcagttacgacgaaatgaactgggcagtcgaattcggctggagcaggagaagatcgggtttgagtggctggttgaggcgttaaaaaagctctaa

SEQ ID NO: 41777 - DNA, 1470 bp, Mycobacterium vanbaalenii PYR-1
ttgtcgccgcccctccctagtctcaaggtcgtggactacgccgccctcaccacgctgcgcgagcgacaccccgcctggcggctgttgcgcgcgggcaatgccgcgctggtcctgtccttcctcggccagttcttcgtcgaagacaaccgcggcgcatgctcggcgagtgtgctcgccgacgccttggacgaccacctctacgccctgaacgccgacgaggtgcggtacccgaagcagccccgcgcgtatctggaggactgggccgcgaccgacgccggatacctgaggcggttctacccacccggcgacgatgaggtccactacgaagccaccccggcattcgagaaggcctacgcctgggtgcacagcctgcagggcaggtccttcgtgggcaccgaatcccggctgcacacggtgatcgcactgctgcgccagattgtgcagggcaccgagacggagcccgaagtccggctggccgatctgcgccgtcgccgcgatgagctcgacgccgagatcgcggcggtggaagcagggcacgttgccatcttggacgccaccggagtccgcgaccgctaccaacagttggcgaccaccgcgcgcgagttgttgtctgatttccgtgaggtcgaggagaacttccgcctgctggaccgggccgctcgggaaaagatcgccgcctgggatggatccaaaggggaactgctggccgaactgatcggcagtcgctccgagattgccgggtctgaccaggggcgtagctttcaggcgtttttcgacttcctgctctccgagcagcggcaaaccgagcttgccgacctgctcgccaaggtgaccgccctggacagcgtcgacgccgacgagcggatcaggggtatccaccacgactggtccgaggctgccgaccgcgcccagcgcaccgttcgccagatctccgaacagcttcgccggttcctcgacgaccaggtgtggctggagaatcggcgggtgttggatctggtgagggccgtcgaggccgccgccctcgacgtccgcgacaccccgccgtcgttcgggctggaggtcgatgaacagggcatcgacatcgccctgccgttcgagcgcccgctctatcaaacgccggtcgcggtggcagtcgagagccgtatcgccgacggcaccgaaaatgtcgacgccgacctgctgttcacccagacctatgtcgaccaggtccggctggccgagaccatccgcgccgtcctgccggagaactcgtcggcgctgctgtccgacgtcatcgcggtgcatcccatcgagcagggcgccgcggagatcgtcggctatctggccctcaatgacgacgacgtcagcgtcgacatggacgacaccgatgagaccgtgctggactatcccgacccggcccatcccgacgtcaccaagcgcgcccggctaccgaaggtgacggtgcgccggcacgggggccaacaaccatga

SEQ ID NO: 41778 - DNA, 579 bp, Mycobacterium vanbaalenii PYR-1
atgagcaacgaacgtgccgtcgccgcggccatcatccgactcatgcagggcgtcgtctaccgcacctccgatgaggacacctggctgacgctggaacggctgggcgccggtgtccgcgaccacttctcgaccatcggcgtcgatgtcgtgatcgacgacaccgagggctacgcctacctgcgctcacgtccggaggaggacggcgaggaggcgttgccgcgactggtgcgcagacgtgccctgacctacaacgtcagtctgctgctggtgttgttgcgcaaacggctcgtcgagttcgagaccggcggcggggagggccgcttggtgttgagcaccgagcagatcgtcgagatgctgcggctgttccaggccgactccaccaacgacgcgcgcgtcgtcgaccaggccgagaccaccatcaagaaggcggccgaactcggtttcctgcgtcagcttcgtggtcagcgcgatcactgggaggtacgacgcatactcaaggcctacgtcgacgcccagactctcaatgatttcgccgccaaacttcgcgagtacgccggagcggccaccgtcgatgactga

SEQ ID NO: 41779 - DNA, 3372 bp, Mycobacterium vanbaalenii PYR-1
atgactgaatcacgctgcgatgcaacccaacccggggccgggtaccgactccagtacgccgaggtctacaactggggaacgttcgacgaccattcctggcggttcacccccggcaccgacaccgcgctgctgaccggcgacatcggatcagggaaatcgacaatcgtcgacgcgctcaccacattgctggtgcccgcgcacaaggccgcctacaacaaggccgccggcgccgacgccaaggagcgcacgctgcgctcctatgtcgagggccactacaaatccgagcgcaacgaatccaccggtagatcccgtccgaaaggcctacgagagaacaagcgcacctactcggtgattctcggtgtgttccgcaaccacggtcacgacgagacggtcaccctggctcaggtgttccagcagcgcgagagcaccgggcagccctaccggttcttcgtgaccgccaccaaggagctgtccatcgcgaccgacttcgccgacttcggcaccgatctgcgcgaactgcgcagacggctgcgtggcgccggggccgagatcttcgatgagttcccgaagtactccacctcgttgcgccgcctgctcggtatccgctcggagcaggccctcgaactgttccaccagacggtgtcgatgaagtcggtcgggaatctcaacgatttcgtccgtgatcacatgctcgaacccagcgactcgaccgaacgcgtccgcgagatcatcggacatttcgaagatttgaccaaagcgcacgacgccgtcaaacgcgcccgcgagcaactcgaagcgctgcaaccgatcgtggacaccgcagcgaaatacgacgcggcactagccgaacgtgcgggtttggagctcgagcgcgcggcggtccggctgttcatcgccgagctgcgctcagggttgctcaccgacgagatcgcgcggctggaagccgacggagcggcgttgctgacgcaactggacaccgccgaagccgaacagcgcaggctcggccgcgagcgcgactcgctgatcgaagagcgcgccaaagcgggcggtgaccgcatcggcgagctggagcgacttgccgctgacgcccgcgagcaggcgaaaacgcgaagccagacaaaggctttgttcgacgccgcagtggcagaggccggactggagcccgtcgccgacggtgacgccttcgccgcgctcggcgccgtggtcgccggcgaacgcccccggctgaccggtgagaaacgcgacctcgacaccgcgaccgttgacgcgatcggtcgcgagcgggagcaccaacgcaggtgcgatgtgatcgccgaggaggtcgcgagcctggagcagcgtaccgacaacctgccacaggagcaggtggtggtgcgggccgagttgtgcgcggcgctggggttgacgccggacgacctgccatatgccggcgagttgctcgatgtccatgacgagcacgcgcagtggcggggcgccgcagaacgtgtgctgcgggggttcgcgctgtcattgctggtgccgcagcggcactacgacgccgtcaccgcatgggtgaacgggcgcaggctcaccgtcggcggccgcggcgccaaactggtctacgaacgcgtcccccaacatcgggtacgactgcagccgacggcacacgacggcttgttgctggccgactgcatcgaagtccgagacgggcagttcgaggaataccttcgcgccgagctgatgaagcgcgccgacttccgctgcgcagcaacacttgacgagttccgcaccgagcgtcgcgccgtcacccgagagggccaggtgcgctcgggggaccggcacgagaaggacgaccggcaccgggtcgacgaccccagacggtgggtactgggctgggtcaacgaacgcaagatcgccgcgatgcgcgcggaactggccgagctggaaagccaacgtgacgaggccgcggcacaagccgcgcggctggtaaaagaacgcgacgccctgcagtgtcgactggatgcgttccggagtgtcgaggggttccgctcctggggcgaactcgacgccgacgaggccgagtcgcgtgcgaaagcgcatgacgccgagagggttcggcttcaggccgggtcgaatcgactggcggagatcacgcaggcgctggagcgcaacgccgagaacgcggtcacagtaacggatctgatcaagaagctcaccggcatgctggcgaccgcgcaatcgagaatgaatcaggccaagcaggagcgaagccgcgacgacgagttcgtcgctgcgcatgcaccggatcaacgggagaaggcccgtgcgtcgtacccggccctgaccgcgcgactggcggatagcccgcccgcccgtgcggcggactgcgccgactccgaggcggcattgtccgatgacctgcaccggcgcatcgagcggttgtccggtcagctcaacgggcacgcattgaatctgacacagcacatgacggcagtcctgaaccgatggcaagagctgcgggcggacatggacgtcaatgtcgaatcccgagcagacttcctggccttccgggagcgggtcgccaccgacgacctgccccggttcgagagcgagttcaaagaacagctcaacaagaacgccatccaagagttggcggggttcaataactggttgggccggcaggcgtcggccatcgacgagcgcgttgaccgaatcaacgacgccctcggtgcggtgccctacaacccgggccgatacatcaagctggaaaaggaaccgaccagcaatcaggatgtcgcgcagttccgctccgatctccgcaatctcaccaacgacacgctcaccgcggacggcgaccagtattccgagcagcgctttctggacgtgaagcggatcatcgagcgcttccggggccgcgacggctacgccgaatcggacaagaactggacgcgtcgcgttaccgatgtgcgtaactggttcgtgttttcggcatccgagcgtgatgtcgacaccgatctcgagtgggagcactacagcgactccgacggcaagtccggcgggcagaaagagaagctggcctacaccattctcgcggcatcgctggcctaccagttcggtctggagtggggcgtcgagcgatcacgcgacttccggttcgcggtcatcgacgaggctttcgggcggggttccgatgtctccacacggtatgccctcgatctattcgcgactctcggtctgcagctgctgatcgtgacacccttgcagaaggtgcacgtcatcgagccctatgtgaaatcgattggcatcgtcgacaatccgaccggaacctattcgcggttgcagacgatgaccatcgaggagtaccgggaccggcgagaccggccactacggtga

SEQ ID NO: 41780 - DNA, 1155 bp, Mycobacterium vanbaalenii PYR-1
gtgagtgcacgtggatggaccacggtcggggatatcgtcgccaggctcaggcgacgatgggacgacggttcgctgctgacaggtcacgccaaggccgaaccgtttgagccggtcgaggtgccgctgcgtggtcccgcatcagccgctatcggcgacgatatcgccgcggtacgggactgggtggccgccttggatgccgggcggcgcgacgatacctgctatgagctggagtggaaatcggtcggcggcaggaagatcggccgaaacgaactccccgcccgagcggtgctacggcgacgcggccaggtatgggccctgctcggcgtcaccgggacagtgcgacgtttcgacggcctgctggaggtgtcgcgccggcaaccccgggtgcaggaatggatcactgagcatccgcaccgtgcgctggcgctggcgtcgcagataccgcagctgatcgccgcctacgaatggctcgacgcgcaccggcactcgcgccgttatcttcgcgagatcagcgcccccggagtggataccaagttcgtggagcggcaccgaacggagttggcggggatgctgggggtcgcggcgtcatcgtcgggattcatcagtgacctggggctgcggcacaaacctgctctggtccggctgcggccgtcgccgtcgttgggtctgcccgcggcgctgaccgaactcgcggtgcgcgcgggcgaactcgcccgacttcatgtgcagccacgggtggcggtcatcgtcgagaacgagatcagctatctgagcgtggacgtccccgacgatggaatcgtgctgtggggcaggggtttcgacgtcgataacgtcggacgactgccgtggctgggaggtgccgaggtggtgtactggggtgatatcgacacccacggattcgcgatcttggaccggttgcgggcctggttgccggagacccggtcggtgttgatggaccgggagaccttgttggcgcaccacgacaggtgggtgagcgaagaccggccggcgcggtcggcgctgacccgcctgacggtcgacgagttcggcctctatacggatctggtcgaggcggcattgggcgatcgggttcgcctcgaacaggagcggatcgactggaattgggttgagcggcacctatctttggccacctag

SEQ ID NO: 41781 - DNA, 1458 bp, Mycobacterium vanbaalenii PYR-1
gtgcacgacaactccactctgtctgcgtccgacctgctcgaactcaaccgcgacttgcaggcctcccgcgcgatccggctgctggccaccaccaacctcggcctgtatgcgacgttgatggagcggcatctggccgacggtgtgacgccggagacggagcttgtcgtccggctggagcgtgacctcgacgagctcgatgacccccagtccggcctgacgctgatcaagtcgtgggccagccagggctggctgcaccgcatcgtggatccccgcagcgaccagaacgtctgttacctgacccaggacgcccgccgggcgctggacttcctgcgcggcatgcgccgccaggacaccatcgccaccggcggctcgatcaacggcatcgcgtcccggctcaagcaggtggccctgaaggtcggcggcgacccggcccgcatccgcaagagcatcgaggccgagatcgaggctctgcaccgggaactcgacgaactcgacaggggcgagcgacgcactttctcggaaaccgacgctaccgacgcctacgacgaggcccgcgccatcgcgatgcagatggaacgcctgatcaccgacatcggtcagtacggctcgatgatcgagcaggccaccgccgcgctcgacgagccgatcgactccaacgtcgagtaccgcgaccggcagcgccagatgtacgccgactaccaggctgcctgggactcgcagggccgcgacagccaccgcgcgttcctgcggatgatcaacgacccggatcagcgcgccgagttcgaggccgacgtggccgccgtcgccgatgcgctgccccacctcgaccccgcgctgcgcaaggtgatggccggcttcttcgagttggtcggccaccagatcgacgaggtcgaacgcatccagcagcgctgcgcccagcgggtcaagcggttcaccgcgttcgggacgctggagcagagccgcggggtggcccgccagctcaacgaggccatcggcgcggcgcgcaatctcctcaaatcgagcttgatcgactcgcggctggacatcgagctgccgctggcccgccacaccatcagctctgtcggcgcactgagcttcaagatcggcgacctgtccaacccgaagccggccaagcccgccggcggcgacgtcgacctgaccagcttcgcggcgctgaccacccaggtcgacgcgcccccgatgtcggacatgctcaacgccgcggtcaccaagggtccggtgtcactgccggaagccattgagatgctcggccgttccggacaaggggcctacctcgggcatgtcatcgtgctgtggtcgtgggcgctcaagcagcccaacgagcacgaggccccgtccaccacggtccggttccggtccctcgacggcaaggaccgcgaaatcgccgttccccatttgatgttcaccgaaccgatcagtgtcggagccgcgcagtga

SEQ ID NO: 41782 - DNA, 690 bp, Mycobacterium vanbaalenii PYR-1
gtgaccaccgaacaagaagccgacttcgaggcgttctcccagcttccgcaggtcgaccagaccgcccgtcccccgcaccagcgcaggccccgcttcgacggcgacgtctcggagctgcccgaccgggcctgctgggcgctgcagcacctgctgacccgccgctacatcagcgccgagtccgacagcgacatctacgcctgggtgttggagtaccgcaaccagctgtcggtccggctgtccgaactcgacctgatcctgcgcgtggtggacgggacggatgtcgcgttcgtcgagcaggcccgctacgaatccgccaagggcatcaagcttctccggcgcgaaccgctgggcacctacgactccatcctggcgttgcaccttgcgcagatgatgcgcgccgctggcgggcagagcgtgctgatcagccgcgaggagatgcacggcctgttctccggggtgctcaacgacaccgaccgcgacgccgtcacgttcgcgggccgcatcgacgccgccatcgcccggctggccgggctcgacatcctgcgcaagagccgcgacgacgaggacagctacaccatcagcccggtgatcaccgccgtgatgacggccagtgtgatcaccgagttgcagcagcagttcgagctgctactcaacggaggggcaccggccgaggagaccgatcttgactga

SEQ ID NO: 41783 - DNA, 3363 bp, Mycobacterium vanbaalenii PYR-1
ttgactgagcaattccacctgtcgcggctccaggtcatcaactggggcgtgttcgacggctaccacgacatcccgttcagcgagggcggcgcactcatcgcgggcgcctcgggcagcggcaaatcctcactgctggacgcgatctcgctcggcttcctgccgttcaaccgacgcaacttcaacgcctccggcgacaacaccgcagcaggatccagcgcgggccgccgcaccgtcgacaagtacgtgcgcggcgcgtggggccagcgcagcgacggcggcaccagccgggtgatgtacctgcgcggcgacggcaccgcctggtcggcggtggccgtcacctacgccggcgactccggacgcaccgtgacgggcctggtgctcaagtggctgaccggtgaatcgcgcaacgactcgtcgagccgtttcgtactcggcgacggcgacctcgacatcgaggacgtctgcaaccgttgggctgcaggacgattcgacaccggcgtgttcaaggaagacggctggcggttcaccaccaaggtggagtcgcagtacctggcgcagctgtacgcgaccatcggcatccgcgcctcggatgcggcccaacagctgctcggcaaggctaaatcgctgaaaagcgttggtggactggaacaattcgtccgcgagttcatgctcgacgagcccgagagtctgacccggctgccggaggcgctcaagcagatcgacccgctggtggaggcgcgcgaactgctggcggtcgcgcagaagaagcgcaagatcctcggcgacatcgagaagatccagcagcgctacgcatccgagtccaccgatctcggcatcatcgacctggtcgacctgccgatggtgcgcgcctacaccgaccatgtccgggtggcgcagtgcccggcgcagatcgcgcagctcgacaccacgatcgatcagctcgacaatgagtacgaggacgtcacccgaagcctgaatctggccaaggccgaagcagattcgctcaacgcgcagatcagcgggtccagcgcgagcatcggtccgctgcagtcgcaggtgaccgccgccgagaccgaggccgagcaggtgtcgcgccggcgcggcgcgtacgaggacatgctcgccgcccagcagctcgacgtgccggagacggccgacgacttctggaacctgcgcgaagaactgctcgcccaggccaccgaactgctggccaaggtggagcgcaaccgtgaggcctccaccgacgccgagtacgcgcagaagtcggcgcggatggcccgcgacgaggccgccaaggaactcaaacgtgtcgagcacgtcggctcggcgctgccggagttcgcgctgaccatgcgggaacagatctgcaatgcggtcggtgtcgactccaccgacctgccgtatgtcgccgaactgatggatctcaaaccggaccagacccgctggcgcaccgcggtggagaaggtgctgcgcggtgtcggactgcggctgatggtgcccgatcagcactggacaaaggtgctgcagttcgtcaacgagacgaacatgcggggacggctgcagctgcaccatgtgcgggcgaagttcctcggcgccgagccggtcgatccggagccgaacacgttggcggccaagctgttcgcggtcgacccggcccacccgtgcgccgccgaggccgtcgacgtggtcaccgccgccggcgaccacgtctgcgtcgacacccccgaggtgttcgcccggttccgccgcgcggtcaccgacaccggcctgtacaaggattccgaccggctcgcgatcaaggacgaccgccgcccactcaagcagtccgagtacctgtatcagggtgacgtgtcggcgaagatcaacgcactgaccgtcgacctggccgcggccgaggaggcctatcagaaggcgcggcgcgtcgccgacgacatcgccgcgcagcgccagacctggcgggaccgggccgcggcgtgcaaggcgatctgcgagcagttcccgcagtggagccagatcgacaccgagaccgccgacgggcacgccgaccggctgcgcgagcagtacgagctgctgctggccgaccaccccgacatcgaggcgctcaacgcccgcgccgacgaatgctggtcgcagatccagaaattgatgacgcgccggggtgcgatccagacccgccgcgacgacctcgactcccgccgtacgcagctcctcgaacttcaggagcggctgcagccggcattcgtctcggagccgctaaccgacctgctgagccgctacgccaaccaggtgccggtgagcctggagctgctggacccggagccgcaccgcgatgcgttgttcaccgcgatcaagaaggaacgcgaacagctgcgcgagagccggcgccgctcctacgacgagctggcccgcatcctcaacacgttcgacacctcgttcccggacgcgatccctaacgactcggacaacttcgacgagcgggtgcacgactacgtcgcgctgtgccggcacatcgacgagcgggagctgcccgaggcctacgagcggatgatgcgtctggtcaccgagcaggcgccggatgcgatcctgacgctgcaccgggtggccgagcaggaaacccggcggatcagtgaccagatcgaccgtgtcaatacgggtttgggatcggtggagttcaaccgcggcacccggctgacgctgcgggccacgccgcgcagcctgacggcggtgtccgagttgaccgagatcgtgcgggccatctcgcggcgcatcgccgaggtcgggctcggcgacaagcaggcgatcctggatcagtacgccgacatcctgcggctgcgtaaccggctggcgtcgacggcgccggaggacaaggcgtggacccgcgacgcgctcgacgtgcgcaaccggttcacgttcgactgcgccgagtgggatgtcgccagcgaggagctgatccgcacgcactccaacgccggcgacaactccggcggcgagcaggagaagctgatggcgttctgcctggccggtgcgctgagcttcaacctggccagccccgacagcaccgacaaccggccggtgttcgcgcagctgatgctcgacgaggcgttctccaagtcggatccgcagttcgcgcagcaggcactgcaggcgttccgcaagttcgggttccagctggtgatcgtcgcgacggtgcagaacgcgacgacgatccagccctacatcgacagcgtggtgatggtgtccaagaccgaggcgacgggccgcaacgcacgtccggtggcgacggtggcgacgcgcacgatctccgaattcggcgagctgcgccgcgagatgcgggccggcgcgaaggtgcccgccccggcctga

SEQ ID NO: 41784 - DNA, 1443 bp, Mycobacterium sp. KMS; identical to SEQ ID NO: 41744

SEQ ID NO: 41785 - DNA, 699 bp, Mycobacterium sp. KMS; identical to SEQ ID NO: 41745

SEQ ID NO: 41786 - DNA, 3363 bp, Mycobacterium sp. KMS; identical to SEQ ID NO: 41746

SEQ ID NO: 41787 - DNA, 1239 bp, Halorhodospira halophila SL1
atggattaccaccacctcgacaccctgcgccgtcaccacccggcctggcggctgctcgctgccgatagcgcgccgctggtgctcggcttcctgcatcgtgccttcgtcgagcccaattgccgggcgcgcgcccagggggagctgaccaacgccctggaggactacctgcacggcctgcgcgaggagttgggcgaggcggtctatccacgctcggcggcggagtatctcaatgactgggcggcggacgaacggggctggctgcgcaagttctacccgccgaataccgacgagccgcacttcgatctgaccccggcgacggagacggcgctcggctggctcgacgagctccaggagcggcagttcgtgggggcggagtcgcggctgatgacggtcttcgatctgctccgtcaggtggtccagggggcggagaccgaccccgaggcgcggatcgaggccctggagcgccggcgtgccgagatcgacgccgagattgccgccatccgcgatgggcagctggcgctgctggacgagacgcagatcaaggagcgcttctaccaggtggagcgcacggcccgcgggctgctctccgacttccggcaggtggagcagaacttccgtgaactcgaccgccaggtgcgcgagcgcatcaccacctggggcggcagcaagggggcgctgctcggtgaggtcttcggggaggccgacgccatcgccgactcggaccagggcaagagcttccgggccttctgggggtttctcatgtcgccggcgcgtcaggaggagctcaccgatctgctcgagcgcgtcctggaactcgaaccggtccagaccctggggccggaccgccggctggcgcgcatccaccacgactggttggatgccggcgaggagacccagcgcaccgtctcgcggctgtcggcgcagctgcgcaagttcctcgatgaccaggcctggctggagaaccgccgcatcatggacctgatccagggggtggagcagcacgccctggccgtgcgcgatcacccgcctggaggatcggatcgcccagctcgaccggacctacggcgagcagcagggccagcgcgacgagctcaagcaggccatcgccgacaatggcggggatcgcctggagcggctcaaggcggagatcgcccgcaagagcgaggagaaggagcggcgcagcgccagtgcccgcacctacaacgagctggcccgcgccctggggctgccgctggctga

SEQ ID NO: 41788 - DNA, 1059 bp, Halorhodospira halophila SL1
atgcgcgacctgcgtgccgagcacgccggcctggaagaggagctggagtcgctgcgtcagcgccgctccaacatcccggcgcgcatgctggagctgcgccagcgcctgtgccaggagctgagcctcgatgaggaggccgtccccttcgccggtgagctcctccaggtccatgagcaggagacggactgggagggggccatcgagcggctgctccacaacttcggcctctcgctcctggtcccggaggcgcactaccgcgccgtggccggctgggtggatcgcagccacctgcgtggccggctggtctactaccgggtgcgcgagccgcgcagcagtgagccgcccgcgctgcaccccgagtccctggtgcgtaagatcgccatccgtcccgactcggcgttctacgcctggctggagcaggagctgggtcggcgcttcgactacgcctgcacccgggatctggagaccttccggcgcgaggatcgcgccatcaccccggccgggcagatcaaggcgggcggggatcgccacgagaaggacgaccgccaccgcatcgacgaccgctcccgcttcgtcctcggctggtccaacgaggcgaagatcgccgccctccaggaggacgacctgccccgcttcgaggcccggttcaaggagctgctcaacgagaacaccatccgcgagatcgccaacttcaacgcccagctcaacaaagagcgcgcgcagatccgcgagcgcatcgcaaccatcaacgcctcgctgttcgatatcgactacaactcggggcgctacatcgagctggtcgccgacaccaccaccgaccccgaggtccgcgacttccgcgagcagctccgggcctgcaccgaggatacggtgaccggctccgaggacgcccagtacaacgagcgcaagttcctccaggtcagggcgatcatcgagcgcttcgtcgccagtgtcggcttcgtccacggcgaaggcgggtgcttctcgctgctgcgccatctgagcatcgaggcgtaccacgccgaaaaggccatccggcgcgcggcaaccagcggatga

SEQ ID NO: 41789 - DNA, 1188 bp, Halorhodospira halophila SL1
atgagctggacgacccccgccgatctgcgccagcaggtgcagaagcgctgggatcggggcgaactgctcgctgcgcgggtgaccggtgccgcgctcttcccgctgagcctgcggctccgccgtccgggctcccgcgaactggccgaggacttcgagggcgttcggcagtgggtgcagcgcctcgccgccgccgaccgggcgcagcgcggttacggtttcgagatccagtggcgcaccgtccgtcaccgcgtccacggccgcaatgagctaccggccggcgccgttgtaccgaccgaggccgacgccctgcgcctgatcggccgccgccaggaggcagagcgtttcgacgccctctgccgacagggcctggcggcgttcccggagctggccgactggctggcccgccggccgctgaccgtgctggagcacgccgaggcgtgggatcggatcctcgcggtgctgcgctacttccgggaccatccgcgccccggcgtctacctccgccagctcgatatcccgggagtggatacgaagttcatcgaggcccggcgcaagctgctcatggagctgctcgatgcagtcctgccggccgaggccatccaggccgaggccaccggcgcccggcgtttcgccgaacgctacgggttgtgccaggagccgccgctggtgcgctttcgggtgctcgatccggcgtgcgccatcgccgggctcaccgatttgaccatccccgccgagcagttccaggcactggcgccggcggtggagacggtcttcatcaccgagaacaagaccaacggcctcgccttcccggcgcacccccgcgcgctggtggtgttcggtctcggctacggcctcgagcgcctggccgaggtgccctggctgcaccgcgtgcgtgtcgcctactggggggatatcgacacccacggcttcgccatcctcaaccggctgcgtcgggcgctgccgcaggccgagtcgctcctcatggaccgggccacgctggaagcgcaccgccccctgtggaccgcggagccgagcgagcaccgcttcctcggcgatctggcgcgtctgaccgaagccgaggctgcgctgttcgaggatctgcgccaggatcgcatcggcgagcgcgtccgccttgagcaggagcgcatcggttttcgctgggtcgtggagcgtacgcaggggctgtga

SEQ ID NO: 41790 - DNA, 1443 bp, Mycobacterium sp. JLS
atgcaggtggacgacaacagggggctgtcggcggctgagctgctcgaactcaaccgcgacctgcacggatcccgggcgatccggctgctggccacccacaacctcgggctctacgccacgctcatggaacgccatctggccgacggtgtcgtcgccgagaccgagctggtggtgcggctggagcgcgacctgcacgtactcgaccccgacggccagtccgggctggcgctgatcaagtcgtgggccagccagggctggttgcaccgcatcgtcgacgagcgcagcgaccagaacatctgctacctcacccaggacgcccgccgcgccctggacttcctgcgcgggatgcgccgccaggacaccatcgccaccggcggctcgatcaacggcatcgcctcgcgcctcaaacaggtcgcgatccgcgtcggcaacgaccccgcccgcatccgcaagagcatcgaggccgagatcgcggcgctgcaggccgaactcgacgacctcgaggccggcacccgcccggagccggatgtcaccgacgcctacgacgaggcccgcgcgatcgccctgcagatggaacggctcatcaccgacatcggccaatacggttcgatgatcgaacaggccaccgccgcgctcgacgagccgatcgacagcaacgccgagtaccgcgaccggcaacgccagatgtacgccgactaccaggccgcgtgggactcgcagggccgcgacagccaccgcgcattcctccggatgatcaacgaccccgaccagcgcgccgagttcgaggccgatgtcgccgcggtcgccgaggcgctgcccctgctcgacccggcgctgcgcaaggtgatggccgggttcttcgaactcgtcggccaccagatcgacgaggtcgaacgcatccagcagcgctgcgcccagcgggtcaagcggttcaccgcgttcggcacgctcgagcagagccgcggggtggcccgtcagctcaacgaggccatcggcgccgcccgcgccctgctgaagacctcgctcacggactcgaggctcggcatcgacgtgccgctggcccgccacgcgatcagctccgtcggcgcgctgagtttcaagatcggcgacctgtcggcgcccaaacccgccaaacccgctgggggcgaagtggatctggcgagcttcgcggcgctgaccacacaggtcgacgcgcccgcgatgtcggacatgctcaacgccgcgctcccggtctccctctcccgcgccgtcgacatgctggacaacgcgtacctgggccacgtcatcgtgctgtggtcctgggcgctcaagcaaccgaacgacgggcggccggcgtcgaccaccgtccggttccgctccctcgacggccgtgaccgcgaaatcgccgtgcccgacctgatgttcaccgaaccgatcaccaccctcgctggagtttcgcagtga

SEQ ID NO: 41791 - DNA, 699 bp, Mycobacterium sp. JLS
gtgacctctccgtccaccgaacatgacgcggacctcgccgcgttctcagagctcccccaggtcgaccagaacgcccgtcccccgcaccagcgcaggccgcgcttcgacggcgacgtctccgaactccccgaccgcgcctgctgggcgctgcagaacctgctcacccgccgctacatcagcgccgagaccgacagcgacctgttcagctgggtgctcgaataccgcagacaactcagcgtgcggctctccgaactcgacctgatccttcgcatcgtcgacggaaccgatgtggcgttcgtcgaacaggcccgctacgaatcggcaaggggcgccaagcttctgcgccgcgaaccgctgggcacctacgactcgatcctggcgttgcacctggcgcagatgatgcgggccgcgggcgggcagagcgtgctcatcagccgcgaggagatgcacgggttgttctccggtgtgctcaacgacaccgaccgcgacgcggtcacgttcaccgcgcgcatcgacggcgcgatcgcgcggctggccgggctggagatcctgcgccgcagccgcgacgacgatgacagctacaccatcagcccggtgatcaacgccgtcatgacggcctcggtgatcaccgaactgcagcagcagttcgaacagctgctgggcggcggcacgccggccgaggaggtccacgttgactga

SEQ ID NO: 41792 - DNA, 3357 bp, Mycobacterium sp. JLS
ttgactgaacagttccacctgtcgcggctgcaggtcatcaactggggcgtgttcgacggctaccactcgatcccgttcagcgcgggcggcgccctgatcgccggcgcctccggcagcggcaaatcgtctctgctggacgcgatctcgctcggcttcctgccgttcaaccgccgcaacttcaacgcctccggtgacaacaccgcggccgggtcgagcgcgggacggcgcaccgtggacaagtacgtgcgcggcgcgtggggccagcgcagcgacggcggtaccagccgggtgatgtacctgcgcggcgacggcaccgcctggtcggcggtcgcggtcacctacgccggcgactccgggcgcaccgtgaccggtctggtgctcaagtggctgaccggcgagtcccggtcggattcgtcgagccggttcgtactcggcgacggcgacctcgacatcgaggacgtgtgcaaccgttgggccgcgggacgtttcgacaccggtgtgttcaaagtagacggctggcggttcaccacgaaggtcgagtcgcagtacctggcgcagctgtacgcgacgatcggtatccgcgcctccgacgccgcccagcagctgctcggcaaggcgaagtcactgaaaagcgtcggcgggctggaacagttcgtccgcgagttcatgctcgacgaacccgacagcctggcgcggctgcccgaggcgctcaagcagatcgacccgctggtggaggcccgcgaactgctcgcggtcgcccagcgcaaacgcaagatcctcggcgacatcgagaagatccagcagcgctacgcctcggagtcctcggatctgggcatcatcgacctggtcgacctgccgatggtgcgggcctacaccgaccacgtccggctggcgcagtgcccggcgcagatcgcccagctcgacaccacgatcgaccaactcgacaacgagtacgaggacgtcacccgttcgctgaatctggccaaggccgaggcggattcactcaacgcgcagatctccgggaacagcgccagcatcggaccgctgcagtcgcaggtgaccgccgccgagaccgaggccgagcaggtgtcacgccggcgcagcgcctacgaggacatggtgaccgcacagggcctcgacgtcccggacaccgccgacgagttctggaacctgcgcgaggagctgctcaccgaggccaccgaactgctcgccaaggtcgagcgcaaccgcgaggcgtccaccgacgcggagtacgcgcagaaggcggcgcgcatcgcccgtgacgatgcggccaaggaactcaagcgcgtcgagcacgtggggtcggcgctgccggagttcgcgctgctgatgcgcgaccagatctgcgcggcgatcggtgtcgacgcgggtgagttgccgtacgtcgccgagctgatggacctgcggccggatcagacgcgctggcggatcgcggtcgagaaggtgctgcgcggggcgggcctgcggctgctggtgcccgaccagcactggaccaaggtgctgaagttcgtcaacgagacgaacatgcgcggccggctcgcgctgcaccacgtgcgggccagactctacggcgccgaaccggtggaacccgaaccgaacacgttggcgggcagtctgttcgccgtcgacccgagccatccgtgcgccgccgaggccgtcgatgtcgtcacgggcgccggtgaccacgtgtgcgtcgacacccccgagctgttcgcgcggttccgccgggcggtcaccgacaccggcctgtacaaggactccgaccggttggcgatcaaggacgaccgccgcccgctgaagcagtccgagtacctgtaccagggtgacgtgtcggcgaagatcaacgccttgaccgtcgacctggccgccgccgaggaggcctaccagaaggcccgccgggtcgccgacgagatcgccgcgcagcgtcagcagtggcgcgaccgggcggcggcgtgcaaggcgatctgcgagcagttcccgcagtggagccagatcgacgtcgagaccgccgacggccacgccgaccggctgcgagaacagtacgagctgctgctcgccgaccatcccgacatcgaggcgctcaacgcgcgcgccgacgaatgctggtcgcagatccaggtgttgatgacgcggcggggtgcgatccagacccgtcgcgacgatctggactcccgtcgcacccaactgttggagctgcaggaacgtctgcagcctgcgttcgtgtcggagccgttgaccgagctgctgcaccgctacgccggacaggtgccggtgacgctcgagctgctcggcccggaaccgcaccgcgatgcgctgttcgccgcgatcaagaaggagcgcgagcagctgcgcgagagccggcgtcgctcgtatgacgaactggcccgcatcctcaacacgttcgacaccgcgttcccggacgcaatcccgaacgacagcaccaacttcgacgagcgggtgcacgactacgtggcgctgtgccggcacatcgacgaacgtgagttgcccgaggcctacgagcggatgatgcggttggtgaccgagcaggcgccggatgcgatcctgacgctgcaccgggtcgccgagcaggaggcgcggcgcatcgccgagcagatcgaacgggtcaacaccggcctgggtgcggtggagttcaaccgcggcacccgattgacgctgcgggccacaccgcgccagttgacggcggtgtcggagctgacggagatcgtgcggtcgatctcgcggcgcatcgccgaggtcggcctgggcgacaagcaggcgatcctcgaccagtacgccgacatcctccggttgcgcaaccggttggcgtcgacggcgccggaggacaaggcttggacgcgcgatgcgctcgatgtgcgcaacaggttcaccttcgactgcgcggaatgggatgtggccaccgaggagttgatccgcacgcattccaacgccggcgacaactccggaggcgagcaggagaagctgatggcgttctgcctggcgggcgcgctgagcttcaacctggccagccccgacagtaccgacaacaggccggttttcgcgcagctgatgctcgacgaggcgttctccaaatccgatccgcagttcgcccagcaggcgctgtcggcgttccgcaagttcggcttccagctggtgatcgtggcgacagtgcagaacgcgacgacaattcagccctacatcgacagcgtggtcatggtgtcgaagacggaggcgacgggccgcaacgcccgccccgtggccacggtggcgacgcggacgatctcggagttcggcgagctgcgccgggagatgcgggcgaacgccaaagccggggtctga

SEQ ID NO: 41793 - DNA, 1272 bp, Desulfotomaculum reducens MI-1
gtggctggactaatagccaacctggaaaatcaaatgatggacctgcaggaagaagagggggtactggcctttgaagacaacctttcgggcagggcccattttttgattagaaagttcctggaaacgggttggctggaaagggagcaggacagccaaagttttaccgaacaatttgtggtgcctatgtacgccagtaagcttcttaatcttttctatgatttggtcagcggaaaaaccacggaatacaacggttttgtttattctacctattctatcctgaagacagcggatgcagagcgggatgattatatgtttgacggactgcgccaggcccatcagcttacggagaatctggacaatgctttgcgggagttgttggccaacttaaggttttaccatcagaggctgcaggaacaggtagaggtaaaagaaattttggcggaacactttgatgtttttcggcagaaaatctccgataaaatttatcatcctctgaagaccttcgacagtgtgccacgctttaaaaatcggattcttagaatccttaagaattggcttactgagcctgagttgatagaagatatggctgttgtgggtcataaaaggggctttggcctggacccagaggcttgccgtcaaagggtaatcgttatgatcggggaaataattgatacctatgagggcatagatcagttgttaaagtccatagataagaaaaacacggcgtacaccagggcctctgtggagcggatgcagtactacataaacacggaacgggatattaaaggcaaactggtggagattatgaaacgactgcctaagatgaacgacagaaagagagaggaagaaatcggacttttgagtagggacttgccccttttccagcaagtttatgttgatgaagagtcgttgttcactgagccccgcaagcgcaaggaacactgcccgcgaaccaccaatctggccagtttaattaacaaagaagagctagattcagaaatgcaggaatttaaaaagcgtctggaaaaggtctattcccatcataaggtgctggaatatatcacggaacaactggcccggcagggtgtcttaagggccaaagatttgcggttggagaccgatgatgactttatcaaactgattctggcttgtattaaaaatgatgaagccgatatcccctttaccattgattttaaagatgattacctcttagtaaacggttatcggataccggagctgttaattgctaagaagaaggagaagatatcctga

SEQ ID NO: 41794 - DNA, 633 bp, Desulfotomaculum reducens MI-1
atgtgggcagaagcatgggaaaagctaacggacagggataaagaggagtttgtgcgggtaattaaccttttgttaagcaagacctttatcctgagggatgagtatgaacctaagacaaaaagcttggtcatcaacaaagactttcggtttgtggagagacaccattctctaatccaagagtatttaggaattgccggctggtatgtgcaaaatgatgcctacaggggagttattgccgcttataaccgatttggcaccaatcgttatcgtttagacaagcccagtacttattttttatatacattaaggcttatctatgaagagagtagggaaaagatagccctggccaagcaatgcacgaccactgtgggggaaatggtggaaaaaatgttttacttgggcctggtggaaaaaaagccgccggacactcatcttagggaaggtttaaacaccctaaaacgctttaacattatagaaaaggtggaaggtgattgggccaaagccgatactaggatcgtagtgtatccctcaattgagctaattgtttcaaacgaaaagatcagcaacctatatgaccagttgacggaagagggtgaagatgatgaaactactgaccaggatattattaattaa

SEQ ID NO: 41795 - DNA, 3330 bp, Desulfotomaculum reducens MI-1
atgaaactactgaccaggatattattaattaattggcactatataaagtaccagtgcattgatttttcggatattaactttttaactgggaagaacggttcaggaaagtcgactattatcgatgccttacaattagtgttgctgggtgataccagtggtttttactttaacaaagcggccaatgacaagtcccagcgctcgctaaagggatatttgcggggagaagttgccgaagatgaagaaaccaatacggtttatttgagaaatgatgatttttccagctacctggtcttagagtttcatgataaaaagagtaaccagtatttttgcctgggagttgtttttgattgttatgacgatggcagccatgaccaccagttcttttatttgaatgataaattaccggctaatcactttattgagaaaggcacagaattaaatcgaaaggggctcaaagccttctttttcaataactattctagaggcaagtaccaattttttgaaaccaatagtaagtatcaggaagtggccctggggaaactgggccagattaataaaaagtttttccgcctgttaaaaaaagccgtacctttttcgccaattatggacatcaaagggtttatcagtgagttcgtttgtgatgtggaaaacaaaatcgacataacagacatgcaggaaaacattcgctattataaacaattggaacatgacctggagatagtcaagcggaaaattggcattttaaaggaaatagaaagtcaacacaaattctattgcgaagaacttcagcgactggaaacccaaaaatatttaattgaccgaggaatacaggaacaactgcaaaacagagttgctaaaattgcgcaagatattcatcgattacgggaaaaaattgctgccaatgaaggaagcctgcgggagaaagaagaggaactcacttccctgcaggaagagagggatcacctttttgcggaaaaaattaattccgatgtgtacagaaaaagggaagagttgggacgccaaattgaagacctgcaaagggaaagcaaggctattgaacatagtaaaggtattttgctggggctaatcaaaggcgtcttatatacctggcgggaagtttatcagtggtgtcgggaaaatttagcggagatgcccctgctggaagaaccactggactatttggccaatatctctgagggcaagctggaattaataacccgggaaaaattatggtttgttaaacaagcactgcaggaatatgtaaacaaaatcaatgatgcctattctacgcataggaccgagttagatggtttaatgcagtatttaggcaggttggaagaggaaatcaaaaaccttcggcagggtataaaggcctttcccccggccatactggaactgaaaaatttgattgccgaaaaactaagtgccaagcaccaaagagacattaagccacagatttttgccgatttgctggagattaaaagtgatcaatggcgcaatgccattgaagggtatttgaatacccagaagttttatttaattgttgaacccaagtattttattgaagccttaaagatatatgatgaatttaaatttactcacaaaatatatgatgtgggtattgtggatatcgagaaaatcatagccaggcaccccagaccgcagcccaacagccttgcggaagaggttgaaagcacaaacccctatgccaggtcttacgccgacttcctgctgggtcatgttataaaatgcgaaaaagtggagcaactgcgggatttccggacttccattacccccagttgtatgctttatcacaattatgtggcgcgtcaaattaaccctcaaaggtacgaaaccccgtatatcgggcaaagggctgttatcaatcagcttaggcttaaggaagcaaaatatactgaagtatcagagcaaagggatgctttgggaccaaaggtggctaaactggcccagcttaggaacagcagtgttattaatgatgaaaatataagtagtattttgcaaaataaacaagccgtggacaggctgccacaggtcacccatgcgttagataaggccacccggcagttggctgccctggacttgagttacctgaccagggtagaaaaattattaaaggaagcggagaacaatattggtgtcgtaaacaaacaaataagggaattagaaaagtccaagggtaaatattacagtgaaagggacgaaaaagaaaaagccctgcctctgctggagaaggacatagcagcacaaaaagaggatatcaaaagcaggtatgaggccccctgggtggaagcagtaggggaacctaggttccggcaggaactgagccagcgaaaggaccctgagaacattgttaatacctttactacaactgttaaagggacccaaagccgcatagaaaataaatggaaagctatgctagagagcaggattatttacaaccgcgattataacggtgccttagatgtaaatgcccagggtaatgctgcttatgcccaggaattgagggtcctggaagatacctcgctggttcagtatgaggaaaaaataaaggatgcccaggaaaaagcccaggagcagtttaaggaagatttcatcagtaaactgaagaaaaacattgaggatgcacgggagcaaattgatgatttgaataaagccctaaaagatataccctttggtcgggataagtacaggttcactgtaacccctaaccctcattataaaaagtactacgaaatgattaccgatgatatgttgctggaagggttgacccttttttccgcatcttttcagagcagatatcaggatgtggtggaggagcttttccgccagattattgatgtggatgaaggcctggtaagcgccgatcggcgggaagaattgaataagaacttggataagtttaccgattatcggacttacctggactttgatctggcagtgaccgacgacagggggatggagtcaagattatccagggtaatagccaaaaaatcagggggagagacccagacccccttctatatttctgtattggcatcctttgttcagttataccggattaaaagcaggaaccaggataacactgtgcggattttggtctttgacgaagcctatagtaagatggaccatcagcggattaaagaaagtattaacctgatccggaagctagggctgcaggttattctctctgcgcccacagaaaaaatcggtgacatcgcccccttagtggataggaacctgtgtgtcaccaggataaaaaatgagacagttataaaatcctttgaccccagggaagtagagggggcttag

SEQ ID NO: 41796 - DNA, 1239 bp, Desulfotomaculum reducens MI-1
atggaatttcgggaacatatattaaataccttactggataaatatgaaaaaagcctacattatcagggcaaagctaaagttaacagaaagatagccttatcctttaatgccaagaacttcccttggtactggaaaagtgaggcgccccacctgaagaaagcaattcaccaggttgtggaggatttggccgggcaaggtattgtagcttataaatggttgccctttgaaaagggaaatttgctagattccgtctggcttaacctggagcaggtcgatacagcctatcgtgttattggacggcaaccgagaaaagacaaaataaaggaagtagttggggaattagaaaaccttttgccccaaattactcaggagtgggtaaagaatttccttattgattgcttaaaagaaatgcaggataaaaaagacttcccgttgctcttgccggcggaaaaagaagaaagggaattattattgaaaagtttcctggggctggaagataaaagggataccgttcttttggagcgggttttcagtttaaaatacctgggacatagtaaggtttttcaaaggaaagtaaaaggacgtttaacacgcattgctgttcagtacctgctgaacaactcagagctgctagaggacgaggtcattcaggaactgggcatcgaaaaaaactctgaggaagtattggtctgcggtgcaataactttactttataaagataaaaaaatagattatgccaattctcccttcggtggtgtagttgatacaaaatatttttccaaaatgaaaataggctctgtgaaggctgcaaaggtaattactattgaaaacaaggccaatttccactacctggtaaacaatgggatggttgatagcacccttttaatatacctgggggggtttcctggtccccaaaagagagatttcttggtcaatctttaccaattaaagccgaatgtttctttttatcattggggcgatattgacttgggcgggtttagaatatttgagaccttaagaaaagtaattccaacaataaagcctctttttatggatgagagtacactattaaagtataagggttactgtgatgagctagaaaataactatgcaaggcagttggaaaagctgttggataaagtggaatataaaaccttttggcccgtaatcaaagtcatgttaaaagataaaattcgtttggaacaggaagctcttttggtatcggaagttgatatgtaa

SEQ ID NO: 41797 - DNA, 1512 bp, Rhodospirillum centenum SW
gtgagcctcttcggggaacttcacgaagatgccttcctactgttcagtcgtgcgaacaggcatctctacgcgcagcttgttaccgacctgttcgagcgattcttcagcgacacggtgacctttcccaatcgcctggaagtagttggttatatttacgatctgctgcgcaatcagcccgaactctgggccgacgacggggaggattggtccggggttgccgatgtgagaaccacagggcgccggatccgacgcgcccgtcccgaggacaggcggcaggacctcctcctcgactgcgcctatcgggcttacggccgcctcatcgatacgggatggctggaagaggagagttacggcctgaagatcacggtcgacatgccgcctgcggcgatgcttttggccgagcggctggcggcgatccagagaggactggcaacctcgttccgtggcgtggttgtcaccattcgaaatgcgcttgccgcagtagtcaatgtcgatggccgcgtcaatgccgtcggcctgaacaaggcggctgagatggcagtccgcttttcccgtgaactgcgggcggtgttgtcaagtctgcgctcgattgagcgggacattctcgcgtcggaaagcctgaacgagcgccttgccacgttcgtgcaggattttattggtaagctcgtgctcaaggacttcgagtccatctacaagacaaaccatccctaccggttcaagcatgagatcctcggctacgtcgacgccatcagcgacgagggatacctgcgtgaccagatcatcgatggctatgtcgaaggtgaggtttcgcttacgcgaagcgaagcggggttgcagctcgatcaggacctcttcaccatccgcaatgtctttgacaacgtcgaccagacctacgaccggatcaacgtctaccgggtacggctggaaggacggctgcgcaatgtcttgaaatacgctgagctgggtgaccatcgccattcccagcgggtcaccggactgacagcacggctcgaccgggtcctgaccggactcggcgaggtcggcatgatgggatggcttgatgaccggcagcccagagggttcgtcctgccggaggtgactccctgggctccgcacttgctggcccagccgcgggctcccaaaccaccggtcgaggcgaccgccgtgcggcggcagcaatttgatcccgtccttgccgccttccgccgcctgcttcgtgactacaatgatctgtttgtggtggagacggcccgtgtattgcgctttctggactgccgggtgcctccaggctgtaccggcgaagcccgatggctgtccatcaatggcgttgaagatttcctcgttttcgaacagctgcgccgcctccgctataagccgtcgtcggagttcgcgcagcattacgaaatcctgccatgccccgagggggcttggcgggatgacgaatggattcgctgcaagaatttcctgatccgcactaagatcgccggtacagctatcgacaacgatgcgtaa

SEQ ID NO: 41798 - DNA, 675 bp, Rhodospirillum centenum SW
atgctgaaggatttggtcgacatagaagtgcgtttcggcgaccgggtcgtggacgacgtccggcaggtcgccaaccaactcctccagcgtcagttcctgttcgccggcgaccgcggcaccacccacgcctatgaaattgtgacaggcccgcgcttccggagctatttcacagcgctgttcgatgcgttgggctatcagttgcggatcagcgaaactgaacagtgggtcggcctgctacccgatcccgagctggaccttttcccgaaaatgcggatggacaagaccatcgtgctgctgatcctggcgctcgcttggcaggatgcggcaaaccgcggcgccgcggaggcccgcgcggtggtgaagaccacgctcaatgaggtgctcgaacgctaccgcgacatcgcaggtcgtaaccgtaaggaggccctgatctcggcgcgcttcgaggatgctctacgcgaattccaccggcgcggccttgtctggctcggcgactgggatccggaagcggccgaccgcgaaatcgagattcgcccgatgctgcatctgctggtgggcggaaacgcgctcgatctcctcgaacgcttcgccgcggaagcggagagcgcgattacacgggagcggaggaccagatcgccgcaggacgacggtgaacaggaaggaacggaagagtga

SEQ ID NO: 41799 - DNA, 3450 bp, Rhodospirillum centenum SW
gtgaagcacctcatccgcatcggcatgatcaactggcatctgctgcccgcgaccgacatagacgtgagcggcgacatcggcgtgatcggcgaaaaccgcagcggcaagtcgaccctccttgatctcatccaggtggtcgtcacgggcaataacgggcgctatctgcgtctcaacgcgagcgcaaccgacggcaaccgcaagcgcagcctccgctccgtccaagcctactgtctcggccgacttagccctgaccaggtaatgcgctcacaggcgcttacatacatctatctggtgttccaggacactgggctgcctcatcacgtgacctcgatcggactcgcgctggaagcgagccagaacgaggctgccgaacggccaccggtacagttcatcgccgacgggatcagcctgagccatacccatttcctggaactgtccgctgacggtgccgaacagccgcgcgactgggccgtggtgcgcccgcacctggagcgcctgtgcagcgaggcgggcggtactctgttgacctatcgcaacgagccgggcaaatacgtgcaggactacatgaagatcctgtcgaccggcggccgcttcatcaacaccgatcagttcctgaaggcgtttgtcaacgcgatttccttcgaacagatcccctcggctacagacttcgtgcgccgctaccttctcgaagattccccgatccgcattggtcaactacgcgagtccatcgccacctaccactccttccgcaaacaggtcgaggaggcgcggaccaagctggctcggctgcacgctttgcgcagcgccatttcgacgttcaaggacgacctccttgcccaggatcgtgagcagtggatcgccgcgcgggctcagttggaccatgcctttgtcgagaaccgcacgctacgtcgtcggcgcgatcagaacctggccgatcaagcggaggccaagcgggcgagaacgcagctggaggcgctgcgcgaggagctcgggaacgagcttgggacggtgcgcgacgctattgctgcacagagcggcagtgcccagcggcgccagctcgaaagcgaacgggcgcttgcagaaacccggttgaaggagacagtcgggcagttggagaccatccaaaaggcggtcaaccagggggcccatgccctgaaattccgtatgcttctgccaaccatgcccggggagcccttcgtggtcgtggagcggatgcgccaagctggcgggccggcgcgggtgcccgtctggccgaacgatcctcaggctctggccaccgccctcgacgacccccgtctccgcctccctccgttgatcgatgcctgcgaaagggcggccaacgaggaaaccaaggctcagggcctcaaggaacaggaactgcgggaagtggtccggcagatcaaggatatcgaggcgaccggcatcgctatcgacagcaccgttgagagactggtggccgagatggagggcttcggctggcgaccgcgcatcgtctgcacccttctgcgtgtgatggacgaccgttggcgcgatgctgtggaagccctgctgggacgcgaccgcgaggctgtcatcgtcgcggacgcccacgtcgaggatgcgatccgttaccttcagcacaaccgtgtccgcctgcgaggctgccgcgtggtgaacagccgcaagctgtcgccggcggaggggcggccggaaccaggaaccttggcgggcgtgctcgcctcggacgatccactggcgatggcgttcgtcgttcgtcgcatcggcggggtcaggctcgcctactcggtcgaggatctgcaccgccccggccgggccgtgatgcaggacggcacctacgacgatggtctggttgtcgagatgcgcgcggttgccggaggctacaagatcggcgcgggtgctggccgtatcgggctgtcagccctggaacgccggcggaatgcgatcaaagaggagttggaggaactggaaggccgcgcaaaggacctgcgcaccgcggccggctgtcttacggtgctgtcggcggcggtcggcaggggcacggacctgatcgccgcattggaccgttacacttggttgaaggaaaagctcgacacgcttgccgaggacatccgcgcgctggagcggaacatcaatcccgaattcaaggcgcgcatggtggagatcgatcagcagatccgcctgtacaccaagggtatcgaggacgccgtccgcgccgaggagcgggctacgcagagcatcagcacggccagtatgacgcttggcggtggtgaaaatgctgtgggttctgagttgagcgtccagtttgcccgccagaagttccaggcagtgcgccaccggatcgatcggccggcgtcgcgcgccgcctatcgcgcggccgtggcggcgcagaagggaaacctcacccggaccgcggatctcgcccgccgcaacgccgaggccgcagcccagcggatccaatcggtaagaattggcatctttgatggctatctggccttcaatatggagttcgggctgaagaacgagttcacccgggagcaggcccaggtcctccgcgacattgccccctgggtcgaacagggtatcgcgcgcatcgaagggatcgatctggtgcgccatcaggcggaagcggaggctgcggcggaccgttctcgtaacttcttccaacactcctttgcctatgagttgcgacgccggttcgacgcccttcactccgctctggaggacatgaaccggacgttgcgcgcgcacgacttccactacgaggtctaccgcttcgttgcccatcctgtggagccctatcaggcgatcatcaggctggtagaagcctctcgggttgacgattccgtgtttgcgctgctgttcgacagtcaggccgatgacacgcacccgcatgccatcgcgctgaaaatggtgcaggagctgctgttggatgagaagcgagatgtggcggatttcgaggactatcgccactattacagcttcaatctcatcatgaaggacatcaagacgaaccgcgaagtggatctggaaacccggcggggtaccggatccggcgccgagcagcaggtgcctttctatatcgccatcggcaccgcccttgccgctgcgtaccatggtaaggcggcaggtgacgtggcaaaggagaaggggatcggccttgccgtgttcgacgaagccttctccaaactcgatggcaggaaccagaaagcctgcatggattattacgagaatctgggattgcaggtcatcgtggctgcgccgttcgagaagcgggcaacgctctacgagaccctggagtatttcgtcgaaaccttccgcaacggggacctgatccacgtggattggtatggggtgggcgaacgcacccggcaggatcttgccgaggcgaacccggctaacctcggcctcgacgggttccggcggatgatggccgctcaggcggagacgtga

SEQ ID NO: 41800 - DNA, 1134 bp, Rhodospirillum centenum SW
gtggcgaagcggttccgcgatgcggtcggcgccctggagcatatgctgtcgaccatagagcgggagccggggcgcaccgtcgtccgtgtttatccagattatgaaggcatgcgcaccggcgaggaactggagcgcttcgaacgcgtgatgacggcggcggggaaggccggcgccgtgcacatcgcccttgaacgacggccgagcggccccgcttcgatccgctctgtggcacttgccgacgcaacgaaacttgcggctcatctcggccgcgtgcctgcaacggacgaagccgctcgggcgatcgacgttctccgccgcctcaccggccctctgcccgcctgggtcggtgagatcgtggatgaaatcgccgccgcatgggccattcgacgcgaggggtatccgggattggagcccggtgatgtggcaacggcggccggtttcattcggctcctgtgtgcggtggatcgcggggagcatgtcggagtggacatgcgtaccttctcccgacgcgcctgcggcgacagcaaggcggccgagctgggcttgccacgtctggcacgcgctctgcgcaagcgctttgatcttcccgacgctcctccgcgcgaagctctcgcagcgttcggcatcgagaagttcccccagccggtcctgctgcgcgggtcgctgacgctgtccggcgacacgcggctggacggacggccctatgtcggagtgcctccggaatggctggacactttggtgattgtcggccggccagggtatttcctggttatcgagaacctcgcgtccttcaaccgttacgtccgggaggtggatgatggcggcatcatcttgtattccggcggcttccctgcgcttgcaacgctgaaggccatccgtcgtatggatgcgctcctgcccgccgatgtgccgttcttccattggggagatgtcgatgcggacggcgtgcggattcttcagtacatcgcacggtccatcagtcgcccgttgcgccctcacctgatgggggtcgatgcgtggagcgacacggccgtttccgagctttgctcgcagcttggcgagcctgccttcctgccgatggagcaggagcaactggatccggaaagtcctttggccatcacttccgcatcgtag

SEQ ID NO: 41801 - DNA, 1491 bp, Mycobacterium gilvum PYR-GCK
atgttggggcctccggcgaccgcacggacacgacgacacacagaacaggagccggtggacgacaacgcgacactgtcggccgccgacctgctcgagcgcaaccgtgagctgcagagttcccgtgcgatccgactgctggccgccaccaacctgagcctctacgcgacgctgatggaacgccactgcgccgacggcgtggtccccgagaccgagctggtggtgcgcctcgagcgcgacctcgacgacctcggcgatccgcagtccggcctcgcgctgatcaagtcgtgggccgcccagggctggctgcaccgcatcgtcgacccccgcagcgatcagaacgtctgctatctgacgcaggacgcgcgccgagcgctggacttcctgcgagggatgcgccgccaggacaccctcgccacgggtggttccatcaacggcatcgcgtcgcggctcaagcaggtcgcgatccgcgtcggcaacgaccccgcgcgcatccgcaagagcatcgaagccgagatcgccgcactgcacgaggagctcgacgagctcgacaacggggcgcggccggagcccgatgtgaccgacgcctacgacgaggcgcgggcgatcgcgatgcagatggaacgcctcatcaccgacatcggccagtacggctcgatgatcgagcaggccaccgcggcgctcgacgagccgatcgacagcaatgtcgcctaccgcgaccggcagcgccagatgtacgccgactaccaggccgcctgggattcgcagggccgcgacagccaccgcgcgttcctgcggatgatcaacgaccccgaccagcgcgccgagttcgagtccgacgtggccgcggtcgccgatgcgctgcccgcgctggacccggcgctgcgcaaggtgatggccgggttcttcgagctcgtcggccatcagatcgacgaggtcgagcgcatccagcagcggtgcgcgcagcgggtcaaacggttcaccgcgttcggcacgctggagcagagccgcggtgtggcgcgtcagctcaacgaggccatcggcgcagcccgcaacctgctgaagtccagcctcatcgactcacgcctggacctcgaactcccgctggcccgccatgcgatcagctccgtcggcgcgctgagcttcaagatcggcgacctgtccaacccgaagccggcgaaacccgccgagggcgacgtcgacctcgccagcttcgcggcactgaccacccaggtcgatgcgcccgcgatgtcggacatgctcaactccgcggtcgcgcgcggggcggtgtccctgcccgaggcggtggcgatggtcgataacgcctacctcggtcacgtgatcgtgctgtggtcgtgggcgctcaaacaacccaacgaggcatcgcccgggtcggcgaccgtccggttccgctcgctcgacggcaaggatcgcgaaatggccgttccccgtttgatgttcaccgaaccgatcagtgtcggagttgcgcagtga

SEQ ID NO: 41802 - DNA, 690 bp, Mycobacterium gilvum PYR-GCK
gtgaccaccgaatccgaagccgatttcgcggcgttctccgcgctgcccgaggtcgaccagaccgcccgaccgccgcaccagcggcggccgcgtttcgacggcgacgtctccgagctacccgatcgggcctgctgggccttgcaacatctgctgacgcgccgctacatcagcgccgagtccgacgccgacatctacgcgtgggtgctggagtaccgcagtcagctctcgacgcggctgtcggagctggacctgatcctgcgggtggtggacggaaccgacgtcgcgttcgtcgagcaggcccgctacgaatccgccaagggcatcaagcttttgcgccgcgagccgctgggcacctacgactcgatccttgcgctgcacctggcgcagatgatgcgcgccgcgggcgggcagagcgtgttgatcagccgcgaggagatgcacgggctgttctccggcgtgctcaacgacaccgaccgcgacgcggtcacgttcgcgggccgcatcgatgccgcgatcgcgcgtctcgcgggtctggagatcctgcgcaagagccgcgacgacgaggacagctacaccatttcccccgtgatcacggcagtgatgacggccagcgtgatcagcgaattgcagcagcagttcgaactgttgatcaacggcgcgaccgcggaagcagagacccaccttgactga

SEQ ID NO: 41803 - DNA, 3381 bp, Mycobacterium gilvum PYR-GCK
ttgactgagcaattccacctgtcccggctgcaggtcatcaactggggtgtcttcgacggctatcacgacatcccgttcagtgaaggcggcgcgctgatcgccggcgcctccggtagcggcaaatcgtctctgctggatgcgatctcgctgggcttcctgccgttcaaccggcgcaacttcaacgcctcgggcgacaacaccgccgcggggtccagcgcgggccggcgcaccgtcgacaagtacgtgcgcggtgcgtggggccagcgcagcgacggcggcacgagccgggtgatgtacctgcgcggtgacggaaccgcctggtcggcagtggcggtcacctactccagcgactccgggcgcaccgtgacgggcctggtgctgaagtggctgacgggcgaatcgcgcaacgactcgtcgagccgcttcgtgctcggcgacggtgacctcgacatcgaggacatctgcaaccgttgggcggcaggacgtttcgacaccggtgtgttcaaggaaggccagggcgagcgaagcgacggttggcggttcaccaccaaggtcgagtcgcagtatctggcccagctgtacgcgaccatcgggatccgcgcatcggatgccgcccaacagctgctcggcaaggcgaagtcactgaaaagtgttggcgggctggaacagttcgtccgggagttcatgctcgacgagcccgagagcctgacccggctgccggaggcactcaagcagatcgacccgctggtggaggcccgcgagttgctcgcggtcgcgcagaagaagcgcaagatcctcggcgacatcgagaagatccagcagcgctatgcctcggagtccaccgatctgggcatcatcgacctggtggacctgccgatggtgcgggcctacaccgatcacgtccggctggcgcagtgcccggcccatgtcagccagctcgacaccaccatcgatcagctcgacaacgagcacgaggacatcacgcggagcctgaatctggccaaggcggaagcagattcactcaacgcgcagatcagcggctcgagtgcgagcatcggtccgctgcagtcgcaggtgaccgccgccgagaccgaggccgagcaggtgtcgcggcgccgcaacgcctacgaggacttgctcgccgcgcagggtctcgacgcgccggagaccgccgacgcgttctggaacctgcgcgaggaacttctcgcgcaggccaccgatctgctcgccaaggtcgaacgcaaccgggaggcgtccaccgacgcggagtacgcgcagaagtccgcccggctcgtccgcgacgaggccgccaaggaactcaaacgcgtcgagcacgtcggctccgcgctgcccgagttcgcgctgacgatgcgcgatcagatctgcgcggcggtcggggtggacgccaccgacctgccgtatgtcgccgagctgatggacctcaaggccgaccagacccgttggcgcaccgcggtggagaaggtgctgcgcggggtcggcttgcggttgatggtgcccgaccagcactggacggaggtgctgcgcttcgtcaatgagaccaatatgcgcggacggctgcagctgcaccatgtgcgcgcgaagttcctcggcgccaccccggtcgatccggaaccgaacacgttggcgggtaagctgttcgcggtcgatccggagcacccgtgtgcggccgaggccgtcgacgtcgtgaccgccgcgggtgaccacatctgtgtcgacacccccgaggtgttcgcccggttccgccgcgcggtcaccgacaccggcctgtacaaggattccgaccggctggcgatcaaggacgaccggcgcccgctcaagcagtccgagtatctgtaccagggcgacgtgtcggccaagatcaacgcgctgaccgtcgatctcgcggcggccgaggaggcttaccagaaggcgcgccgcgtcgccgacgacatcgccgcgcagcgccagcagtggcgtgaccgggccgcggcgtgcaaggcgatctgcgagcagtacccgcagtggagccagatcgacaccgagaccgccgacgggcacgccgaccggctgcgcgagcagtacgagctgctgctggccgagcatcccgacatcgaggcgctcaatgcgcgcgccgacgaatgctggtcgcagatccagaagttgatgacgcgacgcggcgcggtccagacccggcgcgacgcgctcgacgaccgcaggacccggctgctggaactcgccgaacggctccagcccgcgttcgtgtcggagccgctgaccgagctgctgcaccggtacgccggacagcttccggtcagcctggaactccttgagcccgaaccgcatcgcgacgcgctgttcaacgcgatcaagaaggagcgcgagcagctgcgcgagagccgccgccgctcgtatgacgaactggcccgcattctcaataccttcgacacgtcgttccccgacgcgatcccgaacgactccgagaacttcgacgagcgggtccacgactacgtcgcgctgtgccgtcacatcgacgagcgcgagctgccggaggcctacgagcggatgatgcggctggtcaccgagcaggcaccggatgcgatcctgacgctgcaccgggtcgccgagcaggaggcgcggcggatcagcgaccagatcgaccgtgtcaacacgggtttgggggcggtggagttcaaccgcggcacccgcctgacgctgcgcgcgacgccgcgcagcctgacggcggtgtcggagctgaccgagatcgtgcgggcgatctcgcggcgcatcgccgaggtcgggctcggcgacaagcaggcgatcctggaccagtacgccgacatcctgcggctgcgcaaccggctggcgtcgacgtcgccggaggacaaggcgtggacgcgcgacgcgctcgatgtgcgcaaccggttcacgttcgactgcgccgaatgggatgtggcgaccgaggagttgatccgcacgcacagcaacgccggcgacaactccggcggcgagcaggagaagctgatggcgttctgcctcgccggtgcgctcagcttcaacctcgcggcccccgagagttcggacaacagaccggttttcgcgcagttaatgctcgacgaggcgttctcgaagtcggacccgcagttcgcccagcaggcgctgcaggcgttccgcaagttcgggttccagctggtgatcgtcgcgaccgtgcagaacgcgacgaccatccagccctacatcgacagcgtggtgatggtgtccaagaccgaggcgacgggacgcaacgcccgccccgtcgcgacggtgtcgacccgcaccatctcggagttcaccgatctgcggcacgcgatgcgcgccgaggcgaaggtcccggcgggcgtctga

SEQ ID NO: 41804 - DNA, 1392 bp, Clostridium beijerinckii NCIMB 8052
atgaaggaaattaatatatttgaaatagttccagagaatttttttgttccactttccagtcaaggaaagactctatatattaaaattatttctttaatatataaattggttcaaaacggtttgtcttatggtattgataaagacatattagttgatgaaattgaagaatatttaggattaattaattatgatattgaaaatgaagaagatgaacagttgaacaataatagggaaaaagcaaattatttgattagaaagctaattaattatggatggatttatccagaacagactaatgactataaacaaattataaattttcatgattatgcaattgtcattttagaagctttcttaaaaatagtaagtaaagaatctttagagtatcaaggaaatataataagtatttattctatgctttattcaaatgaaaaggcaggagttgttattaagcaggtttttgaaaatactaaaggaattataagtggattgaaaaacttgaattcaaatataaaaaagtatatggatagattaactaagcagaaatcacctgaggagattatgcaagagttttttggaaactatactaaagaagtaattgacaaagcatatcatagattaaaaacttcagaaaatgtctcaaagtataggcctcaaattattgaaaagcttaatgaaaatttaattagtagtgaatttttaagtgaagcaggagagttttacagagaagatgaagaattgggctctttggatgagggaatagaaaaagttaaggatatagttcataacataataaatgcatttaatgaattagacgatattatgcatgatattgatagtaagaatgctaaatacataagagcagctgtaactagggctaagtttttacttaacaattctaaagatatgacaggtatcgtaaaaggaattttagagtacataagtaatgaatataaagaacttgaattaagtttatcatcagactatctggaggaagttacagatttattcactttatattcttatggttatatagatgaaacatctctgtatattgcaaatgaaggaaaaaaatcatttaagccaggtaagattttaagtgatacactatcaaaggaagaacgtcaaagaaagattgatgaatttaagaaaaagcaggaaaaacagtattctcctaagaaggtaaatgaaatagttgatgaacttttaggagataaaaagatggttcttgcaagtgaaattgagataaatagtgtagatgattttattaagatcatttatataaggttatatggtaatcatgttttagctaaatattctattaacagaaaagatattattgcttcgaataatggatttacttttaaaaactttgagatatggaggaagtaa

SEQ ID NO: 41805 - DNA, 606 bp, Clostridium beijerinckii NCIMB 8052
ttgatatatgattcactgtccattaaagagaaagatgaatttaaaaaggtttgtaataaactattaagctattgtttaatttgtaagcaaaaggaagacacaaaaaaggattattattttgcagaaggacataaagatgcaattaatgaatattttgaaccactaggatttgaacttgaaattaataaatctataaaggcggctcagcttattaataagtttggtaataataagatttcattaaaacttatagatagtattactcttttaatactaaggattttataccaggaaaaaatgcaggaattatccttatctcaagttgtgattgtggaaatagaagaaatacaaagtaggtttatggctcttggatttaaagatagattaatggataaaacattacttaggcaggcgttaagaactttaaagaaatttaatatcatcgaaacattggatagagatattactttgagtgatgcgagaatcatagtttatccaacaattcaaatgatagtaagaagcgaaaatataactagtatttatgaaaaattagaaacttataaaagaaagggggtaaaagatgatgaagaggttaacggggattag

SEQ ID NO: 41806 - DNA, 3255 bp, Clostridium beijerinckii NCIMB 8052
atgatgaagaggttaacggggattaggctagttaattggcatgcatttaaggatgaaacaattgaaattaaaaattcaactcttttgtcaggagaaaatggtgcaggaaagtctacaattttagatgctattcaatttgtcttaacttgttctaaaaataattttaataaggcagctaatgaaaattccaaaagaagtttatcgggatatgtaagatttaaaacaggaagagaagacaatgaatttgaaagaaatggagatgtttcagctcacgtagccttggaattttatgaggaaagtaaaaagaattattttataattggagcagtaattgattcagcttctgaaacttcagaaaagattctgtggtatagagtagaaaagtgcagatttgaagatgtaacttttatagttaataatgaacctactgatatagctaattttaggttgtatggaaaagaattgaatatgcctttttcatcaacaaggatagttgatgctaaaaaagatttttctcacagacttggaaggctaaatgaaaaattttttgaattgcttccaaaggctttagcatttaaaccaatttctaatgttaaagagtttgtatatacttacatattagaagagaaatcagttaatattgatgaacttagggaaaatatacgaacttttaaagaatttgaagacattttaaatgaagtaaaaataaaaattaaaaagcttgaggaaatagaagttaagtactcttcatatgaaagtatttcaaggacaataagtcttcatgaatttatagtattaaaagcagaagaagagctattaaaagaggaaattgaacaaaaaacaaaagaaattactgctttgaatgttaatattgatactttaattaacaagaataatgttatttatgatgaaataactgataaaacaaagattgctaataatattcaagctgatttgtattcgaattctgaatacaaagcattagagacgatgaagaattctttagaacaagctgaaaaagattatagacatgaaaaagaagataagaatcgctttttaaaacaacttagtgaacaaaaatcatatattaaagagttaaacagacttctatttgatacggatactataggtgacttttacaataaaatgatttcactaaatgaaaataatatagaagaatataaaacaacatcaataaatactgaaaatgtaattgataaaactaaacaggataaggaaaagtatagagctgaaaaagaatatgaatcaaaacaaaaagaaggtaataggaaagatatagagaaacagatttctgaacttgaaaagagaaatcttcaatttcctagggaagtcatacttttaaaagaggaaattataaaggaaacaagaaaactagggagagaaattgttccgaaaatcttgtgtgaattattggaagttacagatccagtttggaaaaatgctgttgaagggtacttaaatactcaaagattttatcttattgtggaggaagaagattttgactcagtattaaaaatttatgagagattaagtaaagcacaagggttacattcagttggagtaataaacaccagaggtcttgaaaagtatgataagcctcttgaaaattctttagcaggggtggtagtgtctaaaagccttgatgctaaaagatatattaatatgatactaggaaatgtaataagatgtacccatgtttcagagttgaaagaacataaaacatccattacttctacatgcatgatgtataaaaataatgttgcaagagcaataaatccaaagatatacaaaattccttacataggtgaagatgcttataaatatcaactagagcaggcaaaagataatcttaacatattattatctgaaattaatgttttaaaagaagatattagtgtagttacaaatataattaaaacaattaataagcttaagcttgaaaacttaagggaaaagtgtgatgttttaaaaagaatagtagatataagtaataaggtttcaacacttaaggacgatattcttgaattggaaaaaaataatagctatatggcccttcaaataaaacttaatgaagttcaagaggaaattaaaagtttaaatttaagtaagaggaagatagaaaatgagttaattaataaaaaaggaaatttatcttcaattaataacagtattgatgaaaaaagaagagttctttctataaaaaaagggcaggtagaggaaaatataaataaaattggctctctagctaaagaggcagaggagagatttattaaagaaactgaaagtaaatcttttgaaatcattaaaaataattttaatgtgagcaaggaaagaaataaaactatattatcaaaaaatgaagaagatttaaagaatcttcagggagcatataatattacttatgatttcggagcagaagttggtataaatggtattaatacttttttagatgaacttgataatcttgtaaaaagtaaagttatcgaatacgaagagcaagttaaaacttcaagaaaaaatgctgaagaagaatttaaggaacattttttatctaaaattcaagaaaatattaatactgcaaaatctgaatttaagggtttaaataagggacttaaagatgttaaatttggaaatgaagaatacgagtttaaaattggaaaaagtaaagaaaacaaagaatattatgatatgataatggataatgagaatataggtgaaggtttcactttatttagtacatcttatgaaaataagcataaggaactgctaaatgaattatttgataagttaactttagataatgaaagtaatgaagcagaacttattaaattaactgattatagaaattatatgagctatgatatagagattaaatataatgataatactacatcattattttctaaagtatgcagggagaagagtggaggagaaactcaaactccattttatgttgcaatggcagcatcatttctgcagctttacaaaggggtatcttcatcttcagaatctataggaattatattatttgatgaagcctttgataaaatggatgatgcaagaattatgtctatgatggaattttatgataaatttaattctcagctgcaattattaataggagcaccaccacaaaaaattgagcctataactccttacgtaaatacagtgcttcttgcaataaaagcagataaattcagtattatagaggatatgataaatgaaaaattataa

SEQ ID NO: 41807 - DNA, 1182 bp, Clostridium beijerinckii NCIMB 8052
atgaaaaattataaaaaattactattagataatttaattgattcttatgaaaatagcgtcatttataagggtgatgctttaagggatacacagatatattttaaatttaacttgaaaagtataaaggaatattttgatgaactaaattacaaatataaagaagaaattgatgtagcttgtaatcagctagaaattgaaaaatttataaaagtatataaaggaaaaggatacaaaagccatattatagaaaagattcaattaaaccttgagaatatagaagcagcatatttatatctcaataggaaagaaaaaaagcaaaaagaagatgaactttccatattattggaaagttataaagaacgggaagatgctcttgggaactttgcaacatatattacagataaacttaagagtaatggatctgtaaagaaatatttagatattgaaaattcatcagaatgtaaagatatattgaaaggtatagatgaagtactaaaacagcataaagaaatttttagaagaaatttttcagttaaagtttatggggattccaaaaggtatgaagctttagagagtaaagtaattaagattataaaagaattttctaatgatgaatttcttaatgattataacattttgaagaattacacctatgtttattttaaaggagatataagcttaaaacttaaagaaagtaaaataaatgcaaatgattttcttggaggtatagctgtaagctcaaaggatatagaaaatattaaagaaattaaagtttcaggcagtaagctagtaacaattgaaaatttaacatcatttaataattatactggagatggaggcgtaatttatttaggggggtatcataatagtgttagacaaaatttattaattaaaatttattctgaaaatcctcatatatattattatcattctggtgatattgatgcagggggatttaaaattttagttcatttaagaagaaagacaaaaataccatttaaaactctaaacatggatagtgaaaccttacgtgaaaatattaattacgctaaggaacttacagctaatgatgtaaatgagattaatagattgttagaaagtgaagaatataaagactacacagacgttctatctacaataattaaactgaataaaaaattagagcaggaaataattttttga

SEQ ID NO: 41808 - DNA, 1395 bp, Alkaliphilus metalliredigens QYMF
atgaaattatttgagattgtaccagataaattttttagtattctttcatcgaaaaataaagaaatctatagtgattgtttgtttatactatttaaccaatatacaggaaacacatcctttggtatagatagagaaattgtggtgcatgttttgacagattattttgaggagctgggggaagtagagctctttcaggatgaggatgtgactgtgaaatctgctcgagaagaggctaacttcatcattagaaagcttgatgagtgtgggtggatagatattgagaccaccaccagctataagcaaatcattaacctgacggattatactgttatgatgcttgaaacattagaaaagattgttaagaatgaacaacttgagtaccagggctatgtctataccatttattctatattatttggcaacgacaatgatcagtataatgtgatcctggatcaggttcatgaaaataccatgaagctgatgaatgggcttaaaaccttaaacgccaacatcaaaaaatacattggtagaatcacagagcaaaaaacctctgaggagattatgaagcttcattttgaaggctatacccaggatattattgataaagggtaccatcgattgaagacctcggataatgtgagtaagtttaggcctaaaattcttgaaaagcttgaaattattaagcgagacaaggcctatttagagcgggccagtcaacaagaggttgacatcgaaaaggcagagagtctagaggctgccaaggaaaaaataatgggtcaattgaatggcattatctatgtttttgaaaatatggatgaaaccattggtgagattgacaggaaaaacacccaatatattagggcctccttaaccagggtgaagtatcttttaaatagttccaaggatatagagggacagataaacgaaatccttaaatatgtggtggagcggattgaaagtggtgagattgacctaaaaaatgatcgcatcgatgaaatcgacagcctttttcggttttatccccagagcttcatagacaataaatccctgtacatagccacagaagggaaaaaggattttcagtcacaaaagctggatgaagatcaagtcatgagacaagaggaaagagaaagacgaattaacgaaattaaggaaaagaagaaaaagagcttaagtagaggtaacattgacacatatgtattagagatgttaggggatagagcggtgatgaaggcatctaatttacccttggaaaataagctggatttcattaagctaatttatgtattagtgtatgctaaaagtcgattggttcattataaagtgaataaattagaggaatctattgaaataaagggatttaagttcaatgactttgaagtttggaggaaatga

SEQ ID NO: 41809 - DNA, 627 bp, Alkaliphilus metalliredigens QYMF
atgggtatgacagagaagtacaatcacttaaatagtaagcaaaaggatgaatttgctagaattgcaaacaagctattatccattggttttttaaccaagaagaaggaagataataaaaaagattattattttattgaaaatcataaggagatcttcgccaactattttgaaatatccggttgggagctggagattgatgatacatatggtgtgattcatcttgtgaatcaccatgatcaaaataggcaccattttaagctttatgaaagtatcattttgctggtattgagactgttatattatgaaaaaatgcaggagctgtccttggctgaaaatatggtcatcacagtggatgatcttcaccaaagattttttgcccttaagctgagggacaagccattggacaagaccaccctcagaagtgccctgcgactttttcggaaattcaacttgattgatttaattgattcagatattagtctgggagacgctagaatgattatctaccccaccattttattggctgtcagggtcgaggatattcgaaaggtatatgaaaaactagatacctatagaagtggggaggtggtagaggatgaagaagctgacgaagatcaagttgattaa

SEQ ID NO: 41810 - DNA, 3246 bp, Alkaliphilus metalliredigens QYMF
atgaagaagctgacgaagatcaagttgattaattggcattatctgaccaatgtaaccattgatattcatgacaactgcctcataaccggtgacaatggttcaggaaaatctaccattctcgatgccatccaatatgtactaacgggaggtcgggcaaggtttaatagtgctgcccatgaaaaggcaaaaagggatttgttgggctatgtacgctgtaagacagggaaagataccaatgcctacgaaagaaagggagatgtgacagcccatgtggccctagagttttatgaggaaagtaaaaagagatcctttgttttgggggctgtcattgactcatccagcgacctaagcaatccaaaggtgattttttatcgaatcgtgaaccaaaagatagaggacaaactatttcttaatggtgctgtccctaaaaatatcagtcaatttaaggtatcgacgaaatcttttcaaacaaaaatattgccaacccaaactgcagccagagaggattttaatcattcattaggctccattgggcatcggttttttgaattattacctaaagccttagcctttaaagccatagagaatgtcaaagattttgtctactcatatatcttagatgagaaagaagtcaacattgattatttaaaggagaatgtccggacctatatggattttgaaagggttcttgaaggaattaagcaaaagctagagcgtttagaggagattcaaaaagaatatgaagaggtcttgcgggttgaagaaaatatcagaattcacgattatattattttaaaatcccagaaggatacggaggaagaaaagttaaagtcaaaaaacatgctcttgagtaaacgtcaggagcagtcctcaaaggaaaaggaaagtgaagttcagcatatcaatcagctagacctattgaaagagcgagaaagtgacattcgaaagagtctattaaccaatgatacctatcagttaatgaggagcctagagcatgacattaagctccttgaaaactcaaaacgggaattagacaatgaacagcaaggattcatgacagcattgcagacggagcttgatagaatgaagaaaatccacggcttgaatattgagatcaaggggttaaaggattttgtagaacgcagtcaaaccctagacaatccaccatctgtaggggacttttgtgaatccgcctttgtcctggaggaaagctttaatgaagtcagtggacaattcaacgaaaacttatttaaactgaaatccagtaaagaagataaggaaaagcaacttaggaaagtcaatgaggaaattcagatattagatagtaaaaagcttgttcataataaggaagtcattgcccttcaaagggtgatcggcagtgaattggaaaagcttgaggggaagcggattgaggctaaaattatttgtgagttactagaggtatcagatccgatatggcaggatgcggtggagggttatttaaacacccagcggtttaacttacttgtggatccccaatattttgatgattcattacatgcctatgagcggtataaaaaatccaatggcatacatggggtgggcctcattaacacccaacaacttgaaaaatatcaagagtgtgatgaaaacagtctagcggcggtggtcacctctaaaaataagtatgcaaagtattatattaatatggttttaggtaaggtgatacgatgtgacgctgttgagaatttaaagaagtaccaacgatccatcaccccaacctgcatggtgtatcaaaatcataccgcccgtcaaatcaatcctcagatttataagaagccctatattggttctgaagcctataaaaagcagcttgtgttaaaggtagaagagcaaaaacaattaaaagaagtgctcctgggattgggagaagaaatagaaaaattgaatgaaattatgaaactaatgataaaacctaggtttgagtacttaagagagcacagtgatgtacaaatcaaggtgaatcagaagcatgaggagataggaaccaagcaggaagagttaaagcgaatcgatagaagtaccatcatggaattagatctagagctggagagcattaaaaagacaatcgatgcaaaggagaaggaactcaagaccattaacggtcgtgtcattcggctagatttcgaaatggagcaactggaaaaagagatcaatcagtttgaagatcgggttcatggcatagccaaacaaatcattaattatgaaacccaacacggagaaatactggataaggccaatgaacgctatcaggctggactcaagctaaggaagccctatgatatacaccagaattttacccgaagtagacagggattagatacaaagctcaataatgctgagaacgaattaatgtaccagcaaaggcaatataataatgattatcacttcggtggggctgagggcaaggctggcatggaggattttaaccgagaaaacaaggtattaagggaaagtaaggtcattgagtatgaggaaaagatcaatggtgcaagacaaaaggctgaagaggagttcaaggagcatttcatctcaaagctacaagagaatattgtatcggctcaaaatgaatttaaaaaattgaatcaagcattgaagggaatccaatttgggcaagatgagtataaattttatttcagtgccaataagcaatatgataagttctataggatgattatggatgaaaacaacctaggaggaaacaccctgtttacaggggtctatcgtcagaagcataaggaagccatggaagaattatttgaacgaattacagtggataatgatgaatctagaaaggccctagagaagtttacggactatcgaacatttatggattatgatattaagatctatcacagtgatgggagtacctctagctttgccaaggtctgtcgtgaaaaaagtggtggtgagacccaaaccccttattatgtagccattgctgcatcctttgtacagctatatgatagtggtattcaccaggacaagctaggcattattttattagatgaagcctttgataaaatggatgaaaatcgtatcgacagtatgatgtccttttttagtaaactagacttgcagctgttgattgcatcacccccacaaaagattgagacaatcggaccccatgtggggacaaccttagttgtaacgaaggaagataattttagctgggtggaggcatttagaatcgatgaagaattataa

SEQ ID NO: 41811 - DNA, 1206 bp, Alkaliphilus metalliredigens QYMF
atgaagaattataaaaagatgatactcaatcatttggtagataaatatgaaaaaagttctttgtaccgtggggataataaggtcaatgtaaccattggcatgaccatcaataaaaaaaacctatcggattattttaatgaatgggattatacattgaaaaaggagatcaatgaacaggccttaagtctacaggaggaagcgctcattgaaatccagtggaagaagtttcaagagggaaacatcctagacaaattaaaattgaacattgaatcactggatcgtgtttatgaagtattaaaaagacagccaaagagtcagctagagaatgacgttggcaccattgtcatgggttattgtgatagaacggattggctgggtgattttgcaagggatatgaaagagaagctagttcaaaagggcagtattaaaaaatacttggacatagaggatcgggtagaggtcaaggatgtattcatggctctggatcaaatacgagcccagaccgatgaaatacccaagcgggttttcagtataagggtattttcagattccaaacgttttgaaagggtagagtctaaagtggtgagaatcatgagggactacgggccctatgaagtggatatggatatattggcggaggaaaatattatccaaaatcctagctatgtctttctgaagggaaaagctgtactgctctgtaatgaagaaacaatcaatttagaaaaggtggatggtgagattggtctaggtgctggtttaattgataatctaagcttcaagacaatcgatgcaaagagagttttaaccattgaaaatttaacaacctttcattgctatgaacctaaggatgaactggtgatctatttaggtggttatcataatgccacaagacgaagactcctaaagaagatccatgggtttaatcctgatttagccttttaccattggggagacattgacctgggtggctttagaattttaaatcaccttaggaataagactggtattaatgtgaagtcttatcggatggatagagagacattagaaatgtataaaaatcataccaagaagataaaaagtgagcaatacagtggtgaattaacaaaactgttggaaaatgaggagtatatagaattccatgaagtgatcagatatatgattgagaataatatgatattggaacaggaagcattggatataggatga

SEQ ID NO: 41812 - DNA, 1392 bp, Marinomonas sp. MWYL1
atgctatttagacacttacctgatgaaatatttcaggcattaagcggctctaatagagcattgattgaagcggtattgaatgatcttgctgatgttttttatgatcacgcagaagatccaataaaagacaaatctaccatcattgaatcgatagaagacacactgcataagttagatacgcttgcttggcatgatgaccaaaaagaatcatttgattcgccgaaaaccattcatgattatgctttaagaatctatcatcgcttagtgaatactggttggttagtagaggagcaggagctgtatcgagtcagcgtattgatgactccgcaaatctccatgttacttcgttctctagtcgaaattagccgacacggtaagcgcaactacggtgcaaccgtattaagtattcttagtaacttagagtctgttgccaagcaccccgtagagcgtggcgtaacattacgtcaatcagcagaagcttccagagatttctctgcacatttgaaccagatattacttggtatacgcagcttacaacgagagttgtttgcaagccgagatcctaaagccattgtagcgggcttctttgatttatttgtcgaaggcatattgattgccgattacaaaaccatcaaaaccagtaacaacccatttcgctttagaagacaaattcttgaattaacgcaggagtttttagcgaatcccgaaaccatggggcaagttgctcagtgttatgttgatcagcaactgattactatggctgaagcacaagccatggtagaaaaagactgccgtgacatcattcaaacctttagcaacattgaacaacgcttagaacgtattgatgaataccggtatcgtttagaaaaacgtgcggccgacacggctcgctacatggacagttctagaccgggtatggcgaataaagtagctggcatcattactgatgtagcaaaatacgacaagttaccaatattaaaagaagttattggttcacgttttattggcatggcttcagcagcacaaccaacaaaacgccgtgagccgccaccacctcgtgtcatgacaccttcagaagtgtcagctgacgcaatcagattgcgtgatcagcagcgccgcttccatgaagctcgacaagttactattccaaaaatgcagagttatttagataaacagatcgcttctggcgatagtaagcatattttggatttcactattgaatcggtagaagactttgtatgctttgaccatttacgttatgtcggctctcttggcgtgagtgctaaaaaaatagaagatttatttgaagtacagtttactaatcagtatttagatgtgcataacttcgttgaatgtcgtgaatttactgtcgtgcgtaggagcaaagcgtaa

SEQ ID NO: 41813 - DNA, 648 bp, Marinomonas sp. MWYL1
atgcttagagaattaaaaaaagtcgttgaagagtccggcaaagacgctcaagaattccaacagacagcaaactttgtaattgcaaatcaatttgccagcgcctacaaacatggtcaacggaaacattatctgcttttagagtcttatcaggactacttcgataatttattcgacgcgttaggtatgaagctttacatcaacgagaatgaacgtcttgccggtgttttacccatccagaaagaagcgtttgttcgtttgaaaactgacgaaacgctatttttattggttcttcgccaaatctatgaagaaaaaattgagaattttgaagttgataatggctttgtcgcaaccaatactcacaccattttagacagatttgttcagttggttaaacgtgaaattccaaatgaaacacgcttcaaagacattttagctttgttcagccgtcatggaattgttattcgtggcaaatcttatgaggaagacagcaagaatcaaatgatcaacattactccggtggtcagattaatcgtaaccgaggcgtatctaaggcaattagaggcattcaatggcaccgatccagatgaagatgaagttgccgattcagatgttgaaacagaaacaacgcaagaaaccaatcaagactag

SEQ ID NO: 41814 - DNA, 3417 bp, Marinomonas sp. MWYL1
atgaaaaagttaaatcgaatcgtattagtaaattggtacctacttggtgcagaagaaatcaatattcgtggtaataccgccattatagggccaacggggtctggtaaatcgtctctgcttgatgctattcaaaccgtattgacaggggcaagtaagcgtcaccttaattacaacgctagcgcaaacgatggtaaagccagtggtcgaagtattcgttcttacatattggggatgatcgactcaggccaagccaatgcaaaagcttttggaacacaaccaagacaagacgcaacaagttacctcgcattaattttcgaagacagcatcacaggcaaagaatcgactgtaggcttggcgttaagcgcatcattagcttctccagaagaggatgttcttgggcgttttgtactttccaattttggcgctagaaaatcagattttatcgatgcgatggaaggtaagagctacaaggccaaaccttggattgaagttcgtgaaacgatgaaaaaaatctgcctagacccttatatcaaatcaggcagtgcgtcagcgacccaatatatcaatcgctatcttgaagagctaagtcctagtccagatcatttgatcacactagatagtttccttaaaaacttcaaaaacgctttgaagtttgtacctattgcctctccaactcgctttgttcaagacttcgtcttagcagaagcgccattgcaagttggcgcttaccaaaagtcactgaatgaatatcgtcacttagaagccaaaacccttgaagtctctaagcgtattgatgatttaaaacttattcagcaagattgtgagaaaaaacatcagcaagagcaaagtgcaattaattatcagtggattgcaactgaggcacgttttgatgagctgggtagcaaacaagatgatatccaagatcaatacgagcttcaaaaagaacgtgaagaagagatcgaagaagaattagcaactcaaggtagcctattaaagcaactgcaagggcagctactgcgtttcgagcaacagtatgagcactctgatgttggtttaaagcttcagcaattagagcaaaataagaaattactcactctgcaaggtcaacaagatcaaaaagctatactgcaagttcgtcaattaaccttattattatcggcgcttaactcttttgaagatttgctctcaaaagaaaccaacgccttagtgaaagaatttgcagcatttaatggcttgatcacggaagaaggacgcgtagaaggtaatcttaaaccattaactcagaagcttattgctcttaatgagattttagacagagagaaatctcaggtttttggccagcgatcagagctaaaccgtacgatcctgaatttaaaagatgaatgtaagcaactagaatcggacgtttcttctttaaaaggtggcgtcagtccactttcccaaaatacaaaacgtctaattgcgttattaaaagacgctaatattactgctacaccattaagccatttggccgaagtaaccgacagaaagtggcaagatgctattgaaggttatcttggtgcgcagcgcgaagcattaattgttgagcctgaagacgcagaagaatctattcgtatattccgtgctcatcgacgccaattaatgggctgtcgagttatcgataccacacagactcgactttggttgaaccgtggcgacaatcattctgcattgcgttttattcgctgtaataatgatcatgctcaagcttatctaaatcgtcgtttgggtggcatcaagccagtagatacagaacgagagttgctgcgcgaagacagtgcaatgacagcggatggtatgttaaaacttgccggaacgatttcgactattcgctttgtgccgcacatgatggtcggtattaataccgagggtatgcgtgagtcccgtgaaaaacaacttgcaagcctaagtggcgaactgatgaatttccttaaggcagatcagcgccttgaacaggctgattccttactaggtcgcgttatggccaacaaccaatttgatgctgaaagcattggtaacgccagccatactgttacccgcttaactcaagagttagagtcggttgaagctgaaatttcgcaactgcaaaaacatgacgatactgagctacaagaacgcatcgaggagcttaaatcgcgcattgcaaatgtcgaattggatcagaaaaaattagatcgtgaacgtcaacaaattgcagaacagtttggcgcattgaatacgcaaaaaagtcagctaagctctgctttgtcagcacttgatgaagagcgtaaccgcctaacatcgaatccaaaatacgatgcagaatttgctagtgaacgttacgctttattagaaggcagtatggtaaatggtgcggctatctataaagaggctattagtcgagccgacaaagctagcgaaaaagcccgcagctttgatcaaaaggttcgtaaggaagtagcggatcattatggcaaatatcatcatgcgaatttagacaacgatgttcaattggattacttagaatcaaagtttgaagagtttgaacactatgtttcttatcaaatcgatattttgagcgaaacagagttagcgaaatacgccaagcgtgcggaattggctcgtaaagaggcagaagaaacgttcagatcagactatgtgtctaaattgaaagattcccttgatcaagtggcgcacattattcgtgagctaaaccacagcttgaagcgccggccatttaaccaggaaatctatcaattccgctattatccaaatggcgatatgaaagacatcttggatcttgttgagcgctttagtgcgcaagaccaagccaatgtgggtggattgttcgacccgcatttgagtaatgatcctgatcatattcgcgcaatcgcatctattcaggaacttatatctgatgatgaaaaacaacaagaccttgcagactaccgtaagttctataacttcgaagtagacattttagacgcagaaggtaataagaaaactacgctaagccaacgaattcaaacaggttctggtggtgagcatcaaattccgttctatttggcgattgctgccgctttgtctactacgtatcgcttacatgaaaccatggaaggtgagatcgttggtggtttctcattagctatgttcgatgaagctttcaataaaatagatatggtgaagacgtctacgtgtatggggttcatgaaagatatcggcttgcaggttatcgcagcagcgccagacgataagcgtgctgtgatggcggcaaatatggatacgattattagcgtgtggcgtgaaggtggagcagtatctattgacgtagcttacccgaaagaaaaaggccaaatattactaaatggacaatcagataacttagcaactccagcttga

SEQ ID NO: 41815 - DNA, 1524 bp, Kineococcus radiotolerans SRS30216 = ATCC BAA-149
atgagcagcatccgcgacgacctggtgcgcgctcagcaggcgttcgcgcgaccgacgctggagctgctgcgccgcccctccggccccctggtcgtggccgtcctgacctgcgtgttcgccggtcagcggacccgcgtccccgccgaccgcctgcacagccaggtccacggcctcctcggggagctggccctgcacgggcacgaggtgcccgacgtcccggcccgcgacctgtgccgcggctgggtcgcgcggcagtggctgtcgctggccgcgtcgggggaggagggcgaggaggagtacgccctcacctcccacgcccaggacgccgtggagtacgtcgcgcgcctgtccgggccgcgcgtgctgctgggggagtcccggatccgcacgatcctggacaccgcccgccgctgcgccacgggggcgcgcgccgaccgggagtggcgcctgcagcggctggaggaggagatcgcctccctcagcgccgaacgcgaccgcctgctggccggcggggaggtcgaggaggcctccgacgagcagatgctgggggagtacctcaacctccaggacctgctgtcggccctgccgggggacttcctgcgggtctcggaggaggtccggcgcctgcaccgcgagatcgtcagcgacttccgcgccgagcagcgcccctcgggggaggtgctggacgactacctgcgccgctccgaggaggtgctgacggggtcgctgtccgggcgcgccttcgccggggccgtcgacctcgtccgcgacgaggtgacctcgcgggagctgcacgccgacatcgccaccatcctgggccacggcttcgcgggcgagctgcccgccgagcaggccgccaccctggaacggacgatgcagaccctcgtggagggcatcgaggtcgtcctggagcagcggcgcctgctgtcggcgtcgctgcgctcgcacgtcctgcgccacgacccgctgcgcgaccgcgagctggacgacgcgctgcgggcgtgcgcggagcggctgacggactggttcgccacgaccggcccgcggaccacgctggacgcgggcgtcgcggcgggggtgagccggctcgacgtcgcctcgctgcggacccggctgcacgaccccgccgacgacgcggcgcccccgccgctgcgccggcacggggaggacccggccggcgggtcgtcgctgagcgacctgcgccgcttcggcggcccggacttcgagcgcctgcgcgaggccctggggaaccccccggagggtcccgccccgggcaccggggccctgttcgagagcctgccggtggacctgcgccgtcccgcggacctcatgggcctgctgcacctggccgtcgcgggcgggggcgcggacccgcgcgaggcccgcggccgggcggtctacgcgaccacccgccccgacggggtcgtgcaccgcttcgccggccccgacctcccgctgcccgccccgcgacccgaaccgcacgaaccgcacgaaccgcacgaggagttcgatcaccccgcatga

SEQ ID NO: 41816 - DNA, 735 bp, Kineococcus radiotolerans SRS30216 = ATCC BAA-149
atgagcacccccgacgagcgcaccgacggcgacgacctcgacgccgctgacgccctggaccccgcgagcgccggggaggaccccgccgcgctggacgaggagggcctgttcaccggggacaccggcaccctgccccgcgcggtgcggaccgtcctggtgcagctgctgaagcgccgctacctctccgccgaacgccacccgcgctcctggcgggtcctggtggagaaccagcgcgcgctgcggtcgcggctgaacgacgtgttcctggacctcgtcgtggaccaggaccaccaggtcgcgtacaagcagcaggcggtgtcgcgcaccgggcagcagcggttcccgacgctgctgcacgaccagccgtggtcgcgggaggagacggcgctgctcatctgcctgcgccgcctggcgcgctcgcgctcggcgagcggggagggggcggtgttcgtggaccgggaggaactgctgcaggaggtcgcgcacttccgtcccctggacagcaccaaccacgtgcgcgacgagcagtcggccgcggcgggcgtggacagcctggtccgccaggaggtgctgctggagacgggcacggagaaccggtaccgggtgtccccgatcctggaggtgctgctgcccgtcgacgtggtgcagcgcatcgcggcgcggctgggcgcgggtgcccccgccggggacgccgccgaggacgtcgccggggacgtcgtgggggagccggcgtga

SEQ ID NO: 41817 - DNA, 3441 bp, Kineococcus radiotolerans SRS30216 = ATCC BAA-149
gtgagcgcggtcaccagcggggacgccgcgatcccggggctggcgctggccggcgcgacccgggagcagtggcacgtctcccacgtccagatggtcaactggggtggtttcgacggccaccaccgcatcgacttcgacccccgcgccacgctggtcacgggggcgtcggggacggggaagtccaccgccctggacgcctacatcgccgtcatgatgaacaccacggcggcgttcaacggcgccagcaacgacgccgtcaccggccgggcccgctccgcgacccagcgcaacccgctgtcctacgtgcggggcaagctcgacgaggtcctcgacgaggacaccggccgcaaccgcgacgcgaccctgcgcggcaccgacgcggcggggaacccggtgaacgcgtggtcggcggtggcgttcacgttccgccacaccgacgggcgcaccgtcaccccgctgcgcctgtactacgcgcccgcctcggccaccgacccgcgcgacgtgaaggaccacctggccctgttccggggggacttcgacctgcgggcggtggagccgttcgcggagcgccgcttcgaccgccggcagatgcgcggccagctcagcgggctggagttctacgagtcctactcccgcttcgccgccgacctgcacccgctgctggggatcggcgccgacggcgacgggacggccgcgatgaagctgctggggcgcatccaggccgggcgtgacgtcgtctcggtggaccacctctacaagtcgatggtgctggaccgcccccgcacgttcgaggccgccgactccgcgatcgcgcacttcgccgacctcgaggcgacctacgagacgatgcggaccgccgaggagcagatcgacgtcctcggggaactgccgcgcctgcaccaggacctgcgcggggcccgcggcgccatcgccatggtcgacgccctcgacgcggaggaacccgaggaccgcagcgccttcgggcactgggtggcgagcaccgagtccgcgctgctcgtcgcggaggtcgaggacgcccgcgccgccgcgggccgcgcgaaggaggacctgcgcaccgcccaggccgctcggcgcgacctggaggcgcaggcgcgggagaaccgggagtccctggaggccagcggcgggggtgcgctggaggccctgcgcgcgcagctggaggtcgcggaggagacccaccggcgcaccgaggaggcgtggcgctcgctgcaggaccggacccgcccgctgggggccctgcccggcgaccgcgcggagttcgaggcccgccgcggggagtcgcagcggttcctgcgggaggtccccgcggcgctgacgcggctggaggagcgcgcgcgcacgctcaccgagtccgccagcccggacctcgcggagcggcggcggctgctggaggaacagcggtggttcgcgcagcgctccgacctggtcccgcgggagctcgacgaggcgcgcgccgcgatcgcccgcgtcctggacgccgcccccgccgacctgcccttcgtcgccgagctcctcgacgtcccccgcgagcacgcgcgctggcgcaccgcggcggaactgctgctgggcggtttcgcgcggacgctggtcgtggaccgttccctcgcggaggtgttccggcggcgcgtggacggcctcgacctggcccagcgggtccgctaccgcctcgccgacgaggaccgccccgcgcaggacctggacccccgcagcctcgtggggcgcctggagctgagggcggactccccgtaccgggggtggctgagctcggtcctggcccaggagttcccgcacctggcggtggagacccccgacggtttccgcgacgacggcgtgcggcgcatcaccctggccggtcaggtccagcacggcgaccgcggcgcgcacggcggtcagcggggtctgcgggcgatcctggggttctccccggaggccctgctgacccgcatccaggacgagctggccgcggtgggggaacgcctcgccgcccaccagcgcgaccaggacgcggtgaaggaggagcggaacgcgctgctggccgaccgcgaggcgcaccagcgccgggccgaggcgcgctgggaggacgtcgacaccgcgagcacggccgcggtggtggcgggcaagcgggcggagatcgaccggctgctgggcgccgacgacctcgtggtcgtcctcagcgccgagcgggaccggctggccgaggcggtggaggcggcgcgggagaccgaggcgctggcgcggaccaccgtgcgctccacggagcggacgtgggcggacctggtcgagcagcaggaccgggtcgccgtccgcctggcgtcgctggaggagcgcggggtggaacccacgccggagcagcgcgcccacctcgacgccgtctacgggcagctcaagaccgacgactcgctgctgctgttccgccggctggtgccgaaggtccgtgccgcgacccgggaggggcggaccgcggcggtccagcgggagtccgacgccgccgcgcgcctggagcgggcgttcaaggcgttccagagccgctggccgcagccgaacctcggctccggcgtgggttcctacgaggggtaccgggagatcctcgacgagctcaccgcccaggggctggcccagcgcgccgacgccttccggcgccaggtcgtgagctggagcggggacgacctgctcaacctgcagtcgaagttccggcaggcgggcgcggacatcctgaaccggctggcgccggtgaacgagatcctcgccggtctgcccttcggttccggcggggaccgcctgcacatcgaggtccagccccaggtgagcccggaggtcgccgtcttccagcgggagctgcgggaactggcgtcggggacgacccgcgccgacgacccggcggcggtcgaggcgcggttcctggcgctgcgggcgttcatcgaccgcatccgccccggcggcccgcgctcgctgtccgagcgcgacctgctgctcgacgtccgcaagcactcctcggtgcgggccctgcgggtcgacgcgacgacggggcggacgctgagcgtctacgagcacctgggcgggaagtccggcggggaggtgcaggagctcatcgccttcatcgtcggggcggccctgcgctaccagctggggacgagccgcaacgccctgcccaccttcgcccccgtcttcctcgacgagggtttcgtgaagtcggacggggagttcaccgcgcgcggggtgaacgcctggcgcgggctggggttccagctcgtcgtggcagcgccgctggacaaggtcaccgcgatcgagccgctcatgcagcgcgtcgtcgagatcacgaagaacccccaggggttcgccgccgcggtgaccctcgtggacgccgacgccgacgccgacgttgacgcgggcgcgggggagggcggcgcggcgggggcgtga

SEQ ID NO: 41818 - DNA, 1446 bp, Mycobacterium marinum M
atgcacgacgacaacgcgggactgtcggcgaccgagctgctcgatctcaatcgcgacctgcagggctctcgcgccattcgcctgctcgccaccaccaacctcagcctttacgcgatgctcatggagcgccacctcagcgacggggcgctgcctgagaccgagctcgtcgtacagctcgagcgcgacctcgaagacgtcaacgatccgcagcccgggctcgccctgatcaagtcctgggccgcgcagggctggctgcaccgcatcgtcgacgagcgccacggccagaatgtctgctatctgacccaggacgctcgccgggcgctggactttctccgcggcttgcgtcgccaggacaccatcgccaccggcggctcgattacgggcatcgccgcgcgcctcaagcaagtggccgtcaaagtggataacgaccccgcccgcatccgcaaacacatcgaagccgaaatcgccgcgctccacgaggagcttgaccagctcgatgctggccagcgtccccaaaccgatgtcaccgactgctacgacgaggcccgcgcgatcgccctgcagatggaacgcctgatcaccgatatcggccagtacggcacgatgatcgagcgggccacctccgccctcgatgaacccatcgattccaacgccgagtaccgcgaccgccaacgccagatgtacagcgactaccaggccgcatgggactcccagggccgcgactcccaccgcgccttcctgcgcatgatcaacgaccccgaccaacgcgccgagttcgaggccgatgtcgccgccgtcgccgaagccctgcccagcctcgacccggccctgcgcaaggttatggccggcttcttcgagctcgtcggccatcagatcgacgaagtcgagcgcatccagcagcgctgcgcccagcgcgtcaaacgcttcaccgcgttcggcaccatggaacagagccgcggtgtcgcccgccaactcaacgaagccatcgccgcagcccgcgccctgctcaagtcgtcgttcaccgactcacgcctggacatcgaggtcccgctggcgcggcacgcgatcagttccgtcggtgccctcggcttccggatcggtgacctgtccaaccccaagcccgccaaacccggcgacaccgaggtcgacctcaccagcttcgccgccttcaccacccaggtcgacgcgcccgcgatgtccgacatgctcaaccacgcgatcaccgcggggcctgtcgcgctacccgacgccgtcgccatgctcgacaccgcctacctgggccacgtcatcgtgctgtggtcctgggccctcaaacagcccaaccccgacaccgccgagtcgaccgccgtccgcttccgctccctggacggccgtgacctcgaaatcgcggtacctcgtttgacattcaccgagcccatcaacaccatcgccggagccagcacgtga

SEQ ID NO: 41819 - DNA, 696 bp, Mycobacterium marinum M
gtgaccctccaagatgatgaagtcgacatcgacttctcctcactccctcaggtcgaccagagcgcccgcccacccgtgcagcgccggccgcgcttcgacggcgacgtctccgaactgcccgaccgggcctgctgggccctgcagcacctgcttacccgccgctacatcagcgccgaagccgacgccgacgtctacagttgggtgctcgaataccgcaaggacctggccgtccggctctccgaactcgacttgctgctgcgcatcgtcgacgccgccgatgtcgctttcgtcgaacaggcccgctacgagtctgcgaggggaatcaagcttttacgccgcgagccgctcggcacctacgactcgatccttgccctgcacctggcccagatgatgcgtgcctccggtgggcagaccgtcctgatcagccgtgaggagatgcacggcctattctccggggtgctcaacgacaccgaccgcgacgcggtctcgttcgccggccgcatcgacggcgccatcgcccggctgaccggcctagagatcctgcgcaagacccgcgacgacgaggacagctacacgatcagccccgtcatcaccgccgtgatgactgcctcggtgatcaccgagctgcagcagcagttcgagcagctgctcaacggcggtgcgccagcagaggaagaagaacccgaaggtgactga

SEQ ID NO: 41820 - DNA, 3363 bp, Mycobacterium marinum M
gtgactgaacagttccacctgtctcggctgcaggtcatcaactggggcgtgttcgacggctaccactcgatcccgttcagcgtaggcggcgcactcatcgccggagcctccggcagcggcaaatcgtcactgctggatgcgatttcgctgggattcctgccgttcaaccgccgcaacttcaacgcgtccggagacaacaccgccgccgggtccagcgccgggcgccgcactgtcgacaagtacgtccgcggcgcctggggccagcgcagcgacggcggcaccagccgggtgatgtatctgcgcggcgacggcaccgcctggtcggccgtggccgtcacctacgccagtgactccggccgcaccgtcaccggcctggtgctcaaatggctgacaggcgagtcccgcaacgactcgtcgagccgcttcgtactcggtgacggtgacctcgacatcgaggaagtctgcaaccgctgggcctccggccgtttcgacgcaggagtcttcaaagaagactggcggttttccaccaaggtcgaatcgcagtacctcgcccagctctacgcggcgatcggcattcgcgcgtccgacgccgcccagcagctgctcggtaaggccaagtcgctgaaaagcgttggtgggctggagcaattcgtccgcgaattcatgctcgacgaacccgacagcctggcccggctgcccgaggcgctcaagcagatcgaccccctggtcgaggctcgcgaactgctggccgttgcgcagaagaaacgcaagatcctgggcgatatcgaacagatccagcagcgctacgcctcggagtcctccgacctcggcatcatcgacctcgtcgacgcgccgatggtgcgcgcctacaccgaccatgcccggcttgcgcaatgtcccgcccagatcgccacgctcgacggcaccgtcgaccagctcgaaaacgaatacgaggacgttacccgcagcctcaatctggccaaggccgaggcggattcgctcaacgcgcagatcagcggttccagcgcgaacatcgctccgctgcaatcgcaggtcaccgccgccgagaccgaggccgagcaggtggagcgccgccgaacgacctacgaggacatgctggccgcccagggtatcgaaatacccgacaccgcagacgagttctggaaccttcgcgaggaactgctcgcgcaggccaccgaactgcttgccaaggtcgaacgaaaccgagaggcatccaccgacgccgagtacgcgcagaaggctgcccgcatcgcccgcgacgatgtcgccaaggagctcaagcgcgtcgaacacgtcggttcggcgctgccggagttcgcgctcgcgatgcgcgaccacatctgcgctgcaatcaaagtcgacgccaccgagctgccctacatcgccgaactgctggatctcaggcccggccagacccgctggcgcctcgctgtcgagaaggtgctgcgcggggtgggcctgcggctactggtgcccgaccagcattgggagaaggtgctgcggttcgtcaacgagaccgacatgcggggccgactgcagctgcaccacgtgcgggcgaagttcctcggcgccgaacctgctgagcccgagccgaacacgttggcgggcaagcttttccccgtcgatccgaagcatctttgtgccgccgaagctgtcgacatcatcaccggagccggcgaccatgtgtgcgtcgatactccggacgtattctcgcggttccgccgcgcggtcaccgacacggggctgtacaaggactccgaccggctggccgtcaaggatgaccggcgaccggtcaagctgtccgagtacctctaccagggcgacgtcaccgcgaagatcaacgcgctgaccgtcgagctggcggccgccgaggaggcctatcagaaggcccgccgcaccgccgacgacatcgccgcccagcgccagcagtggcgcgaccgggcggcggcgtgcaaggcgatctgcgagcaatacccgcagtggagtcagatcgacaccgagaccgccgacgggcatgccgagcggctgcgcgagcagtacgaactgctgatggccgacaatcccgacatcgaggcgctcaacgcccgcgccgacgaatgctggtcgcagattcagaaactgatgacgcgccgcggcgcgatccagacgcgccgcgacagcctcgacgagcggcgcacccggctgctggagctccaggagcggctgtccccggcgttcgtgtccgagccgttgacagagctgctgcagcgctacgccgcacagctgcccgtcgcgctagagctgctcgacccggaacctcaccgcgatgcgctgttcgccgcgatcaagaaggaacgtgaacaactgcgtgaaagccgccgtcgttcctatgacgaattggctcgcatcctgaacacgttcgacacgtcgtttcccgacgcgattccgaacgactccgacgattttgacgagcgcgtgcacgactacgtcgcgctgtgccgtcacattgacgaacgcgaacttcccgaagcctacgagcggatgatgcggctggtcaccgagcaggcgcccgatgcgatcctcacgctgcaccgcgtcgccgagcaggaggcgcgacggatcagcggccagatcgaccgggtcaacacgggtttggcggcggtggagttcaaccgtggcaccaggctgacgctgcgggcgaccccgcggcacctggtagcggtggatgagctgacccagatcgtgcggtccatctcgcgacgcatcgccgaggtcgggctgggcgacaagcaggcgatcctcgaccagtacgccgacatcctccgactacgcaatcggctggcctccacggcgccggaggacaaggcgtggacgcgcgacgcgctcgacgtgcgcaaccggttcacgttcgactgcgccgaatgggacgtcgacaccgaggaactgatccgcacgcacagcaacgccggcgacaactccggtggcgagcaggagaagttgatggcgttctgcctcgccggcgcgctgagcttcaacctggccagccccgaaagtgacaacaacaaaccggttttcgcgcagctgatgctcgacgaggcgttctcgaagtccgacccccaattcgcgcagcaggcgctgcacgcattccgcaagtttggcttccagctggtgatcgtcgcgacggtgcagaacgccaccaccatcgagccctacatcgacagcgtggtgatggtgtccaaaaccgaacccaccggcggcaacgcgcgaccggtggcgtcggtggcgaccaggacgatctcggagttcacgtcgctgcgacaagagatgcgcaagacggcggaacgggtaccagccggggtgtga

SEQ ID NO: 41821 - DNA, 1431 bp, Herpetosiphon aurantiacus DSM 785
atggcatccgccggagaaatgcgtgctaccatgagtttgttcgagaccgttcctaccaccctttttcgcccattagctagccctggcgctgcaatttacacccaggttttgctagcgctgtttgctgccaccaagcaacaatcgcaaccactcagccgcgaacgggcattaagcctcgtcgagcaacaattagagttacccaatgccgaggctcttaccagcgatgctcacgaggaagaatcagagcttgagcaaaataaccatgcttcggcgattttgcgttcgctgcgggcttggggctggctgcgcttcgagcaacaaagcgattattcctcggcgatcattttgcccgattatgcgtttcggctgttgcaactctttgaagaccttgcaaccaaacagcgccaacatttgcgcggcatgatttgtggcattcacgatgtgctcgaaaaagcctgtactggcgatgcaccccacgatcggctctcgaatgcctatgaacaaacactttttctaacgcaggcgttgaaagaattgcaacacaacattggcttgcatattcaaaaagtgctgcaaaccctcaaaaccaaagatgtgttggagcatgtgtttggtacctatcgcaaagatattgtcgatcaagcctatcatcaactgcgtacatccgaccatctttcgcgctatcggcctgcgattttgcagtttttgcagaaaatagagcgcaccaatttgttggagttatcggcacaacatttggttagtcgcggcgaggctgctagttttgaagtggcgtataaccgattaactgaccaaattgatacaattcgcagccatttcgaccaacttgatcaattaattggcgtgatcgatttgcgccatagccaatttgtcgattcggcggtgcgcaatattgaattatttttgagtgcgagcaccagcaccagcggccaactccaccgcattttgagccaaattttgcccaatcaacaagccttcgagcaagccagccctgaaattagcgaaatgctcagcatctacgaatttcaattgaccgatcagcaatcactgagtgctccaactcgcgctgccgtgccatttgaaattcaagctgagagctatgctccgctcagcgaggccgaaattgcccaagcacaggccgacaccttgcgccaattgcgccgctcaatcagccgtgatcgcgtgcggcgttatgctttgcaattgttgggcgatgccgaacaacgccgtggctcggagattgaacttgaaggtgttgacgatttatcattaattatctatttgcgttcgtatggcgatggatcgttgggctacacggttgagtcaatcgacgatggcgtttgggtcgagcgcgatggtgtgggctttcgcgatttcttggtgcggcgggtttcaacggagcaaccagcatga

SEQ ID NO: 41822 - DNA, 633 bp, Herpetosiphon aurantiacus DSM 785
atgagcttagtcaattttgctgaagaatatagccaactttcatcaaccgagcagcaattatttgccgatagtgtgcggcgtttgctcagcgatggcctgatttggcgcgaagatgagcaggatcggcggatttttgcttggttagtgcgacggatcgatttggtacgcgattatttggcggtcgctggctgggaattgcattacgccgaaaatttacatattttccatgtatttcatcgtgatggcagccatcgccgccgcttcaaccgtgaaaccaccttatggctgttattgctgcgtttaatctacgctgaacaatatgagtcgctcaatccaagcttgacgcgctatccaaccaccaccgtgagcgatgtctatagccgttatggagagttttttcctggccaaacgattcgcaaaaaaggcgcgttcgatgaggctttacgcctattcaatgggctaaaactcgtgcgcgctcccaatagcaaagcactgcgtgccaacgaccccgatgcggtgatcgaattattgccagcgcttgaggtaatagtgccagctagtggcatcgccgccttggccgaacgcctagccgaatatcaacgccccaacagtgctgacgaggagcaagaatga

SEQ ID NO: 41823 - DNA, 3282 bp, Herpetosiphon aurantiacus DSM 785
atgatcaagcttagtcgcatttttctgtatcattggcatcgcttcgattggcatgtgttggatgtgcaggatagtttgtatttggcgggccacaacggttcaggcaaatcgtcgattcttgatgccttgcaattggtgctggtggccgatttgggtcgcgtgcgtttcaacagcgcggcccaagatcgctcgcaacgctcgttggatagctatgtgcgcggcaaaattggcgagcaacattggctgcggcctggcgacacgattggttatgtggtgctggagtggactgaagatctgaagcatcaagcctttgttagcggggtttgcttggaagctcgtgccgcgacccaaagcgttgaaaaaaccttttttatctttgatggccacttaaatcctgatgtatttattgagcaaggcaaaccacgcacccgccgcgaaatcaaagcgatggcgcgtaatcgctcaactgccgaaagtttcgatcaaactggcgaatatcaagcggcgttgctcaatcggttgggcggcttgaatcaacgctttttcgatttatttctgcgtgccttgaccttccagccaattcgtaatattcgtgagtttgttgagcaatggctgctggagccaaattcgttggatgttcacaccttgcaaaatgtggttgaacgcttacgcgatttggagcgaaaagctaaagatgttgaagaacaattaaaaagcctcggtgctattatcaaaacccaagaagaagccaagcgcttgcgtggcctgcatgggaaatttgagattctggcggctcactatagcgtggcggcaattcagcaacaaattaatcaacagcaacaacgattaatcgatactcgccgcgattacgaattgaatcagactgatttggaacaacaacttggcttacagcaaaatgcccaagctgccttagttgaagcccaagttcaattaagccaatctgatgttgtgcggcgtaaaaaccaacttgccgctgaaattcagcaattgcagcaacacattcaaaaaattaaccaacgttggcgacaactacaagccaaattaatccaaattgcggcattattgaataaattacagccaattgctgagcaagatttggttaatttattgcagcagcctgagcacattccccaatcacagcaaattgtgcctttattacaacaacagagcacggcggctggctctgctttgaaattgcaactccaggcgatgaccagaaccgacgataaaatctcgcgcttatttgaacaagaaagccgcctaaaacaagaaattacccagcttgagcaatcgaatcgccaaaatcattatccccaaaatgtggaaaatgtgcgtaagtacttaaaatcagcattaaatattgaactctttttgctttgtgagctgttagaaattcctgatgaacattggcaaaatgcggttgaggcaatgcttggtcaacgccgtttcaatattattgtcgaacctaaatattatagccaagcccttgatttgcttgatcagttacgcgaaaaagagcggatctatgatgttggtttggttgatttacaacaagctagtgcagaagctcgcccagcacgaccattatcattggcgaccaaagtcaaagccaaaactggcttgattgataaatatattgcggcaattttaggtgatattattacttgtcagcatgtgcaagatttgcgtcaacatcgccgtgcgattaccgctgaagtgatggtttatcaagaatggacagcgcgttcgattgatccacggaaatttcagccttggtttatcggtgaacgcgcccaacgctcgcaaattgaaagccgccgccagcaattaaccgaaatccaagccgaattggcgatattacgcccagaacaacaacgccagcgccaatattatgatcaattggaaaaattacaacaacttttattaggcttagattcgtatttcgaggaagaacttgattcaagcgaattacaaacgacacttgctgaattgcaacgcgaacacgatagcattgatactagcggcgtggcggcacttgaggccgaagttaaacgtttacacataattcatgaagaatatgccttgaatattcgccgtttagagcggattattggcacactgaataatcaaattactcagattgaacaacaacttcaagaaaaccaacatcaattgttgaatgctcaaagcctgtttgagcatacgcagcaacgctatcccgaccaaattgacgatgcactcaacgattttcagcgcgagaacaatgagcaagcgcaatttagccgtttgcaagaaaccgccgagcaacaaggtcgtggctataatacccgttttaacaatacccaagaacaattacgcgaacaagttatactctataatcgcgattttcgagcgcgtgaactagccaatatcgagcaaacgagcttccaagagaaacgcgctgagcttgaggctactgatttaccgcattttgtacagaaaattgctgaagccaaacatgaaactgaaaccgagctacgcgaacatgttctgcataaattgcgtgaaaatattggtcgcgccaaagcagagcttgatcggattaatgatgctttgcaaggcttagatttcaatggccagcgttatcattttcgctatgaaattgccgattcattgcgtgatttttatcaattgattgagcaatcagccaatgttactagcgagatgattcaggatagtgaattttatcagcagcacaaagccacgtttgatcgtttcttccaattgttaattcagcctggcctaaccgaccaagaaaagcttgagcaggctcaaattaccgattatcggcgctacttgagctatgatattgatgtgattgagcgtgatggtactcgttcacgcttgagcaaaattatgggtcaaacatctggcggcgaaactcaaactccgttttatgtgacgattgcggcctcgtttgtgcagctttataaaattaatgaacgtagcaaacgctcaaccattcggattgtggccttcgatgaagccttttccaaaatggatcaagatcggattggctcgacgcttgatctatttcaccattttggtttacaaattatcacggccacgccgattgagcgttgcgaatatttagtgcccaaaatgtgtacaaccttggttttgactggcttgaaagatcgccagcagcgggttttggtcgagccatatcgtaattatgcagctcgtctagaggcgctgaatgctgaatctgaacaaaactag

SEQ ID NO: 41824 - DNA, 1206 bp, Herpetosiphon aurantiacus DSM 785
atgctgaatctgaacaaaactagcaatgcaattttgcagcaattacttgatcaacacgagcagccagagcgtcagcgagtcaatcgggtgcagattaaagcggccaaattttcgcgttattttgatgataaacagattgacgaacgccaacaaaccaataactacttggttgagctagcaaaaaatcagataatcaagttgtattggcgtaaatgggaagaaggcaattggcttgaagcggttgatttgcttgatgcggcggcgctatatcgtttgctgaaacgccaacccttggccgagcaacagcaggccttgcgtacattattggctgaatatgtgccagttcaaggctggctggctgattggctggcgtggctcgaacagcaattaatccaacagcgctcgatccaaccgcttgatttaaccgaccctgcttggaatcgcgatgtactacgggcgatttatggcctgactcagctagaaacgccaattttagagcgtttatttagcgtaggttggctgggtcagagcaaacgatttagcgagctagaaggcgcagttttgcgggttttgcgccaatttgccccgcaagccaagcaatttggcgacaatgatcgggctttgctgcaagcctttaatctcgaaaaagtgccagaatatgtgctacttgctggcgatttacaactggaattgcatgggaatcggctggaattaggcgcgtttcggccaagtttgggcttgcctagctcgatgttgcgtcaagctcaggtgctggattcagcctgtactgaaattattacgattgaaaacttgaccagcttccacagtatgcttgcccgccaaccacaggcgttgttgatctataccggtggctttgctagccccagcctctgccaatttttgagcaaactagccatggctttgcccaatttaacgtggtatcactggggcgattacgatgtaggtggtttgcgaattttggcgcatctacgccagcatgttgccaagattcgcctgtggcagcctgatccagcgatttttcagcgggctggcaaagctacccaaagcttgaattctaaagaacgccaaagcctcactgaactccaacaacacccattgctttatgattgccaagccttgatcggggcaatgctggaacagaatatcaaacttgagcaagagcaacttgatcttttggggcactaa

SEQ ID NO: 41825 - DNA, 1233 bp, Acholeplasma laidlawii PG-8A
gtgattgataagttagttgactattttgatgaacttaaagaagattttcagatgggggatagtgaagtcactacttcacgtcaaaagtctgtttctgtcattaatgtattaaagcaaaatggttggttaggtgaagaagaactaggggattataaaacatctttaaatttattcgattactccatcaaaattattgatttacttaaaagaattcaaatgggtgaagaaaacgagtataccggtgaaatttacaccgtgtactctcttttgtcatcttttgatattttagatggtttaactattgtagaacaagcatatcaaaagattgaagatgtcttaaggaaacttaaaactttaaaagcaaacatttaccgtttttactttgatttagttaaaaaggatagaaaagatgatttacaaaaagttttagaaaaactacttatagactataaaacaaacttctttgatagtgcatattatcatttaaaaacgacagattcactaccgagatataaacgtagtattttagaaaatatatcctatatttaccaaaatgaaggttttatggaaactatggcagaacaagcactaacaaaaagaaaagcacttcaatataatgatgcatataactatgttgaagaacgtattcgctatataaaagattctattgatgccattgagtatttaattgaaggtattgataataaaaatgaattatacattaatgctgcagcatctaagattatgtttttaactaacacatcagaggacttagaaggcttaatgaatcgtttatttaagattatattaagcgataaaaaggtagattatagtcaaatatttaacctttttagagctagaaacttagatgaaaactcgcttcagacagttagaaggccaagagtggatgctgttgcagaggaaattgactataaccaagatatctctgatgaggttaaggaacgtaagatggcaagcctacttaaggcaaacttattttctaaaaaagaaattaacaactatgtcacttacttactaggcgatgcaccaagaatattagcaagtcatattgaattagaatcaaacgatgattttgttaaactgatcttaatcttcttatttagtaaatcaacaggtatggtttacgatgttagattattaaattatgatacgagaattggacatattaaatttactgattttgaaatctttgttaaaggaaaaagcttatga

SEQ ID NO: 41826 - DNA, 636 bp, Acholeplasma laidlawii PG-8A
atgaacaaaaaccaagcaattaaaaaactaagtgaagagtttgtagtcttaaaagaagcagaaaaaactgttttttctagaattgtaaacaaattacttcaagtgaacttcatcaccagaaaaaagattgctgatgcaaatgattaccgttttgtattagcatataaggaaatatttgaagcctatttttgtttatcagattttgaacttattattgagcgacatgaagaagtcttatatatcaaaaatatatcaaactttaatcacttaagacttagaaaagctgaaagtattttattactaattattagaatgttatatcaatcgaagatgaatgtcattactttggatgaaaacgttgaaatatacttaagtgaggttcatgatgaactcactaaagtaggttacctagataacaaacgtatgactaaagaaacattaaaacctagtcttcaattacttaagagctataacatcattgattatatggatagtaaattaaatgatgatgcaagaattaagatatatccaacgattttatatgtcattagaacagacagcatcaaagaattattagatcacatagacgactatgttaaagggggtaatgtaaatgaagaagttgacgaagattaa

SEQ ID NO: 41827 - DNA, 3267 bp, Acholeplasma laidlawii PG-8A
atgaagaagttgacgaagattaaactgattaattggcatttgtttacagaccaaaccattaaaatagatggtaatacattaatctctggtgaaaacggtgctggtaaatcaacattacttgacgccttacaatatttattagtcggtggaaaatccggtgctaaatttaatattgcagcaactgatgatgccaaacgtacccttgagggttacgttcgtggtcgtattggtgctgaaaataaagaatttatccgttcaggggatgttatcactcatgttgcattagagttttatgatgaacaaagtgatgaatttggtattattggtgcagtcttagagttacctaaaatgggtaacttaaaagaaagattttacttactagaaaacttaaatcttcatgatggtatttttatggataaaaatacgccaagagattaccgctccatgaaagcatatttaaaaacattatcgattgattttataccgtttgattcacaacgtcaataccgtgatgcacttgctaaatactttggtattgatgctaaaaaatactcaaaaatattacctaaagcactggcttttagaccgattgatttacaatcatttgtttttgaattcttattagacgatgaacccattgatattcaaagtctaaaaaataatgtgacacaacttaaacgagttgaaggtcaaattcgcttagacaaggaaaaattagaaaaattagaaaaaattattactttgggtgagtctcttaatcaaaacctagatcaaattacaaccaatgagttaattgatcaaatggcatttattgaaaaaagagaaacctttttaaatcattctgaaaatttactggataaagtgaatgctaaatatgaagtactaaaacgtcaaaaagatgatttagatagacaaataacatcgaatgatgaaacgattttagaacttgagacatcacgtcaaaatgatgatatcactcgtaccctttcaaacctaaaagaacaactgcatgctaagggaaaccagtataatgaacaaaaagtgattgtcagtgatttaaaagcaactctaaatagagaacttgatttatatagagactttgtgaatttaaatccaaatacacatatctcagcattcctaaaatattattctggtcacgaggaaaattcaaatattttagaattaagcagttacattgaaggtgcacaatctgcagcaagtggttatttaaatgctttaagtgtagaaaaatctgaacttgaaaaagaaagaaataatatcttaaatgaattaaggattgctgaaaacagattaaatgcactaaaaagaaatgtcaaaacatatcctagaaatgtccaatccttaatggatgctattaatacagaactatcaaattattataaaaaagatgtacgtgtgcgtgctttttcagatctaattgaagttaaggatgaagcatggcgtgatgcattagagggttacctaaatacaagacgttttgacttgattattgatccactatactttaatgatgcacttgaagtctatgaccgtgttaaaaatgaattatctatttacggtgtagggttagtcaatactgctaaaatcggtgaatatacaacatgcttaccaaattcacttgctgctaaagtaacaacagatcatccttatgctagaaactatgtcaacatgaccatggggtatgttgtcacagttgataatttaagtgatttaaaaaatcatcaaagatcaattactaagtctgcaatgacttatgctaaccacacagcaagacaaatcaatccaagtcaatatcaagtaccttacattggtaattcatcgacacaacttcaagtagaaatggatactaagttagtaggtgaactgacaagtgatcttaaacgtgtatccaatttacttgagaaaaaccaaatgtcactcagattattacaacaatctaaattaggacatattgtatcttctaatcaaattagatactttgataatattaaacaaacaagaaaagaatacattgaactagaacaaaaagtagcgaatttatcaagtaatcctaagattgctgaattagagtcacaacttgatgaagagcgtaacaagaaacgtcaactacgtctagattttgaaaagttagctgatcaaatggctgatttacgtagtgaaaaaacacgtattcttgaacaaattgaagaatcacgagatgcattatccaattatttaaaggaacaaaaagagtggaatcaaaaatatccaacacttttaccgatagcttataaccagtttaacgcattaaaagtgagatatcagtcaaattatgacttgatttctagagatttagcacaatctacaattcaaattaaatctcaaaatgcacgtgcagaagctgatgttgtaaacttaatgcgtgcatatattataaactatcactttggtgctgcaccagatctatcagagctcattgaatttgaaaaagagtatgtcttgattaaagacaataatttaatgaagtatgaacaagaagcaattgacttaagaaaagcttctgaaaccggatttagagaagaatttgtaggtaaactaagagcatcaattgaatccgctcaaattcaaattgcagaacttaaccaggccttaactggaaagcactttggtacagatagttatgagcttgttacaaaaccatcagagaatccagagtttagaacatactatgatatcattatggactctgatgcggtagctaaacataccttatttacagaaaacctatctaaacgtaaagaaattatattaatggagttatttaataagattgcttcatttgatcctgaaaatgataagtttgcattacaatttttagattaccgctattacatgagttatgatattgaagtcacaaacgaaaatggtaacaaatcatactttagtaaggtaagtaaagaaaaatctggtggtgagactcaggtaccattctatattgttattgcagcaagtttccaacaactattaagtaaaaataaacgtattgatgcgggttgtatggtattatttgacgaagcatttaacaacatggatgagtctagaattgatgcgatgatgaagttctataactcattaagtattcaattatttatcgcagtgccacctcaaagggtaagtaacattgtaaactatgtgacaacatcactagcgatagttaaagataacgattttgcaattgtagaggcattcaaaagagaggttatttaa

SEQ ID NO: 41828 - DNA, 1410 bp, Heliobacterium modesticaldum Ice1
atgaaactcttcgacatcctcccggacaagttcttcctactcttttcgggcaagaacaggccgatctttgctgaagcggtgttcctcgtctaccagcagtatcagatcacccgctttggcatcgccatggatgtgctccgcgatctgatgcaggagttggtcgagagccaggaagagcaggggtttgtcttcgacgtagaagaggagcaggaagcgccgggagggcaggctccctttgatgacgatatgtttcggatgaaggccaacgctatcctgcggcggttagaccggttgggatggatccagatagagacgcgcgagaatttccgacagtacgtggtcctgcccttttacacgagccgcatcctggcggtgctgaaagaaatctgcgaggagcgtgtcgtcgagtatcagcggttcgcttttctcacctatcaactgctgacgggggaggagatcaagcatcgcccggggctggctgttttggaagcagagaagattacccaacagtttcaagaggaattgaacatcctcgtcaacaatataaagcaccacatggagcaggtggcccagaagtcctccatcagcgatgtgctcaatcaccactttgatgagtacaaggcgaagatcgtcgaccgcagctatcaccggctgaagacgtccgatcatgtgtcccgctatcggcaacgcattttggagacggtgcagcagtctctctgggataaggattggttcgaacgggctattgaagacgggctgcgcagcgagtttttctctgaccgggaagagggggaacagcgcctgcggggggcgttgcttttcattgaggaagcctaccgggggctggacgatgtcttctaccagatcgacctgcgccataaccaatacctgcgcgcttcttatgaccgggcgcgctacttgagtcagcacagccacgggatggaccagcagttggccgggctgttggagtggctgggaaaagaggcggatgacgctgcggcagaggcggccctttcgcggctctttcgcctgctgcgccttcgtcatttgacagaggattccctgttcacgccgcggagaaagcgcgcgcctcatcagccggaggcgcgggtcattgtcgaaatcccggaagagttgaaacgggagttgcgcgagaaggacttggcgcgcatgcgccgggcgatcacccgcgacaaggtgaaagccttcgtcttggagcacatgggcgcgcgcaaggagatcggtattgaggaactggcgccgacaacggtcgaggaatttctgtatctcgtctacacgtacctgtacggctatgatggaaaggccggttaccggctcatccgggggaaggaaaaccgggtgatcgagatgggcgactaccgtttttatgaccggcgcgtgatccggtga

SEQ ID NO: 41829 - DNA, 606 bp, Heliobacterium modesticaldum Ice1
gtgtttgataccctgggcgatcaggaccgggagcggttaagagacgtgatcaaccggctgatggccgtgaactttttgctaaaagcgttggaacgggagcgctatgccctggcccggcggctccgtccccaactggaggagttcttcaagtttctcggctgggagatcacctttgatgagcgccatgaatgcatcgcagtggcgtcgcccgaagggatgcaccgccgtcctttaagtagagaggaaagcatttggctgctcctgttgcggctgatctatcaggaaaagcggcagagcctgtcgttgagtgaatacccgacgaccacccttaacgagatccgcgccaaatatgaaacgttccggttgcctctgttcaccaagtcgcgactagtcgacctggtccgcctgggcgtccattataagttgatggatgcgctcgacgaggatgtccgtgccgacaactgccgtttccgcctgttccacagcctgcagcatgccattgacggcgaggttttggaaacgctgcacggcaagatcatgcgttatgagatcagcggggaggaggggatgttcgatgaagtggctgaaacgcctgcgcttgattaa

SEQ ID NO: 41830 - DNA, 3582 bp, Heliobacterium modesticaldum Ice1
atgaagtggctgaaacgcctgcgcttgattaactggcactacttccaggacgagacgctggaattcggccctcagacgctgatttccgggcggaacagcgccggcaagtcgacgatcatcgatgctctacaggtcctttttgtggccaaccagaagcagattaagttcaattcggccgcccatgacgaggcgaagcggagcttgatcagctacctgcggggaaagatcggcagcgacgatcagaagtttgtccgcgatggcgattttacgacctacatcctcagcgagttttacgacgagtcgaaaaaggagcgcttcgtcgtcggtgtcgtcatggatgtttttcgcgacaacaacattgatgaagagtacttcatcctggctggggtggggatcgacaacttggatctgatccatcccggcgggcagaaaggccagctgcgaaaccgggagcagtttcgccgttggtgcagcggattgaagggccgcgtcgtctttgagcgcaacaagagcgcctaccaggaagcctttttggcccgtgtcggccatgtgagcaagcgcttcatttcgatttttaccaaagccctctcctttcggccgattcaggacgtccgggaattcgtctacgactatgtgctcgataaaaaagcgctgcagttggatgtgatgcgggaaaacttcgagattcacgagcggtaccggcgggaattggatgacctcttgaaacggaagaatcaacttgaaaggattgtcgcccagttcgagaactatgccaaactgcgcgatatcgtcgatacacaggagtatgtgatccggcggcttcagcatgcccagcaggctgagagcctggagaaggtggagcgggagatcaccctgttgcaggaggagatcgtccgcctggaggcggacctgcgcttgaatgatgcccaactggcggaagcccagaaccgagtgctcgtggcctatcagaactggcaggagcatggcgttcacaaaaaggagcaggagctcaaagaagagatcagaaacacgaaccgggagatccgcgagaagagccaactgttggaggcgctgaaggattttctccggcgggagatcgtacttttggaggatctcgcgcggtgggacggcgacgagcactggcaatgggcacctgaggtgggagagcgggagcgcctgcaggagacgatcgatcttctggcgtccctgccgccccagtcgttgagcgaggccgaagcgcaggaagaggccttccgggacgcgggcctgtttttgtctgatctgcacagccgcttcacgaaagccttgggccgtattgaggaccggctcaaggcgctggacggcgagcgggatgaattgcagcggcagatcaacgatcttgagaaaaagaagcagcgggtctacgaaaaagaggtgctgaacttaaaggccttgctggaggagcggcttggggaccgttcccctgtttggatcttctgcgaagagatggagatcgacgaaaaggacgaggaatggcgcaacgccgtggaaggctatctgaacaggcagcgcttcgacctgctggtgcggcccgaggtctttgccgaggcgctctccatttatgagcaggaaaagcgccgccatgccgtggagggggtcggccttgtcgacacggagaaggaggcccgctatcgcggcagcgctcaggcggggtcgctggccatggtgctgaagacggacaacccgatcatccaggcgcgcatcgatcacctcttggggcgcgtcatgcaagccgagaacgagcaggacctgcgccgccacgcgatggcggtgacgcggagttgcatgtcctaccacaacctggtggcgcgccagatcccggagaaacgctatgccgtcccttatatcggcgcccgggccatcctgcggcagctggagatcaagcggcaggaactggcccagttggaggaaaagcgaacggccctggcaaagcgcaaggccgccgtcgaaggctggacgaggaacctggccgaacgggcctcgcagtatgcgcggatggcgcccgatctggcgctgccagcccgaatcgcatcgctggaacagcaccgcgaggaaaagcagggcgaactggcgcgtttggacaagcgcgaagtggagcggttgaaggaagaatacgatttttggcggaaacggcaggacgagttgactgatgagggcaaggaacgaaacgggaaaaagacgttgaaagacaaccggctgaaggagtgttttgacgaacaacaggtcctgcaaaaccgggtgcgcgaggctgaggaacactggcgggcctggaacctgtcctatccggccgaattgctgccccgggcggaggagcgctggcgggaggcggaacggtcgggacaagccacggcgacgaagttattgaatctgatcaccaatcagaaggggaacgccaataaacgggatcaggagtttcaaatgctgcgggactaccgcaaggattacaacaaggagtacaactacaacgccgatgtggaaggccgggacaacggggagtaccagccgctgctgacagagatcgcatcggtagacattcccgcctaccaggcgaagttgcaggaggcgctggctcagtcggaggaagagttcaaatcccattttatcttcaagatgcgcgaggccatccattcagccaagcgggagttcggcgagttaaaccatgctttgcggcattttcccttctcagaagaccattaccgcttcgagatcaaagcgagtgaacggtacaagcgcttctacgatgtgatcatggacccgaatgtgggagaacgaggctccctcttcgatctggaccaggaggacaaggcagcggtgctgcatgaactctttgaacgcttgatccggggtgatgcgggcgatcaggaggagttcaccgattaccggcgctacctcgacttcgacatcgccgtggaaagccggggcaatcgctatatgttttcgcaggtgttgcgggaaaaatcaggcggcgagacgcagacgcctttttatatcaccatcctggcgtctttttaccaactgtacggttcgaacaagacgatgcggctggtcgtcttcgacgaggctttcaacaagatggacgaggagcggatccagacgagcctgcggctgattaagcggctcaatctgcagttgatcgctgctgtgcccgatgagaagatgcagcacatggcgcccgaagtgacgacgacgctgatcgtgcaccgcgacggctatacctgttttgtcgatctgattgataaggcggaggcgatcgggggcggggaggaatttgccgatgaacgcagaggggcggcggcggtcggtcgatcgacaagcatgcgggagctgctacgtgatgagcgggggacaaagagcagcaaagaaggagcgcaaagcgcgcagggcggcgaaaggaatcgactgagcgaggagcgagtagaaggaaatggcgaaggagaagaccctgtctttgacccaaaaccccggaaggtccggcgagaagagcggtccggaaagcagcaggtatcagcgcaagatactctctttgctcttgaagaagtatga

SEQ ID NO: 41831 - DNA, 1173 bp, Heliobacterium modesticaldum Ice1
atggtcgactgtgatgatgcgtcgcttgcccgcgactactttgacgagatgaatcaccgcaagcgggaggagattcatcttgccctggaggaactggcgtcggaagggatcgtcgctatcgcttggcctcgtttcaagcaaggcatcgaggtggacaaggtctacttgaattacgaggctgtggacaaggcataccggttggccggcctgacgccgaagggggatcaactgacggcgctccgcgacacgttgcggccgttgcaggaccacccctgggagtgggtacgccgctggtgggcggagacggatgaagccctggccgctcgcaagacggcgcgcctggatatcgacgaccggtccggctatcaagaactggtgcaggtgctcgaagcgttgcctgcggtggaagacagcgtcccaaagcgattgttcagccagtcggtgctgggcgattcgaaggcctttgaacagcgggtcgaaaagcgactgctgccgttgttgaagcggtatctggatgaggcctgcgatagggacgaggaatacctgcaggcggtagggctgctcaaccatccccagctggttttgctggcggggccgattgtgctgcagttggctcagggcggtcaggtttctgccgatgtgcccggaggactgggcgtgagcgggcaaacggtgaaggatatctgcggtctgatcatcgatgcgccgcgcctcatcactgtggagaacctgacgagttaccatgagttggtgcagcaggcgcaaaaagcggggaagcgcgccgtgatcatctatacgggcggttttccgaaccgggagatccagcggttgctgcgtcgtatcggcgaggagatcactcaaatcgatgcgcagcctggaaaaatcgagtgctatcattggggggacatggacgccggggggattgcgatttttgagttcttacagtcccgcttctttccggcgcttcagcccatgctgatggatggatgcgcctatttgcgccatgtcgataaaggcatcgctttctcaggggaatatggcgagaagctgcggcggttgcaacgggaaccgcgttatgagcgatggtgtcccttgattgaaaaaatgctcgcttgcggaaagtggttggaacaagaggcgattccggtttctgaagcggaggtacatatataa

SEQ ID NO: 41832 - DNA, 1488 bp, Cellvibrio japonicus Ueda107
gtgatacttaattattcaggatacgatatcaggaaatcaccaagggtaatgagttcatccaatcctctggaaccagacgacattccaccgttgttcgagcggctaccaccggagctgttccgcccgctggccgccagtaacgctcgtcgctactggattgtgctgtgccgcctgatcgacgagatgtggggcgatggtggccgctcccctggtgaagaaacactcaagtcagttgtcgtacgcaagatcgaaactctgttagctgccagcgatccttgggaagaagagctggaaacaccaatcgatattcgcgcacatgaaatcgtccgctacctgaccgagtccggctggcttagccagcgccgccgaggcctagctgaaatggttacggtgcgcccggtcatcgcccagttctataccgtgctatgtgagtttgcccgtcacgaaccggaatttcttggcagcaaggtgcgctctatttatttcaatctgcgtgccgtagccagtggcgaggccagcggcgaccaatacgcagaagccgccaagcaggccaagcaatgcatggcccacatcgccaacaccggctgccgcgtccaagatttgatggatgaactgatgaagcgcacctcggcgcgcgagttcgtccggggtttcttcgaggaatacgttgagaaggtctttatcgccgactacagcgagttgcgtaccaaggatcatcctttgcaacaccgctcgcagatcctggccatgaccttgcagttccagcacgatgaggcgcagcgcgaagcactgatcgcctggtatcaggaaaagaaaaccggtggtgaccgaatccgtgccgagtttctgtatgagcgcgatactcgcctgctgatgcgtctgaaagatgtggatgagcagttgcaacggttggacgaggaaatccgcgacgccaaccagcgcgctatttcctttatcgaatacaagatgcgcgcgcccaagcaactggacaagctactcgcagccgctatgcaagccactgatagactggacgaaggccatgtggcgctactccctgcttctggattccggcacgctggcccggaattgctggccaagccgcgcacagtagccaaaccgaccatggctacgaccgtggaaaaacgtccacccaccttgcaggaactggccatggagcaattgcgcaagcgcatggccgacaaccgcttggtgaatagagtgaagctggccaattatgtcgtgcgccacttggagaaccgcacggccgtcacttccgatgaactgaccatcgactcgatcaacgatctgtgttgctaccaacgcttgttgctgatcgcggcgcatggcgcctgccctccgtcgcagcgccgttccgatccacaactgcaaatgctcaagggcgtacgcattgactttctaccagaaggtacgacccgcaacgcctacctcgaacacccccgattccatatccaacgcgagtacgcctga

SEQ ID NO: 41833 - DNA, 600 bp, Cellvibrio japonicus Ueda107
atgagccactgggaacgcctggctgctcaaagccagatttacgccgaaatcgactaccagaaggctggctaccaactggtcatggagcaggtgctgtatgccagtgaccgacgaagccgcatcgcttacgaattgatcgtcaagcaccgcaaggactacgacaacctgctcgcccagctcggcatgaccatcacccacaacccacacatgggctacgtggtagccacaccaagtcagtatgttgccgacaagatgcgattatcagacacccgcctggcactggtgctgcgccgcctgtatgacgacaagatgcacgccaccgagatcctagcaggcgaagcctttgtggacatgatcgaactcgaacgcgcctacaaggatttgctcaaccgcgagctaccgacaaaggccgtacttgaagaacagttgcaggcaatgaagcgctacggcatcgtccgcttggaagacacccatgacgagcagcgtctccaggtcgcgattcgacctggcattgtcgatgttctgggcgaaatggctctgctgcaactggccgcctatgccaatacaccgggagaggaagacaccgatgaaacagcttga

SEQ ID NO: 41834 - DNA, 3399 bp, Cellvibrio japonicus Ueda107
atggttcaatacttcctgtacgaacgggaggatctggaacttggcaaaaataccgccttcctcggccccaacggtaccggaaaaaccgcgctgctggatgccttccagaccgtgctactggccgctgacagcaacaaaacccacttcaacgcttccggcgagggcaagaagcgtgcccgcagcctgcgtgaatactgcctgggcgtgtatggccagagcgatactgaacgctgccgcacttcggccaatacctatatcaatctggtttttcgcgatcctgaaacgaacattcctgtcacggcaggtgtatcccttgccgccagtgttgaagacccgaatcacaccttcaacagtctttacatcttgccgggcgtggccttgagcacctgcaaccacatcgaccccgatgctgagcgggaaacaattctgccttggcgcaagttccagcacatcgccaaggatctatgtacgatgcagggtaccacacccgtattcacccagaaccgcgaggacttcctccgacagctcttcgtcggtcatctggcctcacccggcgaacgccccaatacccgcgccatccgctcggccttcgcccgctcactcaagctcaacaaggacgtggacgacctcaacgaaaccttgcgccagcacttgattgaacagcgactgaccaatgtgaaagcgttccgcatacggctggaacaattccgcgacgtgcgcgaaatgatctgtcgcttggtcgagcgtatcgaacgtgctggcaccgtggccgacaaatacgaacaggtcaagcgcgagcgcaccacccacgccaatctggatgcgctgcgtgcgctctatgaagccgaacgcatcgccgaagcattggacgaacaacaggataaagctgaggaactgaagcagcaacttgaaaccactttgctggacttgggtagagccgagactgaaaaggcccaggcacaaaaagcccgcgaccacactttcgaactccgcaatgcggacccggaatacctgaagcaagccagcgaatccaagagcctgaaggacaaggaaacccagcacgccaacacgcgccaggaactgaacaacctgttgagactagcgcaggaaaccgccatttctgccggaaaactgcccgagatggcccgctatcaagacgacttcgaaaacaccatccaacaattacacgagctgcaacagcaggctgaagcccttcacgttcccgagccggcggctattcaatcagctatgcaggggatggcccgtgtacgcagcctggtcaacaaggctttgtccgccgccgaacatggcgccaaaaaagcagaagatgagctgcgcgatgcacgcaccgcacgggagcgtagccaacgcgggcaggcgcaactgcgacccgccgtaatcgcattgcaacgcttgttggctgacgcagacattcatgccactcccatctgcgacttggtgaaaattggcgacccacaatggcaacccgcattggaaacctatctgagcactcatgccgatgccctgctcgtacccgaaaaccgggaattggatgctatccgcatctacaaggaacacaaggaagcccgcagcgttttcaaggtcaagctcgctctgccgtcacgcggaaggccatggatcgccaagagcagcggcacattcgccgcgcaattggttgagggcgaaaatcaggccgccgtgcgttatctgcaaggtgaactgggccaattgtccttggccgacagtgcagaacaactgcaagccggaaccaaagcgatttcccgcgacggcatggtcagttccggcggcggcgtggaacgcatccgcctgtccgcccccgacgaactattgattggccgcagcgatagcgatacacaacgccatgccgcccaaaaagcccttgatgaagcacaaggcgcgctgaaacgcgccaaggcgcaggttgatctcatctccccggtcgagcagcgtctggccttgtttgccgacaccgaaaccacttacccacggctggaagaactgttcacggcagcggcggcaggcaaccgcgaactgctcgacctgcagaatgctctgctttccacccaatcggatcgacttgtcagcctgaatgttaacttcgaggcggcctgcaaacagctgaccgatgcaagtgacaaagagaaacagctgattgaactcaagtcacgcctagctaacgaagtggacaacacgcagcgccgtatcgacgagtttgttgagcagcaaaaactggcagcgctagacgaagccaagacccgccagcatccgctgtacaacgccaacgaagtagatcgtcatcgtgttcgttacgacgaacgccacggtgaaaactggaatgaactgatgaggacattgcaaaccgccatcagcaatgcagacaaggcggcaaatacccacgatagcgatgcatggagcaaatttaccttctacctgcgcgacttccagttgcagaacaccgacatcaccaacaaccaatgggagcgcgcctacaagttcatcctcaacgacaagcagcgtctggaagatttggaactggcagagcaggaagccaaatcacaagaagcctatgacgcggcggtcaaggtgttccgcactgacgtggcgcaaaccctgctggaaggcttcgaggccatcgaagaacaaatcagcggattgaacgaggtattgaagcacgcaccagaattcagcaatggcgagcgttaccgcttcaaatacacgcccgtcgaacaacatcgtgcgctgtacgattttctcaaacgtgtacgcgagcatggtgctgccgaagaggacatcttcggcggttcgggtaaggtaccggaagagttcaaggctcttgtcgaaggcgatgccagctccgaactgttgcaggaaaccagcccgctcaacgatcaccggcgcttcttcagctacgacgtggaaatatttacccagaacaagtccatcggattgttgagcaagcgcctggggccgggctccggcggcgagcatcgcacaccgctgtatgtcatcttcggtgccgcgctggccgctgcctatggcaagagccgtggcagcaacgcgggtggcggcatcatgctgctggacgaagcgttcgagaagatggatgcacagaacgtccgcgccaccgccgactacctcaacgcgcttggcctgcaactggtcatggccggcccggaaacggatcaagccaagatgtcttcattcctgaacatctactacgacatggcccgctacggctcgcgcaccatccagctgaccaagaatgtggtcctggacgaagcacgcgagctactgcaaagcgacaattacctgctgcatccagagttgctggaacaggccataagcaagatcgcggaaaccgaacatgcctctgagtga

SEQ ID NO: 41835 - DNA, 1113 bp, Cellvibrio japonicus Ueda107
ttgctccgaggctcggatcgagccatccagacagctttcaaccctggctccgcgtattggcgacaaagctatgaggaacgccagcattgccacctttgcttcactgccgccgaacgtgctggtgccgtagggttgcaatgggccaaacaaggcggtgaagaccaccctttggagaaagttcgtctgctggacatgaacaagctggcctgctttcttggcactgccaccctatccgaatcggtacaggcagcacaaaccatcctgcatccttggctggccggatatccgcgtgttgccgaattgcttgaggcttgggctcaactgaaatcaccgcgtggactcggcaccgatagcgcccgcgatttcgctgacgcgctgagggcactggaagccctgaagcaagccgatgacgacgaccagatcgttcgcgttctcagccgtcaattgtttcagaatacaaagcgaattgaagcacttgcacgtcacattgatttgcttaccgccgagcgtctctcctcgtcggcaaggcaacaggaagaagtgttcggtgcattgggcctgctcaaggaaccccagccctttctggtggccggtacgggcacactggaattgcatccatcgcaacgctgcccaatcgcatggcccttcattggcgtctccaaccgacacatcaccggatatgcgggaacaccggcgtgggttctgagtatcgagaacctgaccactttccatctggccagccaagatacgaatgctgcctctggtctgattctcttcacgggaggtatgccatctcccagttggtgccgcgcttacgcaagcattctggactcgctgccagaatcgattcccgtctatcactggggcgatatcgatcaaggtgggttcaggattgcagcacacatcaggaagcagtgtatccggcggcatacctttcacccatggctgatggatgccgaacaattggatggagtgaggtattccgaagcaacggaagccacccgcaccaacatggcacgacacgctcgcgatgctggctgggaaccactctcccaaaaccttctgccaagaacgatcgagcaagaaggaatcgccatttgcctgccaatttga

SEQ ID NO: 41836 - DNA, 1539 bp, Cellvibrio japonicus Ueda107
ttgcttgccttcattctatttataaaatccctgaacaccatggatgcgtctgccctcgataaatcccaccgctatattgcctttcgtcaccagaacccggcctggcagttgctggcatcccgccgtgcgccgctggtgttggggtgtttgcaaagcctgtttgatatcgccagtgacggtattgccgttgaggatgccctgcaaaccctggcgcagatgctggtgacttatgccagtcaggaggagtacggcatagaaccggacaatacccagttgcaagccgggcgggagctgcgggagtggatcaagcgggggctggtgatagagcgggagaaccggctgtacgctaccgatgcgctgcaaaccgccatcggttttgtggagtcgctggacagccggattatgacctcgaccgcttcgcgcctgtcggtggtgcagcgggaaatcgaaaacctggaggtggccctcaatcccaaccccgccagccgcatggccagcctgcgccgccgtattcaggcgttggagcgtgagttggccgaggctgaggcgggcaaggtgccggtattggacgaggcgcaggccgttgaaggcattcgtgaggtgttcaatctggccacgggtctgcgggcggattttcgccgggtggaggattcctggcgcgaggcggatcgggagctgcgccagtcgattatcagcgagcagtaccatcgcggcgaaattgttgaccgtttactgcaaggccacgagaacttgttgaatacgccggaagggcgtgtgttcgagggtttccagcagcagttgcagcaacgcgtcgagctggatcatatgaaggaacggctgcgcacaattctgcgtcatcctgccgccaacgaggccttgaaccgcaaccagcggcgggatttgcaatggctggtgatgcgtctggtcaaggaatcccaggcggtgtttcaggccagagcgcgcagtgagcgggatgtgaaaggttttttgaaaaccgggctggcggccgagcatcaccgggtaggcaacctgctgtccgagattatgaacgtcgccctcagcctggattggcagcggcaatcggtacggcgcatgcccacacctctaccgcccgtcggaatagcgttatccggtttgccgttgatcgagcgcctgcgttttaaatccctggatgaggatgcggcgggtgagcttgatctgaatacggtgaatgccgaccttgaccagattgatgacgacttctgggctgcctttgatggcctggatcggcaggcgctgatccaggataccctcgcaaccttggccaaggcaggtaaacccatgaccattgcggagctggccagtgctctgccgccagtgcaggatctggaaaccctggcgctgtggctgggcatggcgcgagaggctggcatagccgtggaagacggcgagccggaagtctttgagctgctggatgagcaggcacagcgctggcgttttcgcgtaccccgcaccgggttgagccacgaggccctgtgcgccattgagtgggagttgtga

SEQ ID NO: 41837 - DNA, 762 bp, Cellvibrio japonicus Ueda107
atggcaggtatttttgaccacataacaggccaaccgggtgcgccgaatgccgccgaagatgcgccgataaccgatgtcggagatcatgccccgccaacggaaacctcgccgctgagcgacgtctcgcgcacccacaaacgcctgcgtgacgccgcgcaggaactgctcaaatacggcctgctggaagaagcgcaaaaacccaatctgtatcgcattgtcacgacccatgtcgaagaggtatccaccatcctagagccactggacctggcgctggggctggacgaggtgcgcggcctggtgtacctgcgtgtacgtcaggatgaggcagcggagcaggatgacgactgggcacaccccctggtgcgacgccagcggctgaacctggaacagtcgttactggtggcgattctgcgccagcactttatcgcctatgagcaggagtcaggcaccggcgccggtgaagcgctgattgcggtggatgagctgattccccaattgcaggtgtacctgggcgatctgggcagtgacgcgcgggagcgcacccgggtcattcagttgctggatcaactcaaaggccacgggctggtgtcaagcctggacgcccacgagcgggtgaccatccggccgattattgcgcacctggccaacccggaaagcctgcaagccttgttggcctggctgcgcgagcaagcggcaccatcgtctgacgccgctgatggtaaggcggctggcgaagaagacaatgaggataatgccgaatga

SEQ ID NO: 41838 - DNA, 3306 bp, Cellvibrio japonicus Ueda107
atgaatcaggcaacgctttgggtggacaacgacacctacatcctacgccagatggacgtgttcaactggggcggttttgatggcctccatcaggcggccatcgacccggcaggcacggccattatcggccccaccggcagcggcaaaaccaccctggtggacgcactgatgaccctgctctgtgccaacccgcgctacaacctggcctccaccggcggccatgaaagcgaccgcgatctggtgtcctatgtgcgcggcgtgtccggccccggtgacggcgggccggatcaatcccatatcgcccggcccggtaaaacggtcacggccattgccgccaccttccacaatggcgaaaagcaggtgcgtttgggctgcctgttatggtttgaaggcaccagttcggtcgcgtcggatctgaaaaaactctggctgttcagcagctcgcccgaacagacactggaacactggttgactgtgcatcacgagggcggcatgcgcgccctgcgtgctatggaaaaaaccgacacaggcatctggactttccccagtaaaaaatcctacctggcgcgcctgcgggattattttgatgtgggtgaaaacgcgtttaccctgcttaatcgggcggcaggtttaaaacagctcaacagcattgatgagattttccgtgaactggtgctggatgaccatgcggcctttgatcgggcggctgaagtggtcaagggttttgatgacctgaaagacattcacgaagagctggaaattgcccgccgccagcaacgcagcctgataccggtagccgaaacctgggaggcttatcaaaagagtgagcggcaactggccgaacaggaaaccctgaaaaaaatcctgcccgtctggtttgccgaacaggcccatggcttgtggcgacaggaagccgagcgcttgcaggccgagcagcaaagcgcacagcaggccgaagcggcactggccgatgaacgccagcggcagaaaaaaacggtggacggtttacgtcaggcttatcttcaggtgggtggtgccagtgtcgaagatatgcaagagcgtatcgccgaatggcgcaatacccgcgcccggcgggaaagccatgctgcccagtaccggcagttagtcaataccttgaagctccctgataccctcagcgctcaggcattaaaggcgaatcaacaggaagcgcaaagccgcagcgaacagttgaaaagcgacctggccagtgcccaggaaaacgcctatgcaaaaggtgtggcagaaaaagctgtgaaagatgccttagctcagtggcagcaggaatatcaggaagcgaaaaacagccccaactccaatctggaacccaaattccagcagtttcgcactgcgctggcgcaccaactcgggttaaccgaagatgccttgcccttcgtggccgaactggtacaagtcaaagaacacgaacgcgcctggcgcggcgcaattgaacgggccatcggcagtgaccgactgcgcattttagtgccgcctgagcaaatagaagatgccctgcgttgggtcaaccagcgccataaccatctgcatgtgcgcttactggaagtcaaacagccggagaagcaaccgcgcttttttgaagacggctacacccgcaaactggactacaaagaccatccttatcgcgaagcggtcaaagacctgctcgccggtcaggaccgccactgcgtcaacagtccggagcaactgcgtaccacgccgcatgccatgacggttgaaggcaccatgtcgggcaaaacacgcttttttgacaagcaggatcaaaaacgcattgacgaagactggctcaccggctttgacaaccgcgatcgcctggcggtattacaagagcgcatagcggccgcccgcacagaactgcgtgacgcctccgcccaagttgaagctgcccgcgcccgagagtccgagctgagtgcacaacagcggctcttgcaggcattgctggcgctgaattttgacgacatcaatgttcccgaggccgaccagaaattgcaggatctggaagcgcgcctggtacaactgaatgctccggattccgatatagctgccgcgaaaaaaaacatgcagttggcggaagagcagttggaggttctggatcagcagtaccgtgaggcaggcgtcgccgtgtccactattgaacgcgatttcaagcaggccagcacccaacaacaaaaagcctggcagcgcgcgcaagttggtttgaccgatgctgatcgaatcctggcaacagctcactttccggccatcagcgcaccgcaactgggtgatttgtacgatctggaaaaacaacagcaggacagcctgcaacaaagcattgacacgctcaaagaaaaactcaggaagctggaatccgagctggtcaaaaaaatgtccgacgccaaaaaagaagaccggggtgctctgtcggaagtcgggcgggaactggaagacgtgccccaatacttggcgcgcttacaggtactgaccgaagaagcactgccggaaaaactccggcagtttcttgagtacctgaataaatcctccgatgaaagcgtcacccaactgctcagctatgtggataacgaagtggcgatcatcgaagagcgtatcgaggatctgaacaacaccctgcggcgagtggattttcaacctggccgttacctgcgtctggtatccggccgagtggtgcatgaaagcctgcgcagtctgcaaaaagcccaacggcacctggcctcggcccgcttcaatgacgatgccggtgagagccattacaaggcattgcaatatctggtagcgctgctcagagacgcttgcgagcgcaaccgtacccagggtgccaaagccctgctggacccgcgcttccggctggagttcaaggtgtcggtgatcgaccgggaatccggcagtgtgattgaaacacgctccggttcccagggcggcagcggcggtgaaaaggaaatcatcgcctcctatgtgctgaccgcttcattaagttacgccctctgccccgatggcagcagtcgtccattgtttggcaccattgtgctggacgaggcattttcccgcagctcccatgccgtggccgggcgcattattgccgcactgcgggaatttggtttgcacgcgctgtttattacccccaacaaggaaatgcgtttattgcgcagccacacccgttcggccatcgtggtgcaccggcggggtctgtcctccaccttaacatccctgagctgggaagcccttgacgaattccatcagcaacgcagcaaaaaccaacatgaagtcgcccgctga

SEQ ID NO: 41839 - DNA, 1146 bp, Cellvibrio japonicus Ueda107
atgaagtcgcccgctgacctcagtcaacgcctggcgcggcaatggcataacaatgttctgcgggaagcgcgattactgtcaccgtctgcctggccgttggtattgtctattggtagaccaacggccagcgtatttgccgaagcgaccggtttggtacaccagcatgtgcaagcctggcagcacgtcagtgtgggtgaggtgcaatgggaaagcgttagctatcgcgctggcgcagacgctgtgcgtattcccgtgcgctggtgcctgcgatccccttcggaatggatcgcggccgctgccgacgcccttgttacagaagagtatgctcaacttgaacaattgattgagcaggtggataaaacctttcaccgccagctggttcggcagcgggcgctgtggctgaaaaaaagccccgaagccgttatccaaactgcccggctggcttcacgactatcaccgggttgtgccgaaggaaaacctttacggttgttatccggtcacggtgtcgacaccaaatggattgaacgcaacggtggcttgctaaccgcatttttggacgagcgctataaaggcgcggccagtgagcagggtttaattacctttctggatgccctggatgaaggcgatcactgggtattggtagcacctttgtccgaaggcttgctgcccttcaagcgccagaaggtcaccaccgccgagctggaaaaaacagccctgcctggctcacgcttgctggtggtggaaaacgaacaatgcctgcacttgctgccgaacttgcccgagacaatcgccatcctcggcgccggcctggacctgcaatggctgtccgcaaaacacctgcaacaaaaaaccatcggctactggggcgatatggatacctggggcctgctgatgctggcccgcgcgcgagcttattgtccacaggtgatccccctgctgatgaatcaagggttatttgatcggtatgcagagggaagaacagtgcaagagccggtcaccgcccaaccgatgtcccccgatggtttgactgctgaggaagccgatttttatcaatacctggtgcgccagccgtgcgggcggttcgagcaggaatttttgcctggcgaggtggtggaaaaagcggttgtggggtgggctaaccagtaa

SEQ ID NO: 41840 - DNA, 1464 bp, Cellvibrio japonicus Ueda107
gtggccgaatgcctgcgtttactatatcaacgcctctatactgatctgcgcgattatggccatgccatgaatcgcgaacagcttgtggatatttttaaggaagccattgcccgagccccgatcctggatattgataatggggaactaaacgacggtgaggaagccactgagggacgctttaaaagccagcgagacctggcgatctttatcatcaaccgcctgattgacaacggctggcttgaaaaacaagtggacgaaaccagtttgcagagcagttatggtttcagtcgtatggggcgtttgtttacccagccctttgctgatcaccatgccaatgaatttcgcacgcgcaatcgcaacacgcgcaatacccgcaacagtttgcaagcgttttatgaacagggtgaaatacatgacttgctcgatgcttatgagtattccgagcggattatcagtgatttcaccgatgtgattgccgaactggaagagcgcaagcgccagttggtacgtgaggttgagtcgcgccagctaatccagcaggccagcgatgagtttttcgattttatggaaacggtattcaagccagacctggaagtgcgcttatctgctgacagtgtggaaaagtaccgcgaccaaatcggcgatatcatcactaaaattcgccgcaagcgaaaatatggccagggcgatcctgaaacggctgccaaagattggcgggccgtcatggaaattcgcctgcgtaaagccttgccacaaaaggttgtatctggggtatccctgttggaaaccttgttgcaaacaatagattcccgcctgaaaaatgcttgcgatattatgttgcctgccttgcgtcgcgccttaaatacttttacccagcgcgctgacatcattattcgccagttgagctatatcaatagtcgtggccaggatgacttgatggatatttatcgctccctggcgcatttgccggtcgaacagcaggatgccgttttgttgcagcagggtgaggccattgccgggttgcacatgggctttatcgaccctgcgcaaatccaattgcgcgccaggcgtaacccccagcttattcgctctaccctggaagaagaaaaggccctggatatcgacgcgcaaaaaaccttgtttatccaacaggcactggatcgcgcgtttattttccaatccagcaacctgcgcgattatgtctatcaggcgctgcgagagcgcggtgaaatcagcagtcgtgaactggtggctgacagcatgcaagcactgctgaatctatcccatgcggttgaggttggcgctgcgggtaatttgtcctcccgatactattttcgggtagaacaggaggatgcctggctggcagtggctccgcgtgtacaggatggccagtattttatgcgtcgcgatgaattcataattcgcctgttggacaaccaggctttatccgagattttctcatga

SEQ ID NO: 41841 - DNA, 765 bp, Cellvibrio japonicus Ueda107
atgagtgattccctgacccaggtactccaggcacaactggacaaacataatatatcgctggataactggcgcgagcttatccagcgcttgctcgactatggtgtactctgtcgcgatgatagccaggtagaagctgagctctacgatcgctttatccgtatccaggcgacagttaatgaatacctggggttgatcggcttgcgtttccagcacgatccccattttcgttttgttcgcatattaccgccgggtgcgcgtatgcctggtatggatgacgaaagtgatgagccactcaatgcgggcttgcgcaatcgcctcaaccagcatgaggtagccctggtgttggtgttgcgtgcggaatatgacaaggcattgcgtgaaggcagtattgatgagcaggggggtgcaaccttgtctcttgaagcaattgccttggcaatgaaaagcctgttgcgtcgcagcttaccggaaaacctgggggagcgtcgtcaaaccttccgccgtttacgccaaatgcgtttaattcatttcctggcggaagccgatatagattccgcagagagttggatcaaaatccgtcccttgattatcaatctggtcagtaatgaatggctggcacagattcgcagccatttggcagattcgatgctattactggatgacagtgaagcccatagtgaacctgacgtgaatgaggaagatgacaggggcccaggaaagcaatcaccacacttgtcacgttccctgttcgcggttgataactga

SEQ ID NO: 41842 - DNA, 3654 bp, Cellvibrio japonicus Ueda107
atgtacctgaagaaatttatttacgttaactggggtaatgtacctaataccgaatttgaattcggccccatcaatctgttttccggcggtaatggctcaggcaagaccaccgcggcagatgccatacaaacgattatgacggctgcccatgacaatctgttccactttaatcctgggcaagatgaatcgagtcaacgcggccgtggcggaaaactggtacgaaccctggcatcctatgtattgggatgtgatgatggtgcctatgcgcgcccccaggggtgtgatggttacctcgccgctgtgttctatccaacccagggtgaaagcgctgaaccttttacggcactgattgccatgcgcgcttttctggaaacaaccgggcaggggagcgctttgcaaaaggtggcgcgcctggaggacagtgaattctatattctgccggatgttgtgcttggcttaaaagatctcctcaaggaagaaaaaacacacaagtatgtgatgcccctggataaactctatgccagcctgcgccgccaatatggccagcagcaggtggaaaaatacgataagaaaaagtcttatctctgtcgtctctacggtattttacgcggcaaaaaagatgccatatcagagcgcgaagccatgagtgcggcgcgcgctttttcccgctttatggcctataagccaatcaagggcattgacgaatttgttgcgaatgaaatcctggaataccgcgacctgggtgaagctattcgcactgtttccaccatgcttaaacgtattcacacgatggagactgatgcgcgccagttgcgtcagggcatagagcggatggcacaaggtaaaaacctggccgatcagtttattgccggttggctggaacagcaggtattgcaatactccctggccaaacgtcgttttgatgattcccagcgcttgtatctggatgccaaacataaacaacaattgttgcgtgaaacggcgaatacccaacaacaagcgctgtccgcctgcgaggcccagcgcgatgaaatccatcaattaatcctggcagccacagcacgtcgtttgggtgttccggcactgcgcgataaagaccagttagagcaggaaaaacaaacccaggaaaaattcctgcaaacccaaataccggagctgcgtcgccagcaccagcaagcacaaaccaatcaggatgctgcaggccagttagcccaggctttgcgtcaaacatccatcagcctcgatgtgcccggtttaaaagaggccggtttatcaataattgcaaagacactggaaacagaatgcaccctgccggatttacaccagttattaaaccgcgactggctggataacaatccgttagatcagcacctggatgcaattctgacattacaaaagcaccaaaaccattttgtggccagtctgttccagattgacagtaatgctggcaccattcgtcttaacctgcgcgatcaattggcgcaagagcgcgacaaacgcaagcagcaggccgagcgcctgcagaaatccatggagcaaaagcgccgtgatatccagtccctggaagcgcgccaggtgagctatcccggatttgtgcgggcagcactggaggcaattggcgcacaatgtcccaaagccgatgccagggtcctctgcgattatgtagaagtcacagcgccagagtggcaggctgcaattgagggttatctgggggctgcgcgttttggcattattgtggagtcggaatacgaagcagaagcgattgcactggtgcgcggtttgagtgggcaagggcagcgcgcgcggattatccagggcgataaagcccgtcttgacctggagaaactcacggacaacgggcgtgaatccattatcgaggtgatgcgttttgcccatgcaacagccgaagcctatgtcaaagccagctatggcaatgtacagcgggtagaaactgccagggacctgaaaaatacgcgccgtggaataacgcgtgatgccatggggtcgggtaactacgctatgttccgttgcgatatggcagagggcgatctggtgtttggccagggcgcgcgcgaacgcgctctggaggcaaaacgccaggaattccacaatctggttagcgaatggcagtcagcgcaggctcatgcagaggagtgccaatcgctattatttgccatcgatcaattaaaagtccttgcttatgccgagatcctgcaaaccatggtgacggcacagcataaaatccaggcgctggatgccaagctgcaacaattggatttggcagatacccaggcgctggagcaggaactggcggacttgcaggcgcgcttgcagcaacaacagttgcgctatcagcaattaaacaatacccatattgattgccgtgctgagttaaagctggcagataaccaatgccagaaattggacactgagcagaacaagaccctgcaagttgtcgatgcctgtgaatccaatctgcaaggtttggttgcgctctggccggattttgatgctgaggctcgcttgcacgtggctgatgaagctgttggccagcatagccttggttattttgagagtcagcttgcaggtgtgaataccgaattaaaaacactcctgcatcgcctgcagcaggctgttatgcagcacaaccagttttgtggcaatgtagacacaattttgtttgatgtcgattataacgatgatctgggctcacaaaactttacggttatttgtgatatccgtcgccagtttgatgcgctctacaatcgcgacaagaatcatatcctggctcagcgccaccaggagatcgagtccctgcgccagagttttaacaatgcgtttgtaaccaacctttgccattccatttatcaggctatcaatgacggcaagaaaattctggaagaccttaaccgtgaactggagcatcatcgttttggtgccgatcgcgaacgcttccgctttgcttgggaatgggtgcctgaattcagggattattggcagttctttaaagcggtgattgatagccctagcctggagcagggcgaaaacctgtttaaccttgccctggatgagaagcaccaaaaagtgcgcgagcggctgatggcgatgctgctggatgaagatgaacaaaaagccctgcgcgaattaatgcgtattgccgattaccgcaattatcgtcgctatgaaatttataaagagccggagggaaaatcacctattccgctcagccagtatggcactggctctggcgggcagttggaaacccccgcttatattattcgtagcgcagctattacctcggcatttcggtttaatgaagggaacagccacttgcgtatggttttggtggatgaggctttctcgaaaatggatgagcatcgctcgcgcgaggtgattaactatttaacagaaagcctgggcttgcagctgctatttattatgcccagcagcaagtccggtccgtttatggatttgatttccaaccagtttgtcttcagcaaatgcccaaccgcggaaccggtgggtgaattgaagagccgggtcatgctggatcgccaggtctgtgaccaggaaaaaattgccctgttaatggccaaccatcgccggactattcgccaacaggcagcgctggattttatggcggaagtggaatag

SEQ ID NO: 41843 - DNA, 1485 bp, Xylella fastidiosa M12
atggaccatgccaccctgaccaccttgcgtgagcggcaccccgcctggcggttactgacctcaccgcatgcacccctggtcacaagctttctgcaccgcgtgttcgtcgcaacgaacgcgcgcctgctgagcgagaccaagatcacccaggcactggaagacacgctgtatgcgctgcgtgaacacgaaggaccggaggcctacccgaagggcgccctggactacctcaatgactgggccgcacccgacaaaggctggctacgcaagttctacacctcaggcacggatgaagcgcagttcgacctcaccccggccactgaaaaagccatcctctggctgctgtcactcactgaacacacatttgttggcaccgaatcgcgcttgctgacactgtttgcgctgctggaacaaatgagcaccggtaccgagacagacccaatcaagcgcctggacgaactgcgcaagaagcgcgacgcactggacatcgaaatcacccgcgtcctggaagggcatacaccgctgctggacgacaccgcgatcaaagaccgcttccagcaattccagcaactggcgcgtgagctgctgtccgacttccgccaagtgcaagacaacttccgccagctcgaccgcaaggtacgcgagaaaatcgcactgtgggaaggcaccaagggcacgctgctcgacgaaatcatgggcgagcgcgatgccatcagcgattctgaccagggccgcagcttccgcgccttctggaacttcctgctctccagccgacgtcgcgaggaactttccgagcggctgggccaggtactggcgctgcccgcggtggcggcgctgcatccggagccgcgtacccgtcgcatccacgacgactggatagaagccggcgaacaaaccctgcgcaccatcagccaactatcgcagcaattacgccactttgtggaaagccgagcttttctggagaaccgccgcattatggacctgctacacggcattgagcgcaaagcactcggcctgcgcgacatgacaccctctggcacagtgatgtacctggatgcgatcggggcggacattcaactgccgctggagcgccccttattcaccccacgcgcaaagccgcgcctggctgatctggtccttgcggccggtacagacgacatcgacaccacccccttgtttaaccaaattgtgatggacaaagcacgcctgcgcttagccatccaacgcgcactgcgcacccaatcccagatctccctgcgcaccctgttgcaaaccgagccactgcaacagggtttggccgaactggtcgcctacctggagctggcccacaccagcaacagcagtgatccggacggcttgcgcggcatcgtcgacgaaacggtagaagagccgatccgctggcaggccaacaatacagtgggtgaaacagtcacccgcgaggcacgcttaccccgcatcatcttcacgcggcgtgccccctcgcactag

SEQ ID NO: 41844 - DNA, 705 bp, Xylella fastidiosa M12
atgaaggacacgctgcatgagagtgatatcgtaacgaccccacccaacgcactgccgacagtgcccgaactgtcgcacctgatggtgtacttgctcaaaggggtgctgtaccgcaacgaagaagaacgcctatggtccagcttgctgcgcctacagacacaggtcagagaacacaccgccgtgctgtggctggatctagtactggacgaggccgagggctacgccttcctaaagagccgccccgacccggacgccgccgaaggcagtgcccgcccgcctcggctgatcgtacgtcgcgcgctgccctaccaggtgagcctgatgctggcactgctgcgcaaacgcatggcggagtccgatgcgcgcggcggcgacccccggctggtgctgacacgcgaggagattgccgaactgatgcgggtgttcctgcccgaggccaccaacgaggcacggctcattgatcagctcgacacgaccatcaagagggtggtcgagctggggtttttgcgccccttgccctccccctccagcagcacaccaaaccataacaactacgaagtaggccgcatcttgaaagcctttgtagatgcccaatggctggccgaattcgatgcacgattggaggcctatcatgccgtgccatcggacgatcaagacgaacctgacaccccgcctgaagcagaaggggagtcaggcgatgcgtga

SEQ ID NO: 41845 - DNA, 3435 bp, Xylella fastidiosa M12
atgcgtgagacctccacactcggcctaaatttcgttgccgatgacaagcgcgtcggcttccggctacagcacctagaagtagtgaactggggcaccttcaacacccgggtgtggtgctacaccctgggcgggcgcagcggcctgctcaccggcgacatcggttcgggcaagtccacgctgattgacgcaatcaccaccctgttggtgccagcgcagcgcgtggcctacaacaaggccgctggggccgatgcccgcgaacgctcgttgcgctcctacgtgttgggctactacaagagcgaacgcaacgatgccaccggcaccgctaagcccgtagcactgcgcggtacgtcggactactccgtcatcctcggcgtcttccacaacgtcggctatgacaaggtcatcaccctggcccaggtcttctggctgaaggactcgcaaagccagcctgcccgactgttcgtggtggcagaacgcgcccttggcatcgccacggacttcaacaacttgggcggcgacatcaagaccctacgtaagaagcttcgtggtgcagggtgcgagctgttcgacagcttcccaccctacggggcgtggtttcgccgacgcttcggcatccaacacgagcaagcgttggagctgttccaccagaccgtctcaatgaagtccgtgggcaatctcaccgacttcgtgtgcagccacatgctagaaccctgtgatgtgggcagccgcattgaggcgttgatctgccacttcgacgacctggaccgggcgcatcaagccgtgctcacagccaagcagcaggtgaagttgctcctccccctggtcgacgacggccagaagcaccagacgcagctagccaacattcaaaccttggaagctggacgcgacacactgcggccctacttcgcacagctcaagggtgaactgctgaagcaccgcctggacgcactagcagccgaagcggaccagctagctgtggagatccagcagctgaaagaacagcgcaagaccgcagacagtaaagtcacccaactgcaacaggatctgcgagacaacggcagcgaccgcctggaaacgctggcggcagagatccagcaactggagcaaaccaaggcacaacgccaaaagaagtccgaccgctaccaaacgctactgaccaagattgacgagacagcgccagccgatgcaataggcttcttcacccagcaacagcgctttgcgcaacataccgaggaattaaacgcagccattgcgacgttgcataacgacaagagcgagaaggactttgcgctccgcaatgctcggaaagatcacaacaccctattggcagaaatcaacagcctgcaacagcgccagagcaacatcagcgccatccagatccgcatccgtcatgatctgtgtgcggcattgtccattgatgcggaggaattgcctttcgcgggcgaactcatccaggtgcgtgaggacgcacgcgattgggaaggcgccgccgagcggttgctacacagctttggcctcaccctgctggttccggacgcgtactacaaggctgtggccacgtgggtgaaccacaaacagttgacgggccgactggtgtatttccatatgcgtccacgtaatacgacgcaggatgcagcgttacatgcgcagtcgctggtacacaaactcatcatcaaaccggagtcaccacactacacgtggctgcaacaggaacttcagcggcgctgcaacgtcgtctgctgtgacaccattgagcagttccatcgtgaggtccgcgccatcacgcaggccggccagatcaaagaccccagtggccgccatgagaaggacgaccgccatcgcattgacgaccgcagccgctacgtcctcggctggagcaatgccgacaagctgcacactttgaacgagcaacggcaacacctggaagacagcatacgcatgttgggagaagacctcggcaccattcagcaggaatgccagaaacaacaggaacggctggatgcactcaacaagctgggggaatacccggactttgcggacatcgactggatgagcctggtccgccagattgccggactcaaagaggaacaggcacagctccaagccacatctaacattttgcaaatcctgcaacagcaactcacagaggcgcagacgcaagtcaagctgctgcatggcaagtgggaaaacgcgttgcgcgaacagggcgaggtcaatagcaaacaaaaaacggcgcagcagatgtggaatcaggcccgtaacgtttgggatgatgcgccactgagccaagcgcagatcgcgctattggcttgctggcgccagcaagcgctgggggagcacctgctatcggtcgaatcttgcgacaaccacgagcagcaagttcgccaatggctacaaaaacgtatcgatgcggagaacgctcacctgagacaactaaatgaccgtattacaggcgccatgcaccgcttcaaagatcagttcaaggccgagaccgtggagatggacgcagacctggcggcgctgccagagtatgaacggatgctcaacggcttgcaggaggacgacctgccccgattcgaggcgcgcttcaaagaactgctgaacgtcaacaccatcaacgagatcgccagctttaacgcccaactcaaccgtgagcgggagacgatcaccgagcgcatcaaggacatcaaccaatcgctgcacggcattgactacaaccaggatcactacatcaaccaatcactgcacggcattgactacaaaagggggcgctacatcacgctgctggcacaacccagcccggacgctgagatccgcgacttccagcaggatctacgggcatgtaccgaaggcacgttgaccggttcggacgatgaacagtattcggacgcgaaattcctccaggtcaagcgcatcattgaccgcttccggggccgtgaagggctgtcggatgccgaccggcgctggacggccaaggtgaccgacgtgcgcaactggtttgtgttttcggccagcgagcgctggcgcgccgatgagagcgagtacgagcactacgccgactcgggcggtaaatctggcggccagaaagaaaagctggcctacaccgtgttggcggcaagcctggcctaccagtttgggctgaagtgggatgaggtgcgttcagaatcgttccgcttcgtgattattgatgaggcgttcgggcgcggctcggacgagtcagccgagtacgggctgcgcctattcgaaaagctcaacctgcaattgttgatcgtgacgccgctgcagaagattcacatcattgagccgttcgtctccagcgtgggattcgtgcacaacaagggcgggtgcgactcgcagctacgctgcctgtcgattgaggagtaccaggcggagaaaacaaatggaagcgggccgggaggcggcaccgccccatga

SEQ ID NO: 41846 - DNA, 1218 bp, Xylella fastidiosa M12
atgagttggaccacaccagccagtctgtacgcccaggtggaacgcctgtggaagcggggcaacttgctgcgggcgctggtcacggacacccacgccatgacgtggccgcacctcctgaagctgcgggtacccaacgctgcggatctgtccgagcgctttcaggcggtgcgtgattgggtgcaggccatcgttggcaccccgcagattcggatccaatggcgggaatggaagcaccgcgtccaagggacacaacaggttcctgcagccgtctatctggacaccctgcaagacgcgttagctttcatcggtaagacgcatgaagcgctgcagtttgaagtggtgtggcagcagaccgcagccgcgcagccagtgctcctggcgtggctgttacgacgcccgacccaggcgctggaggtggccgaccgctgggaacgtcttttagccgtggtcgcctggcttcaggcgcatcctcgtccaggcgtttacctgcgccaagtggatgtgcccggggtggacagcaaattcattgaggcgcacaaaagcgtgttgaccgagctgctggacttggcgttgccgccagagagtatcgaaacggccgccagcggcgtgcgtcagttcacgcgccgcttcggcttcctcgacaagcctgtgccgatccggtttcgtctgcttgacgccgcgctgcccggcctgccgggctgggcagggctgccggacatcagcctagacgcggctcacttcgcggcactgacgctccctatcacgcgcgtcttcatcatcgagaatgagatcaacttcctcaccttccccaagggggccggtgcgatcgtcatcttcggcgctggctacggctgggagccgctggcacgcgctgcgtggctgcatgcctgccaactgtactactggggtgacattgatacccacggcttcgccatcctcaaccggctgcgtggctactttgggcacgtgacttctgtgctcatggaccaggacacattgttggcgcatcgcttgtactgggacgaggaatccgagccgacgcgccaggccttggagcacctcaccgcagaagaggctgccgtctacgatgacctgcgatacgatcgccaccagcccaggctgcgcctggagcaggagcggattggctttcgctgggtgtgcgatcggctggcctgcttgctctcaacagcccacgtagcaccgccccaggatgcgtaa

SEQ ID NO: 41847 - DNA, 1473 bp, Xanthomonas oryzae pv. oryzae PXO99A; identical to SEQ ID NO: 41645

SEQ ID NO: 41848 - DNA, 699 bp, Xanthomonas oryzae pv. oryzae PXO99A
atgaattggcaggctgacaacgccgaaaccgacgcgcacgcgccgagcgcccacgccgatgcggctgtgcccgaggcggacgccgcaacaggcctgtttccgggcgatagcggtgcgttgccggtggatgcgcggcgcgtgctgtgccaattgctcgccggccccagcgtggacgtgcagcgccacagcaagttgtggccagcgttgctgcgccatgaagcggccgtgcgcagccgcctggccgatctcttcctggaattggtgctcgaccgcgacgccggcgtcgccttcacccgccaggccgacaccggcgagctcgaagcgccggtgctgctgcgctctctgccgctgaccttcatcgattcggtgttgctgctgcatctgcgtcagcaactggccgaagccgatgcgcggggtgtgcgtgcggtggtcgaagatgcgccgttgagcgaggccctggccgtctacgagaagaatctgtccaccgaccgtgccggcttcatgcgtcgggttggcaacgccattcagaagatgaaggacaaccacgtgctcacgcgcctgcgtggcgaagacaaccgctacgaggtttcgcccacgctcaagctgctgttctcggccgaggatgtgtccgcgctggcgcagatctatcgccagctgcgcgagcagcccggcaccgtaggcgatgcagagcgcgcctga

SEQ ID NO: 41849 - DNA, 3432 bp, Xanthomonas oryzae pv. oryzae PXO99A
atgaaatcttcttcctccagcctgtttgccgacgatctgcccgagccgcgcgtgcagcagttccgcatgcgccgcctgcaggtccataactggggcacgttcaacggcttgaccgacgtgccgatcgccgcgaagggcttcttgttcgtcggccgttccggttcgggcaaatccacgctgctggatgccatgtccgctctgttgaccccgcccaatctggtcgacttcaatgccgccgcgcgcgaggccgagcgcactggccgcgatcgcaacctggtgtcgtatgtgcgcggcgcctgggccgaccagcaggacagcgcctccggcgaaatcgccacgcaatatctgcgcaagggcagcacctggaccgcgctggtgctggaataccgcaacggcgagggacgggtgatcagcctgatacggctgttctggatcgccggcagcggtgcggcggcggccgacgtgcgcaagcattacatggtggccgagcgcagtttcgatatcgccagcgaattggtcggcttcgatctggatttgcgcaagctcaaggcgcgtctgggcgacgacatcgcccacttcgacaatttctccggctatgccgagcgcttacgccatcagttgggcatcgccaacgagatggcgttacggctgctgcacaaaacccagtccgcgaagaatctcggcgatctcaatgtgttcctgcgcggcttcatgctcgaggcgcccaagaccttcgacgccagcgagcggctggtgggcgacttcgccgaactcgatggagcgcatctggcggtggtcaccgcacggcggcaggtcgaaacgctgctgccggcgcgtgcgcattacgaggacttgcagtcggtgcaacgtcagcgcggccgcttgcaggaactcaagctcggcctggacccctatcgcgagcaacgccggcttgcgttgctggatgcgcgcctgcatgcactggacgtcaacgaccagggcctggccggcgaggagggccaacgccgcgctgcagtggataaccaccaacaacgcttgtccgatctggaggcccagcgccgcagccagggcggcgagcggatcgacgcgctggaacgcgagcagctccaggtccagggcgaacttgcacgccgcagcgacaagcgtgccaaggccgaacaggcctgccgccagctcgagcagactttggccgacaacgcgcatggatttgccgagcagtccgcgcaggcgcgcgccgcgctcgaggacgggcagcggctggccgccgaacaggacgaggcgatcggcgagcgtatcgccggcaagcgcgaggacagccagcgctttgcgcaggtgcgcgccgagatcgaggcgctcacccgcaatccctccaacattgctgcgccgatgcaggccctgcgtgcacgcctgagcgaagaaaccggcattcccgaagccgcgctgcccttcgtcggcgaactgatccaggtgcgtgaggaagatgccgcctggcgcggtgccatcgagcgcgtgctgcatgggtttgcgcaatcgctgctggtggacgagcgccattacgccgaactggccgagtgggtcaaccgcacgcatctgggctcgcgcctggtctattaccgggtgcgcaataacgaacaggcgttttccggccgcgaacccggcagcgcgtcgctgctgcacaagctgcaattgcgcgagcatccctttgccggctggctgcggcgcgaactgggcaagcgtttcgactacgactgcctggagagcgccaaggccttgcgcacggcagagcgcgcgatcacccgcgaaggccaggtcaagcatcccggcgaacgctatgaaaaggacgaccgtcatgcggtcggcgaccgtcggcgctggctgctgggcttcgacaaccgcgacaagctggcactgtacgagcgcgaagccattgaactggcacaacgcatcgccgcctgcgatgccgacgtggccgagctgcgtgcgcgccgcgaacgcgatgccagccggcgcctggcccagcacaccctggccaacctggcctgggaggaaatcgacgtcgccgcacagctgcaacgccgcgacgatatcgccagcgccttgcgccagctgcgcgaaggcgatgccaacctgcgcgcgttgggcgaggcgatcgagcgcacgcgcggcgacctggaacaggccaagcgcacgttcgacggtgtgcgcgaggaacggatcgcgctgggggtcgagcgcacgcgcctggaaaagcaacgcctgcactgcgccgacgccgatgcccgggtggtcacgccgctgcagcgcgaggggctggaggagcgcctggccaacctgggcgcgcttagcctggacaatctcgaagcgcattttcgccagatcggcaacgccatcgccgagcagaccagcgccagcgacagcgagcacaatcggctcgaacagttgctgctcggctgctttcgccggtatagccaacagtggcccgaagacagtggcgacttcatcatcagcctggccggcgccgaggattttcttgcccgcctgcagcgtctggaacgcgatggcctgccgcagcacgaagcgcgctttttcgagctgttgcagagccagagcaagaacaatctgctcgccttgcagcgccacaccgccgaagcacgcaaatcgatcgcccaacgcctggacgaggtcaacgccagcctggagcaggtgccgttcaaccatggcaccttgctgaccatcgaactcagcgatcggcgtttgccggaggtgatcgacttccatcaacgtctgcgtgatgtgctcggtcaccaccagaccgaccagcgtgacgtggccgaacagcaatttgccgtgctgcgcgaactggtgcgtaagctcggctcggccgatggcgaggacaagcgctggcgcgagctggtgctggatgtgcgcctgcatgtggagttcgtcggtgtcgagctggatgcggccacccgccagcaggtggagatctaccgcagcggcgccggcaagtccggcggccagcggcagaaactggcaaccacctgcctggccgccgcgctgcggtatcaacttggcggcgaagacggcgaattgccgcgctacgcggccgtggtactggacgaagccttcgacaaggccgacaacgaattcaccgccttggcgatgaacatcttcgagaatttcggcttccagatggtggtggccacgccgctcaagtcggtgatgacgctggagccgtttatcggcggcgcctgctttgtcgaaatcagcggccgtcacgactcgggcgtattgctgatcgaatacgacgaacaggcacgccggctcaagttacccgagcgctcgcgcagcgcagcggccgacggtgcggcgcgcgcgaccgagccgtccgccgatgccgtcggcggagcgagcgtcgatggactgcactga

SEQ ID NO: 41850 - DNA, 1164 bp, Xanthomonas oryzae pv. oryzae PXO99A
atgatgttgcctgccgctgcgctgctggccttgcgcgggcagtggcagcgcgcacgcgggcagtggctgatcggcgagggcgcaccgcaggcgatcggattgcgggcgccgacccaggcacaggccatcgcgcggttcgatgccttcggtgcgtggttgcaggagtggagccgcacaggcctgccggggcgggtggagtatcgcgcggtgagctggacgcagctggggccgcagcgcctgccgcagacctgggtgctggacgatgcgggccaggccgccggcgcgcttggcgagggcgagcgctgggcgcgtgcccgccaacgcagcgctgccttgcaggcgcgctggccgcaggcggtcgcgctggcggcgcggctacgccgtcaattcgatctgctggccgactggccggaggtcgagttcgcacgcttggtggcggtggtggagtggctgcaccagcatcgcgacagtggactgttcctgcgccagcttcccatcgccggcatcgacagcaaatggatcgaaccgcatcgcggcgtcatcgccgactggcttgccggcctgcgcggcatcgccgagccgcgcagctttgccagcctgtccggcctgcgcaacgcgccggatcgggtgcgcttgcgattgctcgacccggccctgcgccaccacatcggcggcctggaggacatcaccgcaccgatcgcgcagatcgccgcgctgcgtctgcctgtgcgccgcgtgctgatcgtggaaaaccgcgaaaccggtctggcctgcgaatcgctgccgggcacgctggtgctgatggcgcgcgggtacgccgtcgaatacgtgagcaatatcgggtggctgcgcgaattgccgctgtactactggggcgacatcgacacccacggcctggcgatcctgcaccgcctgcgcacgcacgctccgcacaccaccgcggtgttgatgaatgaggccaccctgcaggccactccgcgcgcgttgtgggggcacgaacgcaggccgcaccgcgcccaacgcctggctgcgctcagcatccaggagcagcgcctgtatgcggacctgcgtgtcggccggttcggtccgtcgccgcgcctggagcaggaacgtatcgcctgggactatgcctggccgcgcatccaggccgcattggcggactga

SEQ ID NO: 41851 - DNA, 1371 bp, Methylobacterium radiotolerans JCM 2831
atgctgttcgcgcagctgtccgacgagctgttcaagccgctggcctcgccgagccgcggcttcaacgccgccctgctcctgcacctgcaccggcgcgtcctcggggccgagccggtgcgcaaggccgagctcctggcggagatcggcgacttcgccgccggctggagcgaccccgaggtcagcggcgacgagccgatctcggccgacccggccgagcgccgcacggcgctctaccggcgcctcctcgacaccggctggctgatcgagcgccgcgagcgctacgtcccggtcgcggagttcgaccccgaggcccgcctcctgctggaggagctgtcccggctcgaaaggggcgagacgcgctcctacggcggcgccgtgctggaggtgctgggcgggctcgagagcgccctgtcggacccggcgaaccgctccgaggcgctgtccaacgccgcccgggccgctgccgccttcctgtcgcacgtgcgcggcctcgcggccggcatgcgcaaggtcgaggagcgcatcctgcgcgagcccgaccgcgccaagaccttccggctgttcttcgaggatttcgtcgagcgccacctgatcagcgactaccggacgctgcacacccgctttaacccgttccgcttccgcgccagcgtggtgcgcgaggccggtcgggcgctgcgcgacgccctcacggtccgggcgctggccgagggcctgatccgcgaggggcggagcgccgacctcgacgcggcgcagaaggccgtccgggcggatctcgcccagatcctcgcggtgttcgagggcctcgacaaccacctcgacgccgtcgacgccgtggtggcgcggctggagcgccggatcgcttccgccctgcacgtgatggaccgcccggacccgagcggcgtcgagcgcgtggcggcgatgctgcgcgccgtcggcgggtccgagatcgcccccgaggtgccgggggacgtctcgctgctgcggccgccgatcggccacgcgcatctccaggcgccgcgggcccgcaagtcggccatcgacatggagcccctgcccgacatcgaggacgaccccgtggtcgacgccttcgcggccgccaaggcggagttccggcgccgcaccaccgtgaccccggagagcatgagcgccttcgtggaggcccgcctcggcaaggccgtgcgcctgcgcgggtcgcagatcgtgatcgcgggcgtcgacgacttcatcgtgttccagcgcctgcgcgagatcgacgtgctgttcgacgccaagctcggcgcgcgctacgccctgacccggctgcccgagcgggttgtcaacggctggctggactgcccggacttcctgctggagcgccgtccccgtgcttga

SEQ ID NO: 41852 - DNA, 627 bp, Methylobacterium radiotolerans JCM 2831
gtgcttgagggcttccgcgcgatcatcgacggcgacgagccgccgccccccggcgcccgggcgccggacgccgaggagctgtgccgcgctctccaggttctgctgaaggggcaggtgatctacgccgagacgcaggggatcggacggtcctacgagctcgcccggcactacgctccgttcttcaccgactacttcgcctgcctcggctacgcgctgaccgtctcgcaccgcgaccagatggtctcgctgagcccggccgccgacgccccgcggcacgacatcgtctcggagcgcctgcgcaaggacgagaccctggtgctgctggcgctccggctcctctacgaggagggcctgcgcgaccaccgggccggcacggacgggatcgtcgactgcaccaccgacgagatcgtcgagaagatccgcgccgtggcccgcaacgagccccccgaggagggccggctcgccgacatcctgcgcctctacgccaagcgcggcggcctgcgcctcggcgagcgcgatcgggtcgagcgggtcacgccgctctcgctcctgccgggcgtgacggtgctggcctccgacgcctggatggagcgtctgcgggcgtggtcagaggccggcgaggcctga

SEQ ID NO: 41853 - DNA, 3438 bp, Methylobacterium radiotolerans JCM 2831
gtgtacgtcctcaccgacatcgccatctcgaactggtacctgatccgccgcgagcagatccgcctgcgcggcgccgcggcgctggtcgggccgaccggggccgggaagtcgacgatcttcgacgcggtcggcaccgtgctggccggcaacaacgccagccgcctcgccctcaacgcctcggcctccggccgcagcgcccgcacggtgcgcgactactgcctcggctggatcagcgacccggcggagggcggccgcccgacgcgggaatcctgcgagaccgtgctggtcctggtcttcgagaaccccgattccggccgcgtggtctcggtcggcctcgccctggcggcccgggccgtggagccgaaggagaccgtgctgtcgcgcttcatcgcggtcgggcaccggttcgaggtcgccgactacgcgcgcaccgctcccggcggcacctacacggcgccctggagcgagatcgccgccgacctgcgcgcccgcgcgtcgagcttcaccgagtaccgcacctccggcgagcgcttcacggccgacgtgctcgcgaccctgcgcgagggggcgccggcgccggagccgcgccacttcctgcgcagcttcgccaacgcggtggcgttcaagccgatcttcgacaccagcgcgttcgtgcgcgccttcgtgctcgacccggagcccctcgacgtcgagcgcgtgcgccactcgatcgccaactggcggcgcctcctggagaccatcgccgaactggagagccggctcgggcgcctgcggcgcctgcgcgaccgctacgaggcctggggcgaggcggtcctggccgccgcgacccacgagctgcgggcggcgagcgccgagctgcgccgccgcagcctcgacctcatcgccgtccggagccgcctccgcgagggcgccgacaccctgcgcatcgcgcgcgaacgcgtcaccgcgagccgaggctacgtccgcgagatcgacggcgagatcgccgagaagaaggcgctggccgccgcgagcgccgccgagggccggctcgcggcctcgacgcttggcctgtccatgctggagcgggaccggaaggagctgatcggccggatcggcgacctcgtggggctcgtcgggcagatggccaagctccagcccgtcgccccgctcctgcgccagagctgcccgcaggcggcccgcctcgccgaggcctgcgcccgggcgggcctgcgccgggaatcctcgcccgaggagatcctgcgccccgagggcccgctggccgagctggcagacggactggcgcgcctgcccgatttcgacgaggccctggagcgggccgccgaggacgcggcgctcaaggcccgggcccaggagagcgaggccgagcgcacggccccgcgcaccggcggcggcccggcggcgcgcctgtcctccgacacggtggcgtttcgcggcgagctggagcggcgcggcatcgacgcgctgccgatctgcgagctggcggagatcgtcgatccgacctgggggccggccctcgaaggcctgctcgggcgcgcccgcgaggcgctggtggtcgcccccgaccggctgagcgaggcgctcggcgtgctgcaatcgggccgcgaccgcttcagccgctgcattctggtgaagaccaccgacaccgccaagcagcggtcccgccgctacgacgacgggccgctcaccgtgatcgagaccagcgacccccacgcggaggccttcctcggcgtgcggctcggcggctacgacctcgcccgggacgatgccgaactggcgcgcctgtcccgcgccgtggcgccgagcggtcggaccacggccggcatggcctacacggtgacccgcaacgtcgacctgctgatgactcgcggtcatcgcgggccgaccgccgacagccgccgcgcgcacgagatcgccgtcgcggaggcgcggcgcctgcgcggcgaggccgcggtcctgcgcgaggccgcccggacggccgccgcgatccgggcccgcgtcgcccggggcctcgacgacgtggaggccttgcgggccgagctcgacgggctcgagggacggcggcgcacgctccagaccgagcgggagggcatcgagaagcgcgacacggcggggctcaccgccgagatcgccgcgctgaccaccgagcgggtcggctacctgcgggaactgtcggaggagctggagccgaagctcgatcgtctgctcgccgacgaggcggccctgcgcgcccggatggggcctgtgcgcgaggccgtccgcgccgccctgtcggcccgccgcgcggccctgcgccagctgagcgggggcgacgcggcgcgggtgcgcctcgcccgcgccgagccgttcgacctcggtgcggtcgccgaggcgcggcggtcgctcgccggactcgacgccaaggcggccggggcccgggtgagtgccgagcgcggcctcgcccgcgattccgccgaggccgcccgctcgcacgggcggatcgccgagcgcgagctggcggaggcctgcgccgcctggcggttggagaacccgctcgcctccggggacgccccggcgatcgacggtttcgcctgggtgcggcgggaatacgaggcggtcgaggggcacgagctgcgccgctaccgggcgcaggccgagcgggccgaggccgagatgcgccgcctgatgaccgaggacctgctgacgcgcctcgccgaccggttcgagcgggtccacgcccgcctcgcggccctgaacgagcggctctcggcgcgcagcttcaccggccagacctacgcgttcgaggcggcggtcgaccgccgctacgccgccgtccacgcgctggccaccgagaccgcccgctcgcccgaggccgcgcaggcgctgctcgccggcgaggcggaggggccgatggcggccgcgctcgaggagatcaccgcgctgatcgccggcgcggacgacgcggcgcggctcgccgattaccgcaactacttcgtctacgagatcggcatgcgcgaccgggcgggcaaccgcaccaccatgtcggcccgggcgctgcgcggctccggcggcgaggcgcaggcgccgttctacgtggcgatcgccgcgtcgctcgccagcgcctactacccgggcgaccggccgggcgacgagaatccggggctcggcctgtgcctgctcgacgaggcgttctcgaagctcgacgtgcgcaacagccaggcgctggtcgatctctaccgcgcctgggggctgcagctgctgatcgccgcccccgaggacaagcgcacgaccctgaccgaggtgatggacaccatcgtgacggtctacaagagcccggatctcacctcggtgcggatcgaggccgagcaccccctcgaggcggcccggcgggcgctgcacgcgatcaaccccgaccaggtcgggatcgagggcttccgccggtcggacgccgccgagtga

SEQ ID NO: 41854 - DNA, 1533 bp, Xylella fastidiosa M23
atggaccatgccaccctgaccaccttgcgtgagcggcaccccgcctggcggttactgacctcatcgcatgcccccctggtcgcaagctttctgcaccgcctgttcgttgcaacgaacgcgcgcctgctgagcgagaccaagatcacccaggcactggaagacacgctgtatgcgctgcgtgaacacgaaggaccggaggcctacccgaagggcgccctggactacctcaatgactggtccgcacccgacaaaggctggctacgcaagttctacacaccagacacggatgaagcgcagtttgacctcaccccggccactgaaaaagccatcctctggttgctgtcactcacggaacgctcatttgtcggcaccgaatcgcgcttgctaacactgtttgcgctgctggagcaaatgagcaccggcaccgagaccgaccccaaaaagcgcgtggaagaactgcaaaagaagcgcgacgcactggacatcgaaatcgcccacgtcctggaagggcatacaccgctgctggacgacaccgcgatcaaagaccgcttccagcaattccagcaactggcgcgtgagctgctgtccgacttccgccaagtgcaagacaacttccgccagctggaccgcaaggtacgcgagaaaatcgcactgtgggaaggcaccaagggcacgctgctggacgaaatcatgggcgagcgcgatgccatcagcgattctgaccagggccgcagcttccgcgccttctggaacttcctgctctccagccgacgtcgcgaggaactttccgagcggctgggccaggtgctggcgctgcccgcggtggcggcgctgcatccggagccgcgtacccgtcgcatccacgacgactggatagaagccggcgaacaaaccctgcgtaccatcagccaactatcgcagcaattacgccactttgtggaaagccgagcttttctggagaaccgccgcattatggacctgctacacggcattgagcgcaacgcactcggcctgcgcgacatgacaccctccggcacagtgatgcacctggatgcgatcggggcggacattcaactgccgctggaacgccccttattcaccccacacgcaaagccgcgcctggctgatctggtccttgcggccggtacagacgacatcgacaccacccccttgtttaaccaaattgtgatggacaaagcacgcctgcgcttagccatccaacgcgcactgcgcacccaatcccagatctccctgcgcaccctgttgcaaactgagccactgcaacagggtttggccgaactggtcgcctacctggagctggcccacaccagcaacagcagtgatccggacggcttgcgcggcatcgtcgacgaaacggtagaagagccgatccgctggcaggccaacaataccgtgggtgaaacagtcacccgcgaggcacgcttaccccgcatcatcttcacgcggcgtgccctctcagatcatcaggaatcatcacaaggagacagagcccatgaaggacacgctgtatga

SEQ ID NO: 41855 - DNA, 714 bp, Xylella fastidiosa M23; identical to SEQ ID NO: 41642

SEQ ID NO: 41856 - DNA, 3432 bp, Xylella fastidiosa M23; identical to SEQ ID NO: 41643

SEQ ID NO: 41857 - DNA, 1206 bp, Xylella fastidiosa M23; identical to SEQ ID NO: 41644

SEQ ID NO: 41858 - DNA, 1467 bp, Leptothrix cholodnii SP-6
ttggacatcgacaccctcgaagccctgcgccgccaacacccggcctggcgcctgctgctggccgatacggcggcgctggtggcgagtttcctgcaccgcgtcttcgtggcgccgaaccgccgcgtgatcggccaggccgatctggccgaggcgctcgaagacacgctctacgcggtgcgcgagcagcgcggcggcaacgtctacccgaagtcggcgctcgaatatctcaacgactgggccgccaacgaccgcgcctggctgcgcaagttctacccgccgggctcggacgagccgcatttcgacctgacaccggccaccgagcgggcgctcgcctggctgggttccctgagcgagcgcagcttcgtcggcaccgagtcgcggctgctgacgttgttcgacctgctgcggcagatgaacgacggcagcgagaccgaccccgaaacccgggtgcgcgaactgcagcgcaaacgcgaccagatcgacgccgagatcgagcgcgtgcgcgcgggcgacctgccgctgctgggcgacaccgcgctgaaggagcggttccaccagttcgccgggctggcgcgcgagctgctggccgacttccgcgaggtcgaacacaacttccgcggcctggaccggcgggtgcgcgagcgcatcgcgctgtgggacggcagcaagggcgcgctgctgcaggacatcctgggcgagcgcgatctgatcgccgaatccgaccagggccgcagcttccgcgcgttctgggattttttgatgtcgcgcgcccggcaggacgagctgaccgcgctgctcgaccgcgtgctgcagctcgagcccgtggccgagctggcgcccgatccgcgcctgcggcgtgtgcaccacgactggctcgaagccggcgagcagacgcagcgcaccgtggcgctgctgtcgcagcagttgcggcgtttcctcgacgaccaggcctacctcgaaaaccgccgcatcatggacatcctgcgcggcatcgaggccggtgcgctggccgtgcgcgcacgacagccggcgggcgatttcatgtccatcgacgagaccgcgcccgacatcgagctgccgatggagcgcccgctgtacgcgccgccgctgaagctggcgatcaccagtgcccgcatcgacgccggtgacgaagacgacgacgagttcgacgccgccgcgctgtattcgcagttcatcgtcgacaaggccgcgctcgcccagcacgtgcggcagagcctgcagcagcgcacgcagatcacgctcgccgaattgctggacacccggccgctgcagcagggcctggccgagctggtggcctatctcagcctggcggccgagccgcccatcggggtgaatgcgggcgtgaacgcggtgatcgacgacacgctcgaagagcgggtcagctggttggcccgtgacggccggcgcaagagcgcccggctgccgcgcgtgatcttctcgaagtga

SEQ ID NO: 41859 - DNA, 627 bp, Leptothrix cholodnii SP-6
atggcgacgacgatcgagtccgcacccgcacccacggccgagctgtccgctgtgctgatcccgctgctcaagggcgtgacctaccgcgccgacgacgccgcgcactggagcgcactgctgcaactgcagggccgcgtgcgcgaccacgtggccgtgctcggcctggagctgatgctcgacgaggccgagggttacgccttcctgcgctcgcgtcccgagccggaggatgaggccctcccgaagctgccgcggctggtggcgcgccggccgctgtcgtttccggtcagcctgctgctggcgctgctgcgcaagaagctcgccgagttcgacgccgccggggccgacacccggctgatcctgtcgcgcgagcaggtggtcgagctgctgcgggtgttcctgcccgaaggcagcaacgaggcccggctgatcgaccaggtcgacagccacctcaaccgcgtcgtcgacctcggtttcgtgcggcgcctgcgtgggcaggacggcctgttcgaggtgcagcgcatcctcaaggcctttgtcgacgcgcagtggctggccgagttcgatgcccggctggccacctatcgcgcgcagctcgaaggcaaggcgggggtggccgatgaagaatga

SEQ ID NO: 41860 - DNA, 3402 bp, Leptothrix cholodnii SP-6
atgaagaatgaggcgctggcgttggacttcggcgccgacgaggctgacggcgcactggcgggctttcgcctgcagcgcctggaggtcttcaactggggcaccttcgatgcccgcgtctggacgctgcgtgccgacggccgcaacgtgctgctcaccggcgacatcggctcgggcaagtcgacgctggtcgacgccgtcaccacgctgctggtgccggcgcaccgcgtcgcctacaacaaggcggccggcgccgaggcgcgcgaacgcacgctgcgcagctacgtgctcggccactacaaggccgcgcgcagcgagctcggcggctcgggccggccggtggcgctgcgtgggcccgacagctactcggtgatcctgggcgtgttccacaacgccggttacgaccagaccgtgacgctggcgcaggtcttctggctcaaggacccgcagggccagccgctgcgcctgtacgcggtggcggaaaaggccttgagcatcgccgccgacttcgccgatttcggcaccgacatcgtcaagctgcgcaagcgcctgcgtgccgccaaggtggtggtggaggacagctttccgccctacggcgcgctgttccggcgccacttcggcatccacaacgagcaggcgctggagctgttccaccagacggtgtcgatgaagtcggtcggcaacctgaccgacttcgtgcgcagccacatgctcgaacccttcgacgtggcgccgcggctggttgcgctgatcgcccacttcgacgacctcaaccgcgcccacgaggcggtgctcaaggcgcagcgccaggtggcgctgctgcagccgctggtggccgactgcgagcgccatggcgaactcgccgccgcggtcgaggcccagcgcgccgcacgcgaggcgctgcaggcctggtttgccgggctcaaggccgagctgctggaccaacgcctgcagcacctgggcgacgatctggcgcgccacctcagccagatcgagcgcctcaccgccctgcagcgcgagcagctctcgcaggaacgcgagctgcggcgcgcgatcgccgacagtggcggcgaccgcatcgagcgcctggcgctggacatcgcgcgcaaggaaaccgagaaacggcgccgcaccgacaaggccggccgctacgacgcgctgcgccagacgctcggcctgctggcgatgcacagcgccgaggatttcctgaaccagcgcgccttgtgtgcgccgctgcgcgaggccgctgccgagcacgaggcgagggcgcagaacgcgctcaacgaactgggcgtggcctttgcccagggccgcaaggaacacgacgagatgctggccgagatcgccagcctgaaggcgcgccgcagcaacatcgacgcgcagcaggtggtgctgcgtgctgcgttgtgcgaggccttgaagctgcgcgaggccgacctgccgtatgccggcgaactgatccaggtgcgcgacgacgagcgcgactgggagggcgccgccgaacggctgctgcgcagcttcggcctgtcgctgctggtgcccgacgaacactacgccgcggtcagcgactgggtcgaccgcacgcagctgaagggccggctggtctacttccgcatccgtcccaaggccaggggttcgagccaggacggccgcggcgatctgcccgcgctgcagcccgattcgctggcgcgcaagctggcgatcaagcccgacacgccgttctacggctggctcgagcgcgaactggcgcaccgcttcgacctggcctgctgcaccgggcaggagcagttccgccgcgaggcgcgcgccatcacccgcgccggccagatcaagtcaccgggcgaacgccacgagaaggacgaccgccaccgcatcgacgaccgcagccgctacgtgctcggctggagcaaccaggccaagatcgccgcgctcgaatccagggcccgggtgctgcaggcgcggctgatcgagaccggccagcgcctggccgcgctgcagaacgaacaggcggccctgcgcgagcgactgcaggcactcgacaagctggaggaataccgcgatttcaccgagctcgactggcgcagcagcgtcaccgaactggccgccttgcaggatgagaaacagcggctggaggccgcctccgacgtgctgaagacgctggccgtgcagctggccacgctggagtcggtccgcgacgacaccggtcgcaagctgaaggatcgtgaagccgaacagacccgctgcgcgctgaaacacgagcaggcccgggcgctgcgcgagcaggcgcagcagaagctggacgccgccgacttcgccgctcgggccgcgcacttcggcctgatcgagggctggcgtgcgctggccctgggcgatcaggccctgagcgtcgaaaactgcgacggccgcgagcaggagatgcggcgctggctgcaggcgcgcatcgacgccgacgacaagcggctcgcccacctgggcgagaagatcgtgcgcgcgatggcccaatacaaggaagccttcaagctcgacacccaggaggtcgatgccagcgtggccgccggcgccgagtaccgcgcgatgctggcgcagctcaaggccgacgacctgccgcggttcgtcgcccgcttcaaggagctgctcaatgaaaacaccatccgcgaggtggcgcatttccagtcgcaactgcaccgcgagcgcgagaccatcaaggagcgcatcgcgcgcatcaacgagtcgctgacgcagatcgactacaaccccggccgcttcatcgcgctcgaagcccagaccgccaccgacgccgacgtgcgcgacttccagaccgagttgcgcgcctgcaccgaaggcacgctgaccggctcggacgatgcgcagtattccgaggccaagttcctgcaggtcaggcagatcatcgagcgtttccgcggccgtgaaggttcggccgaagccgaccggcgctgggccgccaaggtgaccgacgtgcggcagtggttcgtgtttgccgccagcgaacgctggcgcgaggacggcagcgagttcgagcacttctccgattcgggcggcaagtccggcgggcagaaggagaagctcgcctacaccatcctggccgccagcctggcctaccagttcgggctggaatggggcgcgctgcgctcgcggacgttccgcttcgtcgtcatcgacgaggccttcggccgtggctcggacgagtcggcgcaatacggcctgcgcctgttccagcagctcaacctgcagctgctgatcgtcacgccgctgcagaagatccacatcatcgaacccttcgtggccagcgtgggcttcgtgcacaacgaggacggcagcgcctcgaagctgcgcaacctcggcatcgaggactaccgcgcacagcgcgacgggtcgatgccatga

SEQ ID NO: 41861 - DNA, 1215 bp, Leptothrix cholodnii SP-6
atgagcgactggagcttgcccgccgacctgcgcgcccaggtgcagcggcgctgggacaagggcgagctgctggccgagcgggtcgcgccgacgcagcttttcccgctgcggctgacgctgcgggtgccgtcgtcgagcgacctgtccgagcgtttcgacgcggtgcgccgctgggtggccgatctgcagcaaggctcgcgcgcgggctaccggctggtgctgcgcgaggtgcggcaccgcgtcatcggccagaacagcctgccggccgaggcctgggtcgacacgctcgacgatgccctgcaggtcatcggcaaggcgcgcgaggcgcgggtgttccagtccgtgctggccgccacgcgcgagcgtcagccggcgctcttgccgtggctgcagcgccagcccttgcgcgcgctgtcgctggccgaggtctggccgcagttgctcgatctggtggcctggctgcaggcgcatccgcgcccgggcgtctacctgcgccaggtcgatctgccgggcatccacagcaagttcatcgaagcgcagcgcggcgtgctggccgagctgttcgatctggcgctgccgcccgatgccatcgacgcgacggccggcggcgcggcgcagtttgcacgccgctacggctttcgcgacaagcccttgcgggtgcgcctgcggtttctcgatccgcggcatgccgcctgggtgagcggcaccgacgccgactacacgctgacgcagcaggccttcgcacggctggacccgccggccgtgcggcgggtgttcgtcaccgagaacgagatcaacttcctggccttcccgccggtggccgacggcctggtggtgttcggcgcgggttacggcttcgaggccatgtcgcaggccgggtggctgcaccgccgtgcgctgcactactggggcgacatcgacacccacggctttgcgatcctcgatcagctgcgcgcgcatttcccgcaggcgcgcgccttgctgatggaccacgacaccttgctggcgcacgaggcgcagtgggtcgacgagccgcagcccacgcaacgcgatctgccgcacctggacgacgccgagcgctggctctacgacgacctgcgctggcgccgattgcgggatgcaccggtgcggctggagcaggagcgcatcggcttcggccgcgtcgagcaggtgctcgcggcgctgtcgtgcggcggggtgccgtcaggggcgtga

SEQ ID NO: 41862 - DNA, 1449 bp, Natranaerobius thermophilus JW/NM-WN-LF
gtgaatctttttcaacaaatacccgataatctcttttctcctttgactggtcgcttaaaagaagtgtacacggatttactatttttaatttatgatcaacataaaaagacaatctatactttagatagggaagctattataaatttgtttgtcgagtatgtagaagataaaaattacaagatagatgaacttacagaacaagttcatgacaataatatcagcgaattagagcaattatcaaaggatgctcgggaaagagcccattacttcttaagaagacttttagaatgtgggtggataattcaagagcaaaattatgattattcctaccgaatttccctacctgattacgcttttttactattagaaagcttggataaaatcaaaagtggctatagtatggagtttcaaggtagagttctatccgtttatcaaaacttaaccggtgatgatggaagtacttatgtggcggtaaatcaggccagagaaacaaccgaagaattaatcaatggtctgaaaagcttaaatcacagtattaaaatgtacacagaaagacttctgaaaacccaacaacccaaggaaatcatccaacagatcctggtagattattatgaagaaattctcggagaacagtattaccgcctaaaaacctcggaccacatatcaaaataccgggcaggaattttaaaacaggtgaaaaacctgcgtcataatagaaacgaaattatcagccaggctgaaaccatggttaaagaaaggcaggccagcaaccgtatagatgctgaaaacatgctgtacaactggctggagtttatagaagaaaactttcaaggaatggatgagatcttaaatgagatagataaccggaatagacgatatgtaacctcagctatggagaaacttcagtttcaaatgacagaaggtgcaggctcggaagaacaattgaaacgagttcttagatatttagcctctcaagccaaagaagagggagaaaagcaggaccttccttcagaaattgaacaactccttcatctgtacccccagagggtcgttgacgatcagagtatgaaaaaacccactcgtaccagcaaagaacatgatcctgcccctgtacaggttcaaaaagtagatcgaagagccagggacagaagttttgccaggtttaaaaagcgagtagaagaagaaattacaatcaaggatattaatcagtatgttcgagaatacctggggcaaaagggatctctttatctccatgaatttccccgtaaatccaagcaagactggattaagttgatatatatccttctctatcaaaactcccaaaaagctgaatatcaaataacaggggcccgaggtgatatgattgaacttgatgaaggacaggtagaattgccacatcaggtggtacaacttaaaaatagatcagcatcaaaaggggcgagtaaataa

SEQ ID NO: 41863 - DNA, 696 bp, Natranaerobius thermophilus JW/NM-WN-LF
atgatgaagtgggtagaacagtatgaaaaaatgtctgaaaaagataaagagaagtttcaagtcactgccaatcgactattaaataaaacttttttggtctatggaaaggacaaggaccgtcagtactatcggtttgttgagaaaaacctggaagtattccagggttatttcagcatagctaaatgggacttgttgcaccacaagaggttgtcggtttttcaactgtacaatatagaagaaaaaaaccggtatcggtttaatttacaagaaaccattttccttttgattcttcgcttgctatatgacgaaaagcaaaaggatctccaactgacccgggatatagtggtggcaggttttgaaattcaagaaaaatacatggctttgcaaataaaagataggcttccctccaaagaagagatgaggaggatccttcggatgctgtcaggttattcactactggaattaaaaacaggagattataaagatccagaagccaagtatgttctctacccttccctaaagatggtggtggatgatgccagacttgattccatgggagaacttcttggaatggatgatttcagcatagagctagaggaatccgatgaggacctagagcgagaagatgaagaacaagaagatatcgaaaccgaagatatcgaaaccgaagatatcacaggggagggggaacactaa

SEQ ID NO: 41864 - DNA, 3342 bp, Natranaerobius thermophilus JW/NM-WN-LF
atgagatcactgaccaaggttaaactagttaactggcactttttttccgatgaaaccatggaaatggataatagtgtgctgataaccggtgacaatggagcgggaaaatcaacactaattgatgcccttcaagttgtgttggtaggaaacctggcaaaagttaggtttaactcttcagcctttgaggaaaagaccaccagaaacatcaaaggttatctaaaaggtaaaaccgggacggaaggggagacggtttttctaagagatgatcatgattttaccagttatattatcatggaaattttccattccaaaaccaagacaccgtacctggtaggcgtgttatttgactattatcaaaatcgagaagactttgagcatgtgttttttagaatagataatgaggagtaccgggatgagttaatttataaagaagagaacttacccaggaatcgggatgagttctttcgctatctaaaaggacagggtatcaaatttaaacattacaaaaacgacctgtctggttatttgaatgaccttcgccaactctttggcggtgttaaacagtcattcttttccctgattcaaaaaggaataagttttagtcctataacccacctgcgaagcttcgtgtatgactatattctagaagaacgccaggttgacgtagagaccatgagagactactttgaaaaattccgggaacttgaagaatacattgaagataccaaaaaagaaatgtcagcactagaacagattgataaaacttatcaagaaatcaagcaaaaacaagctaatctggatactgccaaatacatgatctacagaggtgaactcgaagatagaaaagcccgtctacaaacaaaggagcaagaacgtacccaggaagaacagaacctatcaaagttgttacaagatattaatactaaagaaaaagagaaaacagaactggataataagataaaacaagtacatcagcagatcgcccagaatagtattactataaaaatcgagaacttgaaaaaagaaattcacaataagcaagtggaagaacaagagctatctaaactccaggaaaatctccgtcatcaaattaactctgaagcagaagaatttgaagtcctgaaaaagctactaacaactgctgatattgacagtgaattttccaattatcagttattaaagcaaattatccaggaaatgagggatctggctaaatctctaaaggaaaatgacaacccagaagatatatccagggctttttctaattctctagaagatatggctgctacctggaaagatatccatagaaagatttctagtactctgtattccctgagagaagaacaaaaacaactacaaaacgataaaaaccaattagagcaagaaatttctgatctggagaaaaaccaaatccttcgaagtgattctcctactatgaaactcaaaaaaatcctggaagaacatctggttaatgacagaggcgaacctgtccccgtggacatattttgcgaagccatggatatcaaggataaagagtggcaaaatgccattgagggttatctacatacccagagattcgaccttttagtagagcctggctattttgacgatgccctagaactatatgagcgctataaattctcccagggaatagaccgggtaggactggtgaatacagataaactcatggagtcaaagataaaagtcgaagacaaagccttatcacaagaaattcatgctaaaaaacctcatatcaaggcttatgccgagttccttttaggccgaatagtaaaatgtgaccatgaacgggaactaaaacaatacaggcgagccattaccaagacctgcatgttgtatcaaaactatactgccaggcaaattcccaaaaatagataccagcccccctatatcggtagtgatgcactaagaatccagttagaaaccaaaaaacaagaactggcaaaattgaaagacaaactaagtcaggtagatcaagttatttctcagttaaaacagatagaagactatcccgatgataaacgggaccggttttcgaatctcgaatcagcctatgaaaggatttctgtccttccccagctcaggcgagaattacaggaattgaatcaacaactaatgagtatggacacctcggaaatagatcgtcttaaaaaacaacaaaaacaactgactaaagagtataatgaaaccgatgaagagctcgggaaacttcaaactaaagaaggacagacaagatccaatatagactacttgaaagaacagattaaagagctcactgacaaggtagaaactgccagctcagaattggacaattatctagaactgatagatgagaatcagcgaagcaactggaagaccaaatgggattcggaagttcagaccaaaccccccgagactctaaaagccaactatgaagtacagaaaaacaggttaactaccatgataaacgaagactggaataaacttattcaaaagagaagtgattttaaccatgaatttgactttccagctaatcctcagagtaagactaatgacaagtaccaacaacgctatcaaaacttaaaggatagccatctggtggagtatcagtcccaggctaaagatgtcagggaaaaggctgaacagagttttcgagaacactttgtagcaaagctcagagaaaatattgaaattgccaaacaagaggtagaagaactaaatagggccttgaagaatatgaagtttggaactgattcatatagattcaaactatcacctaaacaagaactcaagggatattatgatatgattatggatcctcaacttcatgaaggccataatttatttactgaaagtttccgtgaaaaacacggagaaacaatcaatgaattgtttagagatctcaatgctgaagaagatgccttccaggaaaaaatgcaggaactcaccgattacaggtcctatctagattttgaaatagtaatcactgatgaaaacggtaatcagagttatttctccaaggtagcccgggataaaagtggaggggaaactcaagtccctttttacgtggctattctagcttctttttatcaagtatacggcatgtatcgtaattctgacaccctaagactggttatctttgatgaggcctttaatagaatggatgcagatcgagttgaagaagccattcgattcatcgataccctgggttttcagccactaattgtagcaccaacgggtaaaatccagttaattgctccccatgttcatactaacttgattgttatgaaagaaaagttcacaagttttgtagaacgagtgtccaggaaggagctgcttgagtaa

SEQ ID NO: 41865 - DNA, 1380 bp, Natranaerobius thermophilus JW/NM-WN-LF
atggatagcaactcaaataacaattcaaacttatctactaactcaaatgttaaactgaccaaacttcagaaaagggagctatcgaaacttctggataaatacgaaaaccgaaaggactacgggaaagaaagtaaaaatcctcgtcgggactttcttcatataacagaaaaaaactatcctgactattatcatgtcagtgacagtaagtttcgactggattataacgccgaaatgaaagaactggaaaagcacggctttattgatcttatttggaaaaaatatcaggaaggtgaatacctggaaaagatagccttacaatatgaaaacttagaacaagcttacagtgttttgaacagaaaaccaaaaatagaatactaccgcgaactagagaagattttttataaatactataaagaggcttctagtaatttaaataacttttacgaagaaatgcttagtaaattaaaacatctacagaaattacctgcccaggtgaagtatgaaacaccacatgaaattgaggaattgttaataggattaaaccagttaaccaaaaataaggaacttgaaattctgaaaagaaacttctctgtagaactttatagagattctaagagatgggataagtatgaaagaagaattgtctggataatcaaaaattattggtcgaacaaaactgataataaagaattagatcaagaactaaatcaagaactagctaaaccgcttaaagatcatatatatgatatatatatgatggaagataatgaactgctagcagagtttggattgattgaaaatccacgtcatgtaaatattagcggatacatgaagttttctactcatcagggtgagatcgacctagtagcattctaccccgatgtgggactcccacctcaaatggtcaaagatatgaaaattaatactcttaaagcgaattgtataataactatagaaaatttaacatccttttatcattatctaagtgttgcccctgataatcatctggtgatttacctgggaggttatcacaataggatgagaagacacattctcaataagttatgggatttcgtcaaataccaaggaatggaaaccaagttttatcattggggtgatttagatcttgggggatttaggatttataatcatttgaaagagaaaactaacattccctttgctcctcttatgatggatgaaaaaacctacctgtaccatattgataatggtcataaatttaacaaagattatgagaaaaaattaactgacttattaaaggacgatgaatatagtgagttccataacttaattaatctcatgttgaaacacaaggtgcgaattgaacaggaagctgttagggatattgtgttacctgagtaa

SEQ ID NO: 41866 - DNA, 1455 bp, Burkholderia phytofirmans PsJN
atggatttcgactattcgacgatcgacgcgttacgccagaaccatccggcgtggcgcctgctgcgctccgaccacgcgccgctcgtggcaagctttctgcatcgcgtcttcaccgcgcccaatgtccgcgtcatatcacaagcagatctggccgaagctctcgaggacgaactgtatgcgctgcgcgaacagttcggtactgcagcctttcccaaagcggcttcggattacctaactgattggagcgccaacgacaaaggctggctgcgcaagttctatcgtcaggattcggacgaaccgcatttcgacctcacgcctgctacagaaaaggcgatcgcatggcttgccacattgacagtccgtagcttcgtcggtacagaatcgcgcttgcttaccctatttgaattgctcaaacagatgagcgaaggcagtgagagcgaccccaaggcacgcctcgccgaactgcataagcgtcgcgcggagatcgacgcagacattgcacgcgcagaagcaggtgacatttccattttggatgacacggcgctcaaagatcgcttccagcagttcacaacgattgcgcgggaattgctgaccgatttccgtgaggtcgagcataactttcgtggtctcgatcgccgggtccgtgagcgtattgcactgtgggatggcgcaaaaggtgaactgctggaagaaatcatgggcgagcgcgatgcgattgccgactcggatcaaggacgcagcttccgcgcgttctgggacttcctgatgtcgagcagccgccaggaagaactcaccgaattgctcgaccgcgtgctgtcgctcccgcccgtcgcggaactcaaacccgacgcacgtacccggcgagttcattacgactggctggaagcaggcgagcatacgcagcgcactgtcgcgtttttatcgcagcaattgcggcgctttctcgacgatcaggcatggctcgagaaccgtcgcatcatggatattctgcacggcgtggaagccagagcgctggcgctgcgtgacatgctcccgtccggcgaattcatgactatcgccgatatcgcagccgatatcgaactgccgatggaacgtccactctacgcgccgagcctcaaaccgcgcattgccaatatcgccatagaagccggcgacgccgacatcgacgccgccgccttgtacgcccaggtggtcgtcgacaaagccagactggtctggcatgtccgccatatcctgcaggaccgttcgcaagtgacgctgcgggagctttgcgaaattcagcctctacagcagggtttagctgaactcatcgcctatctgcaacttgccggtgatacgttcagtacggtagtggacgagcaggtcagtgaaacgatcgtctgggtcggacggaacgacaacggcgaacaggagatccgacaggcgaagctgtcgcgagtcattttcgtgagataa

SEQ ID NO: 41867 - DNA, 648 bp, Burkholderia phytofirmans PsJN
atgcacgaacaggaacatggcacaacggtctcgatgcacgatctatcgagccttttgattccgctgcttaaaggtgtcatctaccgcgaggcggatatggcgctttggggcgcgctgctcgacttgcaagcgcgcgtacgagattacgtcactgtgctgaatctcgagttagtgctcgatgaagcagagggatatgcgttcctgcgctcacgccctgataacggcgaagaagattcgcctgcgttaccccgtcttatcgcgaggcgcccgctgtcgtttcctgtcagcctgatgctggcgttgctgcgaaaaaagctcgccgagtccgacgctggcggcgcagaaacacgccttattcttacacgcgagcagatcgtggagaccgtccgtgtgtttctaccagcaggcagcaacgaggccaaattaatcgaccagatcgacgcacatgtgaacaagatcatcgaactcggttttttgcgcaagctgaagccgaccgccggcaagcgtgaggagcaagccagcgcgttcgaagtacagcggatcctcaaagcgtttgtcgacgctcagtggctcgctgatttcgacgcccggctggcgggttatcagacgcaactcggcacagcagcctcaaggaacgcggatgactga

SEQ ID NO: 41868 - DNA, 3375 bp, Burkholderia phytofirmans PsJN
atgactgatatgcaattgcccggactcgatttcgtcgccgacgacgctctgtccggttttcgcctgcatcaactggaagtctttaactgggggactttcgatcgccgcgtctggacgttgaatcccgctggtaagaacgcactgttgacgggcgacatcggctccggcaaatcgacgcttgtcgatgccgtgacgacgctgctcgtacccgcacaccggatagcctataacaaagctgcgggcgccgatagcaaggagcgaacgcttcgctcgtacgtgctcggccactacaagtcagaacgtaacgaagccagcggtgcagccaagcccgtggctctgcgcgattccgacagttattcggtgattcttgggcgcttccacaatgcgggctatgacctgaccgtcacgctggcccaggtgttctggatgaaggagccgcacggtcagcccgcgcgactgttcattggcgcggaacgcgcgctgtcgatcgcgacggactttgccgccttcggaccggacatctccggcctgcgcaaaaagttacgagcgctcggcgcggacgtgttcgacagttttccgccctacggtgcatggttccgccggcgcttcggaatcgagaatgagcaggcgctcgagctattccatcaaacggtatccatgaagtcggtgggcaatctgacggattttgtccgcagccacatgcttgagccgttcgatgtcgcatcgcgcatgaccgcgctgatcggtcatttcgacgacctgaaccgcgcgcatggggccgtgttgaaggcgaagcggcaaatggaaagtctgagtccgctcgtcgaagattgcgagcggcatgcgcagcttgtgtcgcaggtagaggatctgcgagcctgccgtgacgcgatgaaatcgtatgccgccgacctcaagcttcgattgctcgaccgccgaatcgacattctcgcggcggagtgggagcggcaggacgcccacgtcaagcggcttgacgtcaaacgctctgcacatcgtgtcgaagaagccgaactgcggcgcaacatcgccgaaaacggcggagaccggctggagcggctggaagcggagatccaatcgaaagatgcggaatgtacccggcgcagacagaaagcacagcgtttcgacgatctcgcgcaggtggccggcgaacagacacctgaggacgaacagtcgtttctcgcgttgcgccgacatctgaccgaacgtctcgacgccgcgcagtcggacgaggcgcgtttgcagaacgacttgaccgaacacggcgtcagcttccgcgctggccgacaggaacatgacgcgctgtcggcagaaatcgacagtctgaagagtcgccgcagcaatatccctgcggaacagattgcgatgcgcgcggcgttgtgcaatgcccttgcgcttcctgaagcggatgtatgcttcgctggcgaactcctgcaggtgcgtgaggatgagcgcgattgggagggtgcagctgaacggctgctgcgaagttttggcctgtcgctcctggtctcggatgaacattacgccgctgtcaccgaatgggttgataagactcacctcagagggcggctcgtttactttcgagttcggcaatccgccagacgtgaacgtcccgaactgcatcgcgattcgctggcccgtaagctgtcggtcaaacctgaatcgccgttctacgaatggctggaatatgaagtggcgcagcgcttcaacgtcgtctgctgcgacacgcaggaacagttccgccgcgagacgcgggccattacacgtgccggccagatcaaggcgccgggcgagcggcacgagaaagacgaccgccatcggctggacgatcgtcgacgttacgtgctgggctggacaaataccgcaaaaattcaggcgctcgaagcgcaatcagaccagtccgcttcgcagttgcgcgagttgggcacgctgatcagtaaaattcagtccgagcaaattgaattaaagacgcgcttgaacgcgctatcgctgctcagcgaacatgcggagtaccgcgagatcgactggcgcggcgtagcgaccgagatcgccgatctccgtgatgagaaggctcgtctggaatccgcctctgacttgctgcatgaactcacccagcgtctgaatcaggtcgacgccgcgctggttgccgtggaggcggagctcgatgaagacaaggccgagcgcacgcgtatcgaagagcggcagcggatagccgacgacttgcatatgcaagcccaagcagttcttgacgatcccgcctactcgacccatagggcttatttcgaacggcttgccgatctgtggtccgaagcgctcggcaagcatcagttgactgtcgaatcctgtgacaatcgcgagagcgacatgcgcaaatggctacaggataatatcgacgccgaggacaaaaaggtttcgcgccagcgcgagaagatcgtggtggccatgcgcgaatactgcacggccttccccctcgagacgcaggaagtggatgtggccattgaagcagcgcaagaatatcgggcgatgctcgacacgttgaaagccgacgatctgccgcgcttcgaagctcgctttaaagatttgctcaacgagaacaccattcgcgaagtcgccaacttccagtcccagctggctcgcgaacgcgagacgataagagagcggatcgcgttgatcaacgagtcactcacgcagatcgactacaacgctggccgctatatcgttctggaagcgcaattgagccaggacgcggagattcgagactttcagagcgatttgcgttcgtgcaccgaaggcacgctgacaggctcggaagacgtgcaatattccgaagccaagtttcttcaaatcaaacagatcatcgaacgatttcgtggacgcgaggggctgaccgagcaggatcgtcgctggtcagcgaaagtcaccgacgtgcgcaactggttcgtattcgccgccagtgagcgttggcgcgaggataacagcgagcacgagcattattcagactcaggtggcaaatctggcggacagaaagaaaagctcgcctatacgatcctggccgcgagcctcgcctaccagttcggtctcgagtggggtgccgtacgctcacgctctttccgattcgtcgtcatcgacgaagcatttgggcgcggatccgacgagtccgcgcagtacggcttgcggcttttcgctcagctgaatctgcaactgctgatcgtcaccccgttgcagaagatttatatcatcgagccatttgtagccagcgtcggatttgtcgacaatcgggagggacgtgaatcgaggttgcgcaatctttcgatcgaagagtatcgcgaggaaaaaggcaggagcgaaacgtga

SEQ ID NO: 41869 - DNA, 1179 bp, Burkholderia phytofirmans PsJN
gtgagttggacgacaccggcggatctgcgcatgcaggtgagcaggatctgggaacgaggtgaactgcttgccggacttgctacaggcgccacgctattcccaaagcgtctcgtgctcaaaggacccacgtcggccgaaatcacagagcgcttcgaggacattcgtcggtggagtggcggcgttagggcgacggcacattgccgcgtcgagatgcgtgagtttcggcacaaggttttcggcaccaatacgttaccgattgaagtctggatcgactcattcgaggacgccgtcgcgctgattggaaaacaacgcgatgcggccagcttcgccttgctgctggatgtgactcgtgcgcgcgaaccgcgccttgtcgcatggcttgcgaaacgaccactcagggtgcttgagctggcggacgtgtgggggcggctgctggatgtatgcatgtggttggagcggcatccccgtccgggtgtgtatataaggcagatcgacatcgcaaatgtgcataccaagtttatcgaggcctatcgcggtgtcctgtcggaattactggatgtcgtgcttcccgagggaacggtggatttcgagcggtcgggtttgggccagttcgcggcgcgctatgggtttcgggaaaagccattacgtattcgatttcgcgtgctggatgcaaaaaaggcgctctttgatcccagcagcattgagcaggacgtcacgctggacgccgccagcttcgctcgcctggaactcgacgttggccgtgtttttattactgagaacgagactaattttcttgcctttccgccggttgacgacagcatggttgtcttcggcgcgggatatggttttgaaatgctgacgggcgccacatggcttttgcatcggcggattcactactggggcgatatcgatacgcacgggttcgcgattctcgatcaactacgccatcagttcgatcacgtggaatcgttcttgatggatcgggaaacgttgctcgcgtttaaatcgcaatgggatcgagaggataagcagaccttgcgggatttgccgaggttgagtcgcgacgaggggcagttgtatgacgatctgcgtgataaccgtttgcgtgcgaacctgaggttggagcaggagaagattggttttgggtgggttgaggcggcgcttgggaggttggggtga

SEQ ID NO: 41870 - DNA, 1443 bp, Desulfobacterium autotrophicum HRM2
atggcactggactattccacgttaaagacattgcggaaaaaccacccggcatggaaactgctggtggcagaccacagtcccctgattgccggctttgtccataaaatctttattgcacccaaccgcagacgcatgggccaggcagatcttgcatcagccctggaggattatctgtttaccctgcgggaaaccgaaggccaggacgcctttcccagacgggccgaagcctacctcgacgaatgggccagccaggaaaagggatggctgagaaaattttatccccagggatccgatgaggtacactatgacctcatgccctgggtggaaaaggccttggcctggcttgaaaacctggttcaaagcccctttatcggtacggaatccaggttgatgaccatcttcgatctcctgcaccagatggtccagggcacagagctggacgcccgttcaaggatacagtcacttgaacgacaaaaggcggaaattgacgcccagcttgcccgtgtccgggaaggtcacatggatatgctggatgacacggccctcaaggaccgatttctgctgatcaacaagaccgcacgggaactgctgggtgatttccgggaggttgagtataatttcagacgcctggatcaaaaaacccgggagcagatcgccctgtgggaaggcagcaagggaaccctgctcgaaaatttctttggagaaagggatgttattgccgaatctgaccagggaaaaagcttcaatgccttctgggaccttttgatgtcaccgacccggcaggatgaattatccaccctgctccataaggtgtttgaactcggggccgtcaaagagctatctccggacatgcggctgaaacgaattcattatgactggctggaagccggcgaacagacccagcgaaccgtagccaaactgtccgggcagctgcgccgttacctggacgatcaggcgttccttgaaaaccgacggatcatgcaggtgatccaaagcattgaaagccagggggttcaaatcaagaacaacctgcctggaaacgatttcatgaccattgacgaatcctctcccggggtttggctgcccatggaacgtcccctttacacctttcccgtaaaaccggtgatcgaggagattgtctccctgggggatgggtcggatatcccttcggatattctccatgcagccgtgtttgtggaccggctcaaattaaaggggattatccgcaactgccttcaaacccaggaccaggtgacccttgaacagatccttgaagcacaccccctggaacagggcctggctgaacttgtcacctacctgagcctggccggggatgatgaaaaggcattgtttgacgaatcccgaaaccacagggtatcatggacagataaacgcggggtgacccgtggggcacaattttgtgcggtaatttttaacaggtaa

SEQ ID NO: 41871 - DNA, 603 bp, Desulfobacterium autotrophicum HRM2
atggacatccttctggaaagcatgtcaaaaccggtgatcgcattgatgaaaggggtggtcttccgggaaaatgatgaacggttgtggcagcagcttgaagacggccagtccgcactcagggattacgttcaggtcctgggcctggaactgattgttgatgcatcagaaggctatgcctggctgaaaacccgagagcccctggagggcgaagagccccttccccggctggtgggccgcagaaaattatcctatcccgtgagccttatcattgcccttttgcgcaaaaaactggcggagaatgattcatccggggaagagacccggctcatcctgtccgtggaagaaattacagatatggtcaaggtgtttttccctgccggcggcaacgaggcccgcctcgtggacaggatcaacagccacctgaacaaaattgccgacctggggttcatccgccgcctcaaaggtcgaaacgacaagattgaagtaatccgcatcctcaaggcctttgtggatgcccaatggctccatgactttgatgaacggctcaaccaataccgtgaaaccattggggcaggttctaacgaccagggacatgaaaactga

SEQ ID NO: 41872 - DNA, 3378 bp, Desulfobacterium autotrophicum HRM2
atggaacaggaactgctcgacttttcaacggacgacgccctggctggattccgcctccagaccctggaggtttacaactggggcaccttccataaaaaggtgtggcgcctggagctcaacagccggaacggcctgctcacaggagacattggttcaggcaaatctaccctggtggatgcagtgacaaccctgctggtcccagcccaccgggtagcctataacaaagctgccggggccgatacccgggaacgcagtctgcgctcctatgtccagggatcctacaagtccgaaagaagcgacatcggccatgcggcaaaaccagttgttctaagggaaaacaacagtttctccgtgatcctgggggtgttcaagaaccagggctttgtccaggaggtaaccctggcccaggtgttctggatcaaggacaatcaggggcaaccagagcgattttacctggtcgcagacaaacccttgtccatcaccagtcatttcagtgactttggaccggatatcggacggctgaaaaaacggcttaaaaagctgtccagtgtggagatctttgacacctttcccaagtatggcgcagcattcaggcggcggttcggcattgaaaacgaacaggccatggacctgtttcaccagaccgtatccatgaaatccgtgggaaacctcacggattttgttcgggagcatatgctcgaatcatttgatgtggccccccgcattgagtccctgatccatcattttgacgatctgaaccgtgcccatgatgccgtactcaaggcaaaagcccagatccagcgcctgacgcccctggttaaagactgcgggcagcagcgtgttctcctggatgaaaaaaccggccttcgggaatgccgggaggccctgaccccctttttcgcattccacaaacgtgccctgctcaaaaaaaggataaaaaacctgctccaggaacaggaacgcctggaccacaaaatcgagaccctgacgataaaacaccaggaagaaaccggcgaacgggatcgattaaagcaggacattgcagacaacggcggtgaccgcctggagcgtatccgctcggacatggaacgcctgggccgggaaaaggaaaaacgccggcaccaggctgaccggtatgcccgcctgatacaaaatctcccccttaaaccggcggccaccccggatgatttttacgataacgcccagcagatccaggaccagcagcaggccctgggccaaaaagaggctgacctgcaaaaccagcgcacggataccgaggtcgaattcagggcactcacatcacgccaccgggaggtgaccctggaacttgaatccctgtcaaatcggaagagcaatatccacgttcgccagattcaaatccggaaagacctgtgcacccaccttaaaattgctgaaaaagagctgccctttgccggggagttgatccaggtacgggaagatcaaaggtcatgggaaggtgcagccgaacgcctgcttcacaatttcggactctccctgctcgtccccaggaaccattacaaggctgtgacggcctgggtcgatgtcacccaactgaaaggacggctggtgtattacctggtgcacccggaggttcaaaacaagggggttgcccttcatccggcttcccttgctgtaaaattgtcgatcaaacccgattccatcttttattcatggctggaacatgagctggccagccgctttgactatgcctgctgcaccgatatccatcagttccaccgggaacccatggccgttacccaggcaggccagatcaaatcaggcggcaaacgccatgaaaaggacgacagaaaagacatcaaagacaggtccaactatattctgggctggaccaacacggccaagatccagaccctgaagttgcgatgccaggaaatggaacaaaccatgcaaaccctggccgcccggatgtcagacctggacacccaaaaaaaacaggtccaggaacaacgaaacgacctgatccgtatcggcgaatacagaacattcaatgatcttgactggcaatcagtcaccctggaactctcccacctggaccaggaaaaacgagaactggaggcggcttccaacctcctcaaaaccctgggccttcaacttgagaccctccagggaacaatcaatgccacggaacagagccttgtgcagacccgggattttcggtcgaaaaacgaggaaaaacagcaccaggcaaacctggacgtccagacctgcgagacagacatgcagcctgcccgggacatggcaacagatcagagatcgactgtgttcaagcgcctggaagagatgcgccgcaatctgcttgagaaacacaccctgaccattgaatcctgcgccggccgggaaaaacaactgaggcagatcatccagggcaagctcgacaacctggacagccggattaaaaccatagaaagtcgtatcataaaggccatgcacagcttccgcaacgattttcccctggaaacccgggaggtggatgacaccctggcctcgggtctggaatatcaggaaatgcttacccggcttgaaaccgacaacctgcccaggtttgaacatcgcttcaaggaactgctcaatgagaacaccatccgggaagtggcaaacttccagtcccagctgatgcgggaaagagaaaccatccgggaacgcattgaacggatcaacctttccctgtcagagattgaatacaaccccggccgctatattgttcttgaggaccagttcaacccggatgtcgatatccgggacttccagcagcaactcagggcctgcaccgaagacgccctgacagggtcgaccgaagatcactattccgagggcaagtttctccaggtacggttgttgattgaacgattccggggcaggcagggcacaagcgatatcgataaacgatggcgccagaaggtcaccgacgtccggaactggttcgtgtttgccgcatctgaacgctggcaggaagatcacactgaatatgagcattatacggattcaggcgggaaatccggcgggcagaaagaaaaactggcctacacggttctggccgcaagccttgcctatcagttcggcctggaatggggagcggtccgttccaggaccttccggtttgtggccattgatgaggcctttggcaggggatcggatgaatccacccggtacagccttgaattattcaaacgactcaacctccagctgctcattgtcaccccccttcagaaaatccatatcatcgagccctatgtgtctgcagtggggctggtatacagccgggacggtcgcgtctcccacctcagaaacatgggtgtcgaagcgtaccgaaacagccgggagaaaaaaacaccatga

SEQ ID NO: 41873 - DNA, 1197 bp, Desulfobacterium autotrophicum HRM2
atgactgcctggacccgggacattgacatccgcaagcgacttgaaaaaaaatggaacaacggccaactgctggcacagtgcgtcagccccggcccgtttaaccccctgcgcatccccctgaaacaccccaccgccaaagaacttacccatgaatttgatgcggcccgcacctggatcgggcatctcatggcccatgccggaaaacagagtttcaaaaaatttaccattgaatggcaggagtccaaccaccgaaccctgggcaggaaccagatacccagggcggttatcttccacacccttgaccagatccttcactatcttggaaaaaccgtggcagcagagcgctatcaatcccttttcagggaaatcactgccctgcaccctgaacttgccgaacttttaatcgaaaggcccctggacgtattggcccacgacactgtatggccgtcacttctggccattgtgtcgttcatccgacagaccccctgccccgggatctatcttcgccagctggaaatcccgggcgtggacaccaagttcattgagacccacaaggcttggctgacacgacttttaatccaggtgcttcccgggtcagccgtcaatgaacaggccaggggagcttcagcctttgagcgccgtttcggttttctgtccaaaccggcccgaatccggttccgcacccttgacccggattttaccatcatgggtttatctgacatggagattccggaacatgacttctgtcatttgccaataatgcctgacaccatatttatagtagaaaatgatatcaatgggcttgcctttccccgttttccaagggcattggtgatattcggactgggatacggcctgtccgcactctccaatgcccattggatgcaggacaaacccatctggtactggggagatatggacacccacgggtttgccatgctcgaccagatccggcactattttccccagacccgttcgtttctcatggattatgccacactgctgtcccaccgagccctctggggccgggagacatccccggccacccgggatctgcccctgctgaccccggacgaagccagggtgtatgacaccttaaggcacaatctccatgccccaatggtgcgactggaacaggaacagatctctttttcccaggtgcgcagtgtggtaaaggccattcagacgaacggctga

SEQ ID NO: 41874 - DNA, 1626 bp, Bifidobacterium longum
  subsp. infantis ATCC 15697 = JCM 1222 = DSM 20088
gtggccgatgtgatgcgggagctggaacggctgcgaccggtgtatgagacgggcgtcctgcggttgctgttgcgccagaacgcgatgctgtacgtgtcgctgctgcgttccacgttcgacccgctcaccggcgagctgccgcgcgagaccgtggaggagcggttcgcgcaaagtctgaacgctctggccgacgccggcgaatatgcgccgcgcgaggaccagaccttcgccgcggccgcccatcagatcctcgccgacctgacccgtgaaggcgaaggcgactacgcctggctcgccaactcgcatgatgcggccacacaccgattcctctaccgtttgacggcccgtgcccaccgcgccatcgaggcgctgagcaggctcgaagacgaatcacgcgccctgtccggcgcgcaggccaacagcatcatcatggaaatcgagcacgcgcgcatgcagctgaccgccgaccccggcgagcgcatcaaactcctcaaccgtgaaatcaaggaacgcaagcacgagatcaaacgcatccaacagggcaagcagcatgccacgctgagcgaagcccaggtggaggacgtgatcgccgtgatccacaacacgctgcgcggcgtgcccatcgacctgcgcgaactcgtgctcgacgagcgggacaacggcgacgccttgcgccggcgcatgcaggccggcgacatcagcgtggacgagaacctgacccgctaccacgatgaataccgccgctcgttcagcgaatcggacagcggccgccgcttcgaggacgccttccaggtgatcatcaccgacgagggccgccagcaaatcgacgaagccctgcgcgccatcgccaaaaccccgtatctggccggcgaatccggcctgctgcttggccagatacgcgacgaactggcccgcatctacgacggcatcgaggccgtgcgtcgtcagatgcgcgtctccgacgaggcgatcagccggctcgtgcgccagcaaaccgacactcgctaccgtacgatgctcacccgcttgaaccgactgtacgcgcgcctcaacgcagatgcgaaaacccatatgggagacgcctcgcgcccgtgcgacacggccaccgcggacgcgctgttcgcgccattgccgatgcgcccggccaaatccatgacccgcgccaccgcacccggcctgagcgacctcgccgccgaagccccgcaggcgactccggtggccgatctgcgggatatggtcaacagcggcggcccccgactcctgcgcatggtcagtctcatccggcgcaacccggtgaccgttgacaggtccgatgacaggtccggcgcaaccctcgtggacatcgccgccagcttcaaccggctgcccgaaagcgaacgccgcgaaagcgagatcgtcggcttcctgggcgggctgggagccgcaagcggcagcgccatcgctgacgagccgtccactgacggcgtcggcatcgacagcgacatcgtcactgagccggccccggcgcagcgcggcgataccgcgacctggcattgcgtatcgatcgacggcgagccccggaactggatcactagaccggtgctggccgacatggacgagctgaacatcattgtggaggaaggatga

SEQ ID NO: 41875 - DNA, 663 bp, Bifidobacterium longum
  subsp. infantis ATCC 15697 = JCM 1222 = DSM 20088
atgaccgtggccgaggaacacgaggaacatatggacaacgccaacccgtacgccctgttcgaaggcgacaccggcgacatgccggccgaggcacgcatggccgccatcgccctcaaacgcgaccgctatatcagcgggcccacctacgacaccgtgctcgacaaccgcgacgccgtcgtacgctccctgaacaacgacctgctcgacttggtgatcaacgaacgctaccgcatcatgtacgccacgcccgtggccggcgacgacgtgaccctgcgctcgctcaaaacccgcgtcagcctcaaacgcgaggaggccgcgctgctcgccttcctgcgcatccgcgtcctcgaatacgagaacgtgcacgccgaccccgccgactggctcgtcagctttgaggagatccgcgccgcgctcgccaccggcgccggctatctggccgcccgcaacgacgaggaaggcgtggcaaagcagatcggcgccatcgtctccgcgatgatcacctacgggtatttggtgcgcctggacgacgaagccatgtaccagatcacgccgctcgtgcccgtggtgctcgaccgcgaactggccgacacctggctcgacgtcgtggaacacggcgacggcgacacggaagatgacgatgacgagaaggaagccgaatga

SEQ ID NO: 41876 - DNA, 3555 bp, Bifidobacterium longum
  subsp. infantis ATCC 15697 = JCM 1222 = DSM 20088
atgatgcaggcgacagacgtgcagatgatcgcggaccggtggatgctggaatcccgccgactcatcaactggggctcctatgagggctaccacgaattccgcccctccacggaccacaagctgccggtgaccctgctcgccggcgccagcgaatccggcaaatccacgctggtcgacgcgcagatctccctgctgtacccaaccggcacgccgttcaacaaggcctcgaactccggccgctccgaacgcagcgactacacctacctgcgcggcatggtcggcgtgggcagcaccgaaaccggcgacgagccgctctacctgcgcggccgcgacgagaacggcgcaccgcaacccgtgtggggcgccatcgtggacacctatcgcaaccagaccaccggccaggtgctctcctgcgccaaattcctctacctgatgcccggcgacggccgcggtgacgtgcgccgccagtacgtggtctggggcaagcccgtggaccccaggcgcatggaccaataccgtgacgccccgttcacgccggcccagctcaaagccacctaccccgactgcctcacattccccagcgccgaagcgttccacacacacatctggagcgcaatgggcctgagcgaggccgcctgccgactgctgcacaagatccagtccgccgacgcgccctcccggctcgacgacatcttcaaacaaggcgtgctcggcgtgcccgaagccctgggcctggcccgcaccacggtcgaggactacgaacgttacgacgggaacttccacgccatggacgagaaaacccgccgcatggacacgctgcgcggcatccaacaggcctacggcgaatacgccgccgcacgcggcaaggcccgcgccttcgaaccggtcaagccggccgtcgacggcacggtgccggccgtgctgcgcgactgggcattggcccgcatgcgtggcgaagtcgccgtccaactgcccgccgaccgcgccgaacaacagaacagcgaggcggaagccaagctgctgcgccgccgaaccgaagacctgcgcacccgcctcgacatgatccgaggccagatgcagggtctggacggcggcaacctgacccgactcgaactcgaactcgaccaggcccgccgcaccctcgaagacgtgcaagccaaccgaacacgaatcgaacaaacgttcgcatccatcggcgagacgctgcccggcaacgaacaggcctggaacgagcgccgcatcaacgccgtgaacttcaaacgcgaatacaacaaacgagacggcgaatgcgaggaagccctcaccgccgccatcaacgcgcgggccggcgcacgcggcgacctcgaacgactgcaacgcgacttcgaccggcaacgctcccagcgcacccgcatctcccagcagatggacgaaacccgcgccatgctctgccgcgccaccggactcacccccgccgaactgccgtacgtggccgaacttatggacgtgaacgaacacgaggaagactggcgtctcgccatgaacgtcgcctacgcgcccatcgcccagaccatcctcgtcgacaagcgccacgaacagggcttcgccgccaaagtcagcaccatcgacccgcgcaccatgccccgacacacctggcagttcgtggacaccgcacgccactacgacgacaccggcgcgcacgcgaacatactcaccggagaacaggacggcgactggctgtccggcaaactgcgctaccgcgacgactcgcccttcgccgactggctgcgctcgcagacccaggccgaacgattcgacgccctatgcgtcaccgccatcgacgacaccgaccgcaccaaccgtcaggtgcaggccgacggtcagatcaaatccggcgcacgcggccagcacggcaccaaagaccgcgcccaggtcatcggattcgtcaacgaaacctacctcaacgcgctcgcagcgcaggtcgacgccgcccgcaacgcgctcagccaagccgacaccgactacacggccgccaaaacacagtccgataacctccaccgcgaactcgaactggccaaccagctcgcctacacgtcatgggaacgcatcgacatcaccggcgcgcaacggaccatcacggacacgcaggacgccatcgcatccatcaaaaacgatcccaaactcgccgaactcgccaaacagcgcgacgaactgaacgccgaactcgaccgtgtggaacgccagcgcatcgaatccgaccaggccgcggcccgcgccggcagcgccgtcgaagcggcgctcatctggctgcgcgaccatgccgacaccggcacgacggacgccgccggtgtcatcgccgacagcggcgatgacgataacgccaccaccggcccactgccggacgaagtcacggcggtgctcaccgaatcctacgacaaccgattcgccggattggcggacgccgccatgcgcgcacacatgatcatcggcgcgggcgtggccggaacgagggcgccgggggagagtttccccgaacgcaccatcgccggcatcggcaaggacatgacctcccgcatcgatctgctgaacggccaggccgacgccgcgcgtaccggcgtcgaatcgaaaatgagcacctacatcgcgctctacgcggccgacgacgactcgctgaccgccagcgtggaggactaccggtactatctcgacgaactcgccagcctcacccagctggccgcggtcgccgccaccgacgccgaataccggcgctgcctcgaacagctgctcaggagcttcctgaccatcaaacgcgccatcgacacggatgccagcgacatccacgaccagcttgaccgcatcaacgccatgctcaaaggccaacagttcggtcccaagcacggcagcctgtccctgcacgcggacgtgcgccgtcccgagcgcgccttctggacgcagctcatccgcgtcatcggcaccctgaacgattggaaatccgccgacgtcaacgattccgacgcctcgcgcaaggccttcgcggcctgtgcgccgatggtcgggctgctgcgcgccgaactcgcgcaggtcaaggacgcgaacggcgtgaaaagctacggcgcccgcaatctcgacccgcgctgccgctcgtccttctacgccatcgtgcatcatgccgacggtccggacgaacgcatcacctccaccggtggtcgctcgggcggcgccttgcaggagctcacctcattcgtatacggcgcggcgctcatctacctgctcggcggcggcctgaccagcgaaccctcgtacaccacgctgttcctcgacgaggcgctcatcaaggccgacggccgttacacgcagcgcgccctcgcggtgctgccgcgcctcggattccaggtcatcgtctccgccccggaaagcaagaccggcgaaatcctcgaggtctccaccaaggcctacgtgacctacaaggaccccgacaccggcctcacctccctgcgcgaggccgtgctgcaccagaatgacatggatgatgaatcatcgtcggatatattgaaggatgacggggttgccgaatga

SEQ ID NO: 41877 - DNA, 1446 bp, Chlorobium limicola DSM 245
ttggctctcgactacacaacccttgatctcctcaggcagaaccatccggcgtggcggcttctgcgcgctcagcatgcgccgctggttgccagttttctgcacagggttttcattgtgcccaatgtgcggatactttcccaggcagatctggtcgaggcgctcgaggatgaacttttttccctgcgccagccacagggagccgatctttttcccggtacggctcaaaactatctgaatgattgggcggacaacgagaagggatggttgcgcaaattctatccggaaggaacggacgaaccgcatttcgacctgactgcagcaaccgaaaaagcgctggcctggcttgaggggttgacggagcgtgcgtttgtcggtacggagtcgcgacttattaccctgttcgatctgttgcgtcagatgagcacgggaagccaggctgatcctgaggtgcggattgccgagctgaaggctcgtcgtgaggagattgatgctgaaatagagcgcattctcgctggtgatatctcgcttctcgatgacacggctcttaaggatcggtttcagcagtttctgcaactggcgcgtgaattgttgaccgattttcgtgaggtggagcataactttcgtattcttgatcgtcgggtgcgcgagcgcattgccctctgggagggatcgaagggtgcgctgctcgaggagatcatgggagagcgcgatgccatcgcagattccgatcagggaaaaagtttcagggcattctgggattttctcatgtcgcagtcccgccaggaggagttgagtctgcttctggaagaggtgttggccttgccgccgattgtgacaatgcgtcccgacagccgtctgcggcgcgttcactacgactggctggaagcgggggaacatacccagcggacggttgcccggctttccgagcagttgcgcagatttctcgacgacaaggcgtggcttgagaaccggcgcatcatggacattctgcacgaaatagaagcccatgctcttgatttgcgcgatgattttcctgcaggcggcttcatgcctctcgagggcttttcggcagtcattgaactaccgttcgaacgagcgctttatcgcgctccattcaggccattgattgccggtatcgctctggacgaaggggatgcggagatcgataccgcaattctttatgcccaggttattgtcgatcgggccgaactgttgcgaaatatccggatcgaacttcagacgtgcagccagatcactcttggggaggtggttgcgcgtcatccgttgtataacgggcttgccgagctggttgcttatctgcagattgccggtgagtggccccgaacgacggtggatgaaggaacggaggatgaggtaagctggcagagtgcgtcgggcatcaccaggcaggcaaccttgccgcgtattattttattgagaaactga

SEQ ID NO: 41878 - DNA, 636 bp, Chlorobium limicola DSM 245
atgatgaaccattccgatattgaaagcagctatctgcagagtccggctcaggatctctcttttgtcgtgattccccttttgaagggggtgatctaccaggacgaaaaccctgcgttatggaactctctgtttaatctttcggcagccgttcgtgattatgttgcggtgcttggtctggaattgattttcgacgaagcggaagggtatgcttttttgcgttcccgctctgacagccaggaagagggaacgaatccgatgccccgtctgatggcgcgtcgtcagctcagttacccggtcagcctgcttctggcgctgttacgcaaaaaacttgccgaattcgatgccggggccggagagacacgcctgattctttcacgggacgaggtggtcgagctgatacgcatttttctgcctgttggcaccaatgaggtcaggctgatcgatcaggtcgataccacgctcaataaaatcgccgagcttggttttatccgccggttgcggggtgaacgccagatgatcgaagtgcgccgcattatcaaagcttttatcgacgctcagtggctggccgattttgatcagcgtctcgacgaatacctgcagcgccctgtagatccgaaggaggaacgtgatgagtga

SEQ ID NO: 41879 - DNA, 3366 bp, Chlorobium limicola DSM 245
atgagtgaagtgcttgaaatgggatttattgccgatgaccgtctggccggttttcgactgcagcgtctcgaagttttcaattggggaacctttgatgggcgggtctggacgttgcgtcttggcggcatgaacgggctcctgacgggggatatcggatcgggaaaatcaacgattgtcgatgccgtgaccacgctcctggtaccgagccatcgcattgcctataataaggcggcaggcgctgatacccgcgagcgttcactgcgttcgtacgtgcttggttatttcaagtcggagcgccaggagagcgtcggtggagcaaaaccggtcgctcttcgcgacagcaacagttattcggtgattctcggcgtgttccataacgaagggtacgacaagacggtgaccctggcccaggttttctggatgaaagatgccgtcgcacagcctgcacgcctttacgcagcatgtgaacgcgacctttccatcgctcaggattttacgggtttcggcacggaaatcgctggcctgcgcaaacggctgcgcagtgagggagtcgagctgttcgacagttttccgccctatggagcctggttccgtcgccgtttcggcatcgacaacgaacaggctctcgacctgttccatcagaccgtttcgctcaaatcggtgggcaatctgaccgatttcgtgcgcacccacatgctcgaaccgttcgatgtggcccctcgcatagcggctcttatccagcatttcgaaaatctcaatcgtgctcatgaagccgtgctcaaggcccggcgtcagatagagatgttggagccgctcgtggctgactgcgaccgtcaccatgatgttgccgagacagccgataaccttcggtcatgccgcgaagctttgcggccctggttcgctacgctcaagctcgacctgctcgacaagcgtctcgctgctctcgatgatgagctgacgcgacacaacatggctgtcggtcggttgcaggagcagcgccggacgcaacaggagcgtgagcgggagttgcgtcgcacgatcgccgaaaacggcggcgaccggatagagagtattggcgcagaaatccgccagaagcaggaatcgcttgaccagtgcaggaagaagtctttgcggtacgaggaacttgtgcgcctgctcggagagagccccgcattgagcgtggatgagttccataaccagcgaaccggtcatgcggccatgcgcgaggagtgcgcagatggtgaggcgagggtacagaatgatctcaacgaggcgggcgtgctttttacccagggaaggcaggagcatgaacggctgacagctgaaatcaagggattgaaagccaggcgcagcaacatcgatgaaaagcaggttgccattcgtcgctcgctttgccatgcgctgggtattgcggaagatgagatgccgtttgccggcgagctgctgcagattcgccaggaggagcgtgaatgggaaggggctgtggagcgtcttttgcggaatttcggtctctcgcttctggtgcctgaccgtcattatggcggggtggcggaatgggttgaccgtacgcacttgcacggacggctggtttatttccgggtgcggcatcagccgcaggggagcactcaaccggagcatgaggcatctctcgtgcacaagattgccattaaagccgattcgccgtatttcgactggatggagcgggaggttgcccatcggttcgatctggtctgctgcacgaatcaggaggagttccggcgcgagaaaaaagccattaccctctccggacagatcaaggcaccaggtgaacgccatgaaaaagatgaccgccattcgcttgacgatcgcagccgctatgtactggggtggagcaatgccgccaagattgcggcactcgaagagagcgccgggcggcaggagaagcatcttgccggactcgctgaacggatgtattcgttacagcagcagcagaaggcgctgaaggagcggcttgccgtgctctacaagctcgacgagtatcccgatttccgcgatcttgactggcagccgattgcggttgccatttccaggctcgaagctgaaaaacgtgaactcgaggcggcttcagatatactgaaaatccttgccggtcagctcgatgaagtggaaggcgaactgcaggctaccgagcaccagctcgacgagcgcaaggacaaacggtcgaaaaccgagcagaaaatcagcggtttcagggagttacaccagcagacagagaccctgcgggatgaatccgggccggaggccgccgggcagttcgccctgcttgaatccatacgtgaggaagcgcttggcggtcattcgctgacggtcgagtcgtgcgataaccgtgaacgggaaatgcgcgattttctgcagaataaaatcgatcttgaagataaaaagctctctcgtattggtgaaaagatcatcagggcgatgaccgagtacaaggaggagtggaaacttgaaacccgcgaggtcgatgtgaacattgccgccgggttcgagtaccgttcaatgctcgatcaactcagggctgacgatctgcctcgcttcgagggccgcttcaaggagcttctcaatgagaataccatccgcgaagtcgcaaattttcagtcgcagcttgcccgcgaacgggagagtatcagggagcgcattgcccgcatcaatgagtcgctgacgcagatcgactacaattccggtcgttatatcaccctcgaagcgcagatgagtctcgatgccgatattcgtgacttccagtcggaattgcgcgcctgcaccgagggggcccttaccggctctgaagatgcgcagtattccgaagccaaatttcttcaggtgcggcggatcatcgaccggttccgtggccgcgaggagcatgcggatcttgaccggcgatggaccatcaaagtcaccgatgtgcgcaactggtttgttttcgcggcgagcgaacggtggcgcgaagacgacagcgaacatgaacactacgcagattcgggtggaaaatccggaggtcagaaggagaaacttgcctataccgtgcttgcggcaagccttgcctatcagttcggtctggagtggggcgctgtgcgttcgcgatcgttccgctttgtggttatcgacgaagcattcgggcgcggttccgacgattcggctcagtacggcctgcagcttttcgcccaactcaacctgcagctgctgattgtgaccccgctgcagaaaatccatatcatagagccttttgtctccagtgttggctttgtgcacaatcaggaggggcggtgctcggtgctgcgcaatctcaccatcgaggagtatcgcgccgcaaaagagggtgaaccggagtga

SEQ ID NO: 41880 - DNA, 1176 bp, Chlorobium limicola DSM 245
gtgagctggacaactccggctgacctgagggctcaggtgcagaagctctgggatcgcggtatcctgctttcctctctgatgggagacgaggagctttttccactgcgtttgaccctgaaaagccccgattcacggcagctcagcgaatcgttttccgatgtgcgtaactggattggccagctggcagatggggcgagatactaccggattgtgtcgcgcactctcaaccatcgaattcttggttccaatgaaattccgtcggaaatctggatcgattcactggaagacgcgctggcatgcatcggaaagctgcgtgatgccgatcggtttgccgatctcgtttccctgactcgcgaaacgaaaccggaacttattccgtggctccggaaacgtccgttgcgcacgctggaacttgccgggtcgtggccgaattttctgcagattgtaggctggctgcagatgcatctgcgtccgcatatctatctgcggcagatcgacctgccgggcgtgcacagcaagtttatcgaagcgcatcgtggcgtgctgggtgagctgttcgacctcgcgctcccatcgtccgctatcgatgccggggcttcaggcgctgccggattctgccgccgttacggattcagggataaacccctgagggtacggttccgcattctcgatcccgaactggctctcctgccggtggaagccgatcaggatatctccctgacagaggctgtgtttgccggactgaaccttgcggttgaaacggtgttcattaccgaaaacgaaatcaactttcttgcatttccccctgtttcccggtcgatggtgattttcggggccggttacggtttcgagaatctcgccgccgcccactggctgcatgagcggaagatccattactggggggatatcgatacccacggcttcgccattctcaaccagttgcgccgtttttttcctgaggcggcgtccctgctgatggataaaaagacgcttctggctcacagaacgctctggggcattgagccatcacccgagaccgtagagctgacgaggctgaccggtgaggaaatggcgctttacgacaatttgcgcagcggcagcctgggtgagcgggtaaggctggaacaggaacggatcgggttcgagtggcttgttgatgctttgggaagtgtttga

SEQ ID NO: 41881 - DNA, 1449 bp, Chlorobium phaeobacteroides BS1
atggttctcgattacacaaccgtcgatctgctccgacagaaccacccggcatggcggctgttgcgcgcgcagcacgcgccactggtagcggcgttcctgcaccgggtgttcatcgcgcccaatgtgcgcaccatctcgcaggcggaccttgtcgaagcacttgaggacgagctgttcgccttgcgccgtcagcttggagacaacgccttccccggctctgcgcagagctacctgaacgactgggcagagaacgacaagggatggttgcgcaagttctatccagctggagatgacgagcctcattacgacctgacgcctgccaccgaaaaggccctggcctggctggagagtctctccaagcgtactttcgtcggtacggaatcacgcctcttgacgctcttcgatctgttgcgccagatgagttcgggcagccagaccgatcctgagatacgaattgcagagctgaaccgtcaacgcatggaaatcgatgcagagattgcccgaatcgatgccggtaaaatttctcttctggacgatacggcgttgaaggatcgcttccagcagttcctgcaactggcgcgcgaactgctgaccgatttccgcgaggtggagcataatttccgcacactcgaccggcaggtgcgcgaacgtatcgccctctgggaaggaagcaagggagccctgctggaggatatcatgggccaacgcgacgctatcgctgattcggaccagggcaagagcttcaggtctttctgggatttcctgatgtcgcagtctcgccaggaggagctgaccgcattgctcgaagagatactcgaactgcctccggtcgctgaaatgctcccggagcctcgactgaaacgggtacactacgactggctggaggcgggtgaacacacacagcgcaccgtggcccgcctctccggacaattgcgtaaattcctcgatgacaaggcgtggcttgaaaacaggcgaatcatggacatcctgcacaacatcgaaagcaaggcgctcaccctgcgcgaaacctcaccatccagcggcttcatgacgctcgacgtcgcttccgcatcgatcgaactgccactcgaacgccctctttaccgcccacccttcaagccgctgatcgagggcgtcgcacttgacgaaggagatgccgacatcgacaccgcctcgctctactcccagatgttcgtcgatcaagcagagctgtcgcagaacatccgcaaggcacttcaggaacggaatcaggtcggcctcggagaactgatcgcgcgccatcccctgcgccacggcctggccgaactccttacctatttacagctcgccggagagtggccgcatacagcagtggatgaagaaaccagagaacgaattgaatgggagggcgaatccggcgtaagacgccaggcgtccttgccgcgaattatctttgtaagaaacgaatga

SEQ ID NO: 41882 - DNA, 636 bp, Chlorobium phaeobacteroides BS1
atgatgaacactactgaacaccagaccccgcaacctgcatactctcctcaagagctttcgcctgtcgtggtcgccctcctgaaaggcgtgatctaccaggaggaaaacgccgcgctctggaacgccctgctaaacctgcaggccgacatacgtgactatgtagccgtgctcgggctggaactgatgctcgacgaagccgagggatacgccttcctgcgttcccgccctgcaggcgacgaagcgaacggagacgcaatgccccgtctcgtggcccggcgtcagctctcctacccggtcagcctcctgctcgcgctcctgcgcaaaaagctcgcagaatccgatgccggcagcggagatgcgcgcctgatcctgtcacgcgacgaagtactggagctgatccgcatctttctcccgtcaggcagcaacgaggtaaagctcatcgaccagatcgatgccaccctgaacaaaatcaccgaactcggtttcatccgccgtctccgaggcgaaaagcagatgatcgaggtacgccgaatcatcaaagccttcgtcgatgcccagtggctggccgatttcgaccgccgcctcgaagagtaccgccagcttgccggaaacaccacggaggagaacgatgactga

SEQ ID NO: 41883 - DNA, 3369 bp, Chlorobium phaeobacteroides BS1
atgactgaagcccttgaattcggattcatctcagacgaccgcctcgccggcttccgcctccagcgcctcgaagtgttcaactggggcaccttcgacggacgagtctggacactccggctcgacgggcggaacagtctcctcacaggcgatatcggttcaggcaaatcaacacttgtcgatgctgtaaccacgttactggtaccaggccagcgtatcgcctacaacaaggcagccggagccgaaacgcgggaacgctcgcttcgctcctacgtgctcggtttctacaaatccgagcggcaggagtccctcggaggcggcaccaaaccggttgccctgcgcgacagcaacgcctactctgtggtgctcggcgtcttccacaatgaaggctacgacaaaaccgtaaccctcgcccagctcttctggatgaaggatccgacagggcaacctgcccgcctttatgctgccgcagaacgcgacctctccatcgccaacgacttctccggcttcggcactgagatcacccccctgcgcaagcacctgcgagcaaaaggcgtcgaggtgttcgacagctttccgaaatacggcgcctggttccgccgtcgattgagtatcaacaacgaacaggcgctggagctgtttcaccagacagtttctctcaaatcggtgggcaacctgaccgagttcgtgcgcagccacatgctcgaacctttcgacgtccagccgcgcatcgcagccctgatccgccacttcgaagacctcaaccgtgcacatgaagctgtactcaaggcgaaacggcagatcgaaaagcttaccccgctcgtagaggattgcgaccgccaccgggagatcaacgcctccaccgaagagttgcgtggttgccgcgaagcactgcgcccctggttcgcatctctcaagctgcaactgctcgaacaccgcctcgcaagccttaaagaggagatggcccgccatgagagcgcggtcgaacgacttgaacagcaacgacgcgaagggcaaatgcgcgaacgaaacctccgtcgcaccattgccgaaaacggtggcgaccggatcgaaagcattgcctccgaaatcaacacaaagcaggaagaactcgaccggaaaaagcaaaaatcctcccgctacggcgatctggtactccaactcggtgaggcacaggcaaccaacgtcgaagagttcttccgccagcgtgccggacacgaaaccatgcgtgaagagattgaagagcgagaggtgagcgtccagaacgacctcaacgaaaccggcgtctctgtcgccagtatgcaacaggagtaccgggaactgacagccgaaatcaagagtctcaaggcccgtcaaaacaacatcgatgacagacagatcgccatgcgtcgcgaactttgtcaggcgctcgaaatagacgaggaaatgatgcccttcgccggcgaactgctccaggtgcgagaagaggaaactgcttgggaaggggtcatcgaacggctgctgcgcaacttctccctctcgcttctcgtgcctgagcatcactacgcacaggtggctgagtgggttgaccgcacccacctcaagggacgcctcgtctacttccgggtgcgccccccggcacggcgcgaaaccatgcccgacaatccgggctcactgccccgcaagctcatgatcaagaccgactctcctcacttccactggctcgaacgtgagatcggccaccgcttcgacgcagtctgctgcgacagccaggaggaattccgacgagagaaaaaagcgatcacgatggccggacaggtcaaaatgcccggcgagcgtcacgaaaaagacgaccgccaccgcctcgacgatcgtagccgctacgtactcggctggagcaacgcagccaagatagccgtgctcgaaaaaaacgcccgacagaaacgtgacgaactcggcgaactcaaccaccgcatgaaagtcatgcaacaggagcaatcgaccctgaaagagcgcattacgatcctctctcgcctcgacgagtaccccgacttccacgatctcgactggcagccggtagccgtcgccatcgcccggcttgaagccgaaaaacgcgagcttgagagcacttccgacaagctccgcaccctcaccatgcaactcgatgaggtagaaaaaggactcgagaagaccgagcgcctcctcgacgaacgcaaggacaagcgatccagaaccaaggagaagatcagcagcgcaagagagcttgaagaacaggccctgctgttcgtcaacgaagcagcatcagggacaaccgaccgcttttcccgcctcaaagcccttcagtctgagatgcaggagagccgcgttcttaccgttgaatcgtgcgacaaccgcgagcgcgaaatgcgcgactggctgcaggcaagaatcgacgcggaaaacaaaaagctctcgcgcctgaacgaacagatcatccgtgcgatgacagagtacagcgaaaagtggaagctcgaaacccgcgaggtcgatatcaatatcgcctctgctgacgagtaccgctcaatgctacaagagctccgtaaagacgacctgccgcgcttcgaagaaaaattcaaggaactgctcaacgaaaacaccatccgcgaggtagccaacttccagtcacagctcacccgtgagcgcgaaaccatcagggagcgtatcgcccggatcaacgaatcgctcacgaaaatcgactacaaccccggccgctacatcagcctcgaagcgcagataaacctcgatgccgacatccgcgagttccaggctgagcttcgaagctgcactgagggcacactgaccggttcggacaacgcgcagtattccgaggcaaagttcctgcaagtacgcaagattatcgaccggttccggggacgcgaagagttcgccgacctcgaccgccgctggacggtcaaggttaccgacgtgcgaaactggttcgtcttcgcggccagcgaaagatggcgtgaggacgacaccgagcatgaacactacgccgattcgggaggcaaatcgggcggacagaaggagaagctcgcctacacggtgctcgccgccagtctcgcctaccagttcggtctcgagtggggagaggttcagtcgcggtcattccgcttcgtggtcatagacgaggcattcggacgcggatcggacgaatcggccaattacggtctgcagctcttcgagcagctcaacctgcaactgctcatcgtcactcccctgcagaagatccacatcattgaacccttcgtctccagtgtcggattcgttcacaacgaggacggccggaactccgtgctgcgcaacctcagcatcgaagagtaccgcaccgaaaaacgaaacatgcagaaatga

SEQ ID NO: 41884 - DNA, 1215 bp, Chlorobium phaeobacteroides BS1
atgagcagaacgacgacgaagtggacaacccctgccgacctgaagactcaggtgcagaagctctggaaacgaggaacgctgcttgcctcgatggtgaaaggcgacaacctgttccccctgcgcctcaccctcaaagggccggattcaaggcaactgagcgaacgctttgacgaagtacgcgactggatcgggcaactcagcacggcagccggaccgtatcgcattgtctggcgaaaggtaaaccaccgtgtgctcggcagcaatgatatcccgtcggagatatggctcgactctatggaagatgcccttgggctcatcggcaagcagcatgaagcctcgaaattcacctccctggccatcctgacccgtgaacaggagccctgcctcctcccctggatctcgaaacgccccctgcgagccctggaactggcagcagtgtggcccctgatgctgcaaaccgtcacctggctgcgcgagcatccccgcccaggcatctacctgagacagatcgacctgcccggcgtgcacagcaaatttatcgaaagtcaccgtagtgtgctctccgatctcttcgaccttgccctgccaccagaagcgaggaatagcggagcaacaggaaacatcaacttctgtctccgttacgggttccgggaaaaacccctgcgtgtgcgttttcgtctgctcgaccccgacctggccatcctgtctgtcggcaccgatcaggacatcaccatcacccgggaagcctttgcccgcatcagcatcccggtagaaacagtctttatcaccgaaaacgaaatcaacttcctcgcctttccgccggtaagaggagcgacggtcattttcggtgcaggctacggcttcaggaacctcgccaacatcgaatggctgcacaacaggaaacacttctattggggtgacatcgacactcatggattcgctattctcaaccagttccgtgagttctttccccatgctgcatccttcctcatggaccggcaaaccctgctcacccatcgatcgcactggggaatggaaaatcagcccgaaacctcaacgctcacgaggctgacctcagaagaaaaagccctttacgacgatcttcgccacgaccggcttggaaaccgtatccggctcgaacaggaaaaaatcgctttcacgacactgctcgatgcgctcgaaaagcttgagtcgcctccgttttcagccacgtaa

SEQ ID NO: 41885 - DNA, 1536 bp, Eubacterium rectale ATCC 33656
atgtatatggcgaaaaacgtggggatatgttattatatgagtatgacattaaaagatagaataccaaaagaattttatagcttattccgcacgaaaaatatggatgcatacatgcagatagttgttgcgttatatgaggagaataacgaggtctatgcatcactgggactgacacgtgaggagtgtcagataatcatagcggataccatatcaaaaacaggcattgtatggcagactgattataatgaagatgagagtgataaagatagtggcagcatggataatcatgatgattataatcctgattccgaaattgatgttatatatgaccaggccactttcgcatacaccctgacaccatcagctatattgggcaggcttataaactggggctggatcaggagtgattttgatgaaaagctcaacacatatgtgattgcatttcctcagtacagccagatgtatgctgagctatttaaaaagctgcttgtggatgatgacagcagggagcgcgagagcattttggctgtttacagtgcgctttttacatatttttcagatccggaaaaaaataatgatattctgaaaaatgcgttgtatacgtcaaaaaatcttggtcagcttttatcaaatatgcaggatggtatgagggcatattttgatgagctgtcacgtatgaaggattttataggtatacagaaggtgctgattaaggaaattaataacagtgatagcagacgttatgccatccttacaaccacggatagcttttatcgttacaaggaggctgtaaaggagcttataagtaaaatccttaatcagaacgatgataggagggctgagcttgagggaattctttcgcagactacacccggtacgtttgagagaaaacgctatgagtacagcgtggagtactgtgataaggcaagtgagcttgtctataaggtggagcatgagtttgacctgattgagagaaagtacaacaagcttattgagcagaagacgatttttgcaaagagggcgcttgcaaggatacactatatcctgcaggaaggcgcagatgacgaggataatatagtaaagctcattaacctgatagataagagtgataaaacagatgagatacttggggctcttcgaaacagaatgaagttcaccagacagttttacaatgtaacggacgacagttttccgggaagaagagagagaggaagaagtgagtttgttccgtttgttattgacgatgcttcggcaggcgaagatgatatggcagattttgtgccaaagccattgtataccaaaaaggagcttcaaagcttcagagataaaaatatgcgtgatggcatgtttgtgacagatgaacaaactgtagaatccatggaggatctggaaaagcttctgtttttatggcaggaggagaccaatgagcgcatgggtgaggatacggtgagtctggatggagagataacaaagagtgatggtgtaagctactcaaggcttgtaatatccaaatcggactctaaacgagaagcatag

SEQ ID NO: 41886 - DNA, 726 bp, Eubacterium rectale ATCC 33656
atgtttgaatatatggagaatgtttcgccaaatgaggcagaaaatattagaaaaactattcaggatctgttgaggcagacctgtattttgcaaatgaagtgtgaccccgttacattgattcaaagagacaatccaaggtatcaggtgtgtcttagaaacagagagtttatctctgattatctggctgtgcttgactgtgagctggttcatgaccagcaggagcatcttttcaggataacgggtgatggtgtcatgctcgagaagatgactcttctgactgcaaggattgtcattataatgaagattatatacagggataaaatcatgggcgaggggcttaatgcgacaacaacgaatctggcggagattcgtgagtatggcagaaataccaatctgattaccagaaagctcactaatcaggaatggtcagacgctcttttgcttatgaaaacacatcagatgattgaactgccgggggctattgcaaacctggaggacaacacaccaatctatatttatggcacagtaaatatattctgctcagccatggatataaatgagcttgtgcgcatgtacagtgatgaggtggagctgattaagtatgataacgagtcggctgcaacacttgaagctgccggattgaatacagaaggcagttctgtaaaccatacccatgaatttgccaagaacagtgaaatggaggagttaccaattgagtcagtctaa

SEQ ID NO: 41887 - DNA, 3336 bp, Eubacterium rectale ATCC 33656
atgtgtctaaacaactggggcggaataaatcacaaggttttgcaatttaatgagtatgtcaatttgttcagtggtaagagtggctcgggaaaatcaaccgtcatggatgcgattcaggtaatcctctacggcagcttcagccccaccttcttgaacaaggctgcagatgatgcaaaaaacaggagaagtgttctgagctatttgaggggtgagcagaaggatggctccgcaaatcgtggcgactgtgatttttgttcggtcatagcgcttgagatagaggatacaggcagtcatacgtttacatgtataggaatagcctttgaggtacgaaaaaacgattctgagattaagagatttgtgtacttcagtcattcgggcaggatgccggagccttcatatgtgacagcggacggcttttgctattcaaataatgatattaaaaagcttgtaaatactcgctcacagtcagctgacagacgcgccagaggggatgtaaaccgtatttacgcatcgaaggaggcataccttggcacattatatgatgtgattttaggatatattgatccgaatcgttttatcacaatggaaaaaagtgctattgcactcagaatgacaaatggaacaggccagtttatacgtgattatatgtttccaaagagtgactcgggcacgatagagactatcagtgagcagcttgatgcatacagacaaatcagggaaaaaatagaggatatgcgcaagcgtattgagcttctcaaggaaataaaggagtcagggcaggaactggtaaatatccaaagcgatattgtcatggcagagacaatgatcaggtgcatagatatcgaggatatgcgtgcaaggattcaggcagctgaggatgataaaaagcgtatcgaagaagaacaggacagactttcagaaaaggcagatgatatagccgggcagcaggcagatctgcagcaagagtatatccaggtatgtgcagatttgaaatcgagcgacttaggaagcaaaaaggatcagcttagggagcttgagaagagaagtctcatgcttaccgacaacagccgtcagtggattaaaatcacaaacggactaaaggcctgggatgaggatgaggtcatcacagattatgtgagcaatgcagttttaaacctcattgaagagattgtggatggcgatgtcacggaggcaaaatgtcaggagcttcatctaaagcttgagtctataaagaaggatatcgaggatgagctcgaggacaatacttcgcagaaaaatgagataacaaaagagcttaaagagaaaaaacgtctggtcgatgatatgaagaacaaccgcaagtcgtacagtgagagcctgcgttcggcaagagctgcgctgcagagggacttaagtgatagatttggcgagcctgtgaaggtacaggtatttgcggatatgtttgatgtacaggacgaggaatggaagaatgccatagaaggacgtatgggcaggctcaagttctcacttatcacagagccgcgttatgcgcatactgctgctgttattttcagagacatgaagcagtttgaggatgtcgacctcatcaattccaaggctatcatggacagtgaaccaaaggccatggatggttcgctttatgaggcagtggatacaaaggaaaagtatgtagatgtctgcctgaaaagatatctgggacatattataaagtgccgtagtgttgacgagcttgagcaggtacgagatggagttacaccggactgctactcatacagcaactttattttcagacatctgaagaagcgcgattatactacaaatgcctgcatcggaggcagggtatccaaggcaagacttgccgagtatgaggcagatgtggagaggcttgagaaggaccagatacagcttatgggtattatttcaagtcttaaggcacagagagattttgagtgcttaaagggggagccggagtattttgtgggcctttctgaggcgtcagatgagcttaaagcagttaattcgcagaaaaatgagctcgaagagattattaggacaatggagaatgggcagtacaaggagctaaaggagaaaaagaggcttcttgagaaaaacatcgatgcacttaagagtgctttttcactgaatcagcagcagataaatgaaaagataagccagcatgagaaaatcataggtgcaaacgaacagcgaagagcacagctggaagatatgttacagggctatgttgccagagaggagcttgagaagcaggtgcaggatatgctgcagcatagttcaggagcatcggtcaagagcaaacagcgtgagaagcttattgagctgcaaggcgcagacggaaatggtggcaggcagcagtcgtgtgttgagacgttgcagactgcccgctacaggtatataaaggagtttccgtcaggtcagttcagcggagccgagaagtcaaataaggcatatgaggagctgctggagaagtacgagaaggattatgagccggaatatgagagtgagtttgaggagcagtgcaaggtgatctacaaaagtctcagagagaatgtcatcggtacaatccacggtgatattaaggctgcaaagcgccatgcctatgagataaacaggcttcttagggagactaatttctcagacagtacctatcagattaagatagagccggcaaagaacgaaaacggtcagttctatgatatgcttatggcggaagaactggacagtaaaaatccggataatggcggaatagctggacagataagctttggtgaggatgatttttataagaaatatgagcagaaaattaaacttttgacagacaagttcatgccgccaagggatgaggatgagcatctgcgaatgcagaagcgcaaggaaatggggcagtatgcggattaccgcaattatctgtcattcagcatgtatgagcaggttacggacgaaaacggccgtgtcatcagggaaaactttgtagatgacatggcaggacgtgattcgggcggcgagggacagaaccctaagtatgttgcgcttcttgcgggctttgcgatgctttatatgcagcagagcaatcgtgattcaaagattaagctggtgcttttggatgaggcattttccaagatggatcaggagcgaagtgcggtgtgtctcaagtatgcaaggaagatggacttgcagctgattgtctgtgtaccggatgaacgtctgcagtcgcttatccgaaatgtggactgtgtctatggcttcaggcggcataataatcagatttctatgatgcatatagacaagggcgattatctgaaattgatggagggatag

SEQ ID NO: 41888 - DNA, 1452 bp, Pelodictyon phaeoclathratiforme BU-1
ttggctctcgactactccaccctgaaccttctccgtcagaaccatccggcatggcgccttttgtgcgcccagcatgtgccgttggtggccgggtttctgcaccgggtctttattgtgcccaatgtgcggattctctcgcaggccgatctggttgaggcgctggaggatgagctgttcgccctgcgccagcagctcggcgccgacgcacttccgggaacggctcaaaattacctgaacgattgggccgataacgacaaggggtggctgcgcaaattctatccggacgggacggatgagcctcactttgatctgacggcctcaaccgaaaaggcgctggcctggctggaggggttgacggagcgggcatttgtggggacggagtcgcggctgcttaccctgtttgaacttttgcggcagatgagcacggggagccaggctgatcctgaattgcggattgcggagctgcaaaagcggcgtgacgatattgatgccgaaattgaacgcatccgtgccggagaaatatcgctgctcgatgataccggcctcaaggatcgcttccagcagtttctgcaactggcccgtgagttgctgaccgattttcgcgaggtggagcataactttcgcaccctcgaccgccgggtgcgtgagcgcattgccctctgggagggagccaagggggcgctgctggagcagatcatgggtgagcgtgacgccatcgccgattcggatcaggggaaaagttttcgcgcattctgggactttctcatgtcgcagtcgcgccaggaggagctgagcctgctgctggaggaggtactggccttgcccccgattgtctccatgcgccccgacaaccgtctgcggcgtgttcactacgactggttggaggccggagagcatacccagcgcacggtggcccgcctctccgagcagttgcgccgctttcttgatgacaaggcgtggcttgagaatcggcgcatcatggatatcctgcacaacattgaaacccaggctcttgatgtgcgtgaagacatcatccctccaggtgcgtttatgcctctcgatggctcctctgcggcgatcgaactgcccctcgaaagaacgctctatcgcacacctttcaagcctttaatcgcaggagtcgctctggatgaaggtgatgcagagattgataccgccgtgctttacgcccaggtggtggtcgaccgggctgagctgttgcgcaatatccgtctggaactgcagatgcgcagccaggtcacccttggagaggtggttgagcgtcacccgctgcataacggactggccgaactggtggcctatctgcaacttgccggagagtggccacggacgacggtggatgaaggagttgaggagcaggtacaatggcaaagctcgacaggcataacccgtaaggccaccttgccgcgtattattttattaagaaacggataa

SEQ ID NO: 41889 - DNA, 633 bp, Pelodictyon phaeoclathratiforme BU-1
atgaaccatacagagagtgaaaacagcgcagccccttttcatggtcaggagcttgcgtcaatcgtggttcccctgttaaaaggggtgatctaccaggaggatagtcctgcactatggggctctttactcaacctgatggctgccgttcgcgattacgtggcggtacttggcctggagttaatcctcgatgaatctgaaggatacgcttttttacgatcgaattccgaaggagacccggaggggacgaacagcgctccccggctgatggcacgccgccagctctcctacccggtcagcctgttgctggcgctactgcgcaaaaaactggccgaatttgatgcgggcgctggcgacacacgcctgattctttcgcgggacgaggtggtggagctgatccggatttttcttccccccgccagcaatgaggtcaagctgattgaccaggttgatgccacgctgaataaaatcgccgatcttggttttatccgccggttacggggagagcgacagatgattgaggtgcgccggattatcaaggcctttatcgacgcccagtggctggccgattttgataaacggcttgacgaatacctgcagcgtccggtaaaaggaatggagaaagatgatgagtga

SEQ ID NO: 41890 - DNA, 3366 bp, Pelodictyon phaeoclathratiforme BU-1
atgagtgagtcgcttgaaatgggatttgttgccgatgaccgtctggctggttttcgcctgcaacggcttgagatattcaactggggcaccttcgatggcagggtctggacgctcaaacttggtggaaagaacgccctcctcacgggagatatcggctccggaaagtcaacgctggtcgatgccgtgactaccctgctggtgccaagccagcgcattgcctacaacaaggcagcaggcgccgacaaccgtgaacgcaccctgcgctcatacgtgctcggctacttcaagtcggagcggcaggagaacctcggaggtggcgccaaaccggtcgccctgcgcgaactcaacggctattcagtcattctcggtgtctttcataacgaaggctacgacaagaccgtcaccctcgcccaaattttctggatgaaggatgccgcacagccagcgcgtctctatgccgcatgtgaacgtgatctttccatcgctgccgatttttcagccttcgggactgaaatttcaaccctgcgcaagcggctgcgtggagcgggagttgagctgtttgaaagctttccaccctacggtgcctggttccggcgacgtttcgggatcgaaaatgaacaggcgctcgagctgtttcatcaaaccgtctcgctcaagtcggtgggaaacctcaccgatttcgtccgtctccacatgcttgagcccttcacggttgagccgcgcattgccgcccttatccagcatttcgaagatctcaaccgggcgcacgaagctgtcctcaaagcaaagcggcagatagagatgcttggccctctggtggcagattgcgatacgcaccacaccatggccgagcgagccgaagagctgcgggcatcgcgcgacagccttcgcccctggttcgcctccctcaaactcgaactgctcgaaaaacgccatgtctcgctgcatgaggagctgaaccgtcaccagatcaccatcgagcgtctcgacgaggagcggcgcaccctgcaggggcgtgaccgtgaactgcgccgaaccatcgctgaaaatggaggcgaccggattgaaagtatcgccgctgagattcggcagcatcagcaggagcttgaacggcgcaaccagaaggcaacccgatatggaaaacttgccagccagcttggggagcatccggcaacgaacgccgaggagttttatcagcagcgtgccggccatgcagcaatgcacgaagcaactgccgaagctgaagtgcgggtgcaaaacgatctcaatgaggctggagttctctttacccagggacgtcaggagcatgagctattgagtgcagagatcaagagcctgaaagagcgcatgagcaatattgatgaaaaacagattgccatgcgccgttcgctctgcaaggcgctgaatctcgcggaggttgagatgccctttgccggcgagttgcttcaggttcaggagggagagcagctctgggaaggagccattgagcgggtgctccgcaacttcggcctctcgctgctggtgcccgaccatcactacccgaaggtggccgaatgggtagaacgcaccaatctgaaaggaaggctggtctattttcgggtgcgtccactctctcgcagcgaacagttacccgatcatccggcctcacttgccagaaagcttgccatcaaaggcgattctccttatttcgactggctcgaacgggaggtagcccatcgtttcgatctggtctgctgcatgagtcaggaggagtttcggagggagaaaaaagcgatcacccaggcaggccagatcaagtcacccggtgaacggcacgaaaaggatgaccgccaccgcctcgacgatcgcagccgctacgtgctcggatggagcaatgccgccaaaattgccgtcctcgaagagaagggcaagcagcagcaaaacgagctgaccaaacttgcgggacacatcagcactttgcagcaggagcagaaaacgctcaaggagcgcctgaccatcctctcaaggcttggcgaatatcctgatttcagcgatctcgactggcagccactcgccgttgccatcgcccgactggagaaagaaaaacgcgaccttgaagcgacctccaatatcctgcaaaccctgaccgagcaacttgccgcagtggaacaaaagctgcatgagacggagcagcagcttgatgaccgaaaagataaacgctcaaaaatagagcagaaaatcagcgtcatcaccgaattgcagcaacagactgcagcgctgctcgatgaagcgggaggcgaagctgccgcacgtttccccctgctccagctcatgcgccaggaggctttcggcgaccagtcgctgacggttgaatcgtgcgacaatcgcgaacgggagatgcgcgactggctccaggcaaagattgacagcgaagaccggaagctctcccgattgggcgaaaagatcatcagggcgatgaccgaatacaaggaggagtggaagcttgagacccgtgaggtggatgtcaacattgctgcagggtcggagtatcgttcgatgtttcagcagctccaggctgacgatctgccgcgctttgagggacggttcaaagatctgctcaacgaaaataccatccgggaggtggccaattttcagtcgcaactggcccgcgaacgcgaaaccatcaaggagcgcattacccgcctcaatgaatcgctcacgcaaatcgacttcaatccgggacgatacatcaccctcgaagcacaactgaacctcgatgccgacattcgtgactttcagtcggagctgcgagcctgcaccgaagggacgctgaccggctcggatgatgcgcaatactccgaagccaaattcctccaggtgcgccgcatcatcgaccgcttccgtggccgtgaagcctatgccgacctcgaccggcgctggactgccaaagtgaccgacgtgcgcaactggttcgtctttgccgccagcgaacggtggcgcgaagatgacagcgaacatgaacactacgcagattcagggggaaaatcgggaggacagaaggagaagctcgcctacaccgtccttgccgccagccttgcctaccagttcggcctcgaatggggcgccgtgcgctcacgctccttccgcttcgtggtcattgacgaggctttcggacgcggctccgacgaatcggcccagtacggactgcaactctttgcccagctcaacctgcaactgctcatcgtcacccccttgcagaaaatccacatcatcgagcccttcgtctccagtgtcggctttgtgcacaatcaggaggggcgctgctcggtattgcgcaacctcaccatcgaagagtatcgcgccgaaaaagagaggtcggtggaatga

SEQ ID NO: 41891 - DNA, 1176 bp, Pelodictyon phaeoclathratiforme BU-1
atgaactggacaacccccgccgaactcaaggcccaggtgcaaaagctctgggatcggggcctcatcctctcctccctgattggcggtgaatcggtttttccccgtcgcttgacgctgaaagggcccgactccagagagttaagcaactcatttgccgaagtgcgcgactggcttgcccgactcaccagcgcagccaaaccgtaccggattgtgtggcgcacggtcaaccaccgcattctgggagccaatgaacttccggcagagatctggattgatgcactcgacgaagccctcgtctggattggcaagcggcaggaagcacggcagttcgccgccatggtcacgctcacccgcgactggcaacccgcgcttctcccctggctggcaaaacgcccccttcgagcccttgaactggcagaagagtggccccgcatcctctccattctcgcctggcgtctcaagcatccccggcccggcatctatctgcgccagatcgacctgcccgacgtgcacagcaaattcatcgaagggcaccggggcgtgcttggggagctgttcgacctcgttcttccgccggaggagattgacgcaacggccaccggagccatcgggttttgtaggcgttacggctttcaggataaacccctgcgggtacgattccggattcttgacccatcactggcgctgctctcgacgaagagcgatcaggatatcacggtgacgcaggagacctttgcccaactggaactgcctgttacaaagctcttcatcaccgaaaacgaaatcaactttctcgcctttcccgaggttcccgaggcaatggtaattttcggagccgggtatgggtttgagaatctggcatcggtcgaatggatgcgtaaccgcgttatccactactggggcgacatcgacactcacggcttcgccatcctcaaccagttgcgcgggttctttccccacgtggcttccctgctgatggacagtaaaacattgatggagcatcaaccgctctggggcgttgaaccatctcccgaaaccggtgcactcatgcgactgaccgctgatgagagtgcgctttacgatcagttacgtaaaaatgagctgggccatcagatacgactggaacaggagaagatcgggtttgagtggctggtggaggcgctggggagattttga

SEQ ID NO: 41892 - DNA, 1470 bp, Stenotrophomonas maltophilia R551-3
atgaagcaccgcgaacgaatttcccgttaccgccatctgcgcgaacagccccagtggaagctgctcgccgccgaccatgccccggaaatcatcggcctgctgcagggcctgctgatggatggcgagcgcacgctgccctcatcggtgctcagtgagcgcctgcaacgcgcgctggaccagctcaacggcgatgaactgtcgcgcgacctgccgcgcaccgcgcaggcctacatcgcgcactggctggcccagggctggttggagcgccgtttgcccgaaggtgccgaccaggagcagtacgaactgtcgaccgcggcgctgcaggcaatccgcttcgccgacggcctcgagcaggcccgcgtggccgccaccgaaagccgcctggcgctggtcatcgaacagctctcgcagctggccgcgcagaccgaatccgatccggatgcacgcctgtccgcgctgcgcgacgagcgtgaccgcatcgacgccgagatcgcccgcgtcggcgccggccgcgtgatcgcgctggacggcaagcgcgcgctggaacgtgcgcgccagatcatcggcctggccgacgaactgaccgaggacttccgccgcgtacgcgacgacttcgagcagctcaaccgcgatttccgcgaacgcatcatcgacgacgagggtgagcgcggcgatgtgctgtcgcagctgttcgaaggcgtggacgtgatcggcgagagcgatgccggccgcagcttccaggcgttctggcgactgctcaacgacgccgaacagagcgcccagctcgacgctgcgctggaagcggtgctggcgcgtggctttgcgcgccgcctggaccgcaacgaacgcaacttcctgcgtggcttcaccagcaccatgcttgagcgtggcggccaggtgcacgacgtgctgcagaacttcgcgcgcagcctgcgcggcttcgtgcagagccgtggctacctggaacagcgccgtctcaaccagttgctgaaacaggcgcagtccgaagcgctggcgctgcgcgacgagttccccgcacagcgtggcatcggccgcgacctgcagctgaccaccagccgcctgcgttcgtggtcgcagtggaagctgcatgatccgcgcagtgcccaggtcgatggcaacgtcgaatacaacgacgccgccgcgatcagcctggaaagcgtcggcgatctggtcgcttcatccgaaatcgacttccgcaccctgcgccgcgacctgcacgacctgctcgatgcacagccgcggctcagcatcgcccaggccctgtcgcagcgcgaggcgccgcagggtcttggcagcgtcatcggctatctgtcgctgggcacgcgcttcggcaacgtgatcgccggcgagcaggagcttgccgaatggcgtggtggcgacggccagatccgtcgcgcccgcatcccgctggtttggttcacccaggagagacgccatgagctggcatga

SEQ ID NO: 41893 - DNA, 702 bp, Stenotrophomonas maltophilia R551-3
atgagctggcatgaagatcccatcgacgcagcgcaggccgacgtggcggaagacgcctacgaagccgagccggtggcggccgtggcacagccccgccgtggcaacgacgtgtactacctgggcgataccggacgcctgccgctggatgcgcgccgcgcgctgtgccagctgctgatcggccccagcatcgaccagctgcgccacgccaagctgtggccggcgctgatccgcagcgaggcggccatccgttcgtcgctggccgacctgttcctggaactggtgctcgaccgtgacagcggtgtggccttcacacgccaggccgataccgaagacgttgatgcgccggtgctgctgcgtacctcaccgctgaccttcatcgattcggtgctgctgctgtacctgcgccagcagctggccgaggccgatgcgcgcggcaaccgcgcagtggtggccgacgccgagatggccgaagcgctggccatctacgaaaagaacctgtccaccgaccgcgccggcttcaaccgccgcgtcgcctcggcggtgcagaagatgaaggacaaccacatcctgacccgcctcagcggccaggaagaccgccacgaagtctcgccggcgctgaagctgctgttctccgccgaagacgtgtcccagctttcggcggtctaccgccagctgcgcgaaaccccggccgccgaggcctga

SEQ ID NO: 41894 - DNA, 3381 bp, Stenotrophomonas maltophilia R551-3
atggctatctccaagcacactcccgccctgttcaacgaaggcctgccggatccgcgcctgcagcagttccgcatgcgccgcctgcaggtgcacaactggggcaccttcaacggcctgaccgaagtgccgatcgccgagcgcggcttcctgttcgtcggccgttccggctcgggcaagtcgaccctgctcgatgccatgtccgcgctgctgacgccgccggccatcgtcgacttcaacgctgccgcgcgtgaagccgagcgcagtggccgcgaccgcaacctggtgtcctatgtgcgtggcgcgtgggccgaccagcaggacagcggtaccggcgaaatcgctacgcagtacctgcgcaagggcgcgacctggaccgcactggtgctggaataccgcgccggcgacggccgcgtggtcagcctggtgcgcctgctgtggatctccggcaacggcacctcggccggcgacgtgcgcaagcactacatgatcgccgagcgtccgttcgacatcgccaaggatctcggcggcttcgacctggacctgcgcaagctcaagcagaagctggccgacctgcaccacttcgacacgttctccggctacgccgagcgcttccgcgacctgctcggcatcgacaacgagatggcgctgcgcctgctgcacaagacgcagtcggcgaagaacctgggcgacctcaatgtcttcctgcgcgacttcatgctcgacacgccgaagaccttcgacgccgccgagcgcctggtcagcgacttcgccgaactcgatggcgcgcaccaggccgtggtcaccgctcgccgccaggtggaaaccctgctgccggcacgcgcctactacggcgacctgaagcagatgcaccgccagcgtggcgacgatgaagcgctgaagctcggcgtcgacagcttccgcgaaagccgccgccaggcactgatcgaagcacgcctgcgcgagatggacgtgcgtgaccgtggcctgctcggcgaagaagcccagcgccgtgccgcgctcgacaaccacaccgagcgcctggccgaactggagctgcagcgccgtcagcagggcggtgagcgcatcgaggaactggaacgtgagcagggccgtgccgaagccgagcgcgaccgccgcaaggccaagcgtgaccaggcccaggaagcggcacagcagctgcaggccgaactgcccgatgacgcccatggcttcgccgaactggtcgagcgcgcgcagaacgaactgcaggaccgccagcgtgcctcggcggcactggacgatgcgatcagcgatcgcctcggcggcaagcgcgacgacgagcgccgcttcggtgaagtgcgcagcgaactcgaagcgatgcagcgcaccccctccaacattccggcgccgatgcagaagctgcgcgcacgcctggccgaggaaaccggcatcgccgaagcggcgctgccgttcgtcggtgagctgatccaggtccgctcggaagagcagggctggcagggtgccatcgagcgcgtgctgggcggtttcgcgttgtcgctgctggtcgatgacaagcactacaacgaggtcgccgagtgggtgaatcgtacccacctgggcatgcgcttcacctattaccgcgtgcgccgcaacgatgatgcgttcgcccgtgagccatcggcgaagtcgctgctgcacaagctggaactgcgcgaccacgtgttcgaaagctggctgcggcgtgagctcggcaagcgcttcgactacgagtgcgtggatgccaagcagctgcgcaacgtcgaccgcggcatcacccgcgaaggccaggtcaagcatccgggcgaccgcttcgagaaggacgaccgcagcgcggtgggtgaccgccgtcgctggatccttggcttcaacaaccacgacaaggtgggcgccttcgagcgcgaagcacaggaactggccaagcgcatcgccagctgcgagaccgatatcgcgcggctgcgcggccagcgtgaccgcgacaatgaacgtcgcctggcctgccacgaactggtcagcatcagctggaacgagatcgacattgccgccccgcagcagcgcctgagcgacatcgaggccaccctgcgcgacctgcgcgaaggcaatgccgatctggccaagctggccaagcagatcgacgccgtgcgcgccgacatcgagcagtcccgccgcacctatgaggacgtccgcgtcgagcgcggccagctggtcaaggaacgagatcgcttggaccgtgcacgccagcagagccgtgcactggtgctgccgagcctggcccaggagcacgaggctggacttgccgagcgcctgcaggagcagggcccgctcagcctggaaacgctggaagcgcacatgcgccaggtcagcaacgcactgaacgagcagctgtcgtcttcgcagcaggacctcaaccgcatcgagaaccagctgatcggctgcttccgccgcttcatccagcagtggccggaggaatcgggcgacttcaccgtgtcggtggcctcggccgaagacttcctggcccgcctcgaacgcctggagcgtgatggcctgccgcagcacgaagagcgcttcttcgacctgctgcagaaccagagcaagaacaacctgctggcgctgcagcgtcacagtgccgaggcccgcaagtcgatcggccagcgcctggacgaagtgaacgcgagcctggaacaggtgccgttcaaccgcggcacgctgctgaccatcgaactgaacgatcgccgcctgccggaagtcggcgagttccacctgcagctgcgcgaggtgctgtcgcagcagcagaccgagcagcgtgagctggccgaatcgcagttcaccgtgctgcgccagctggtcaaccgcctgggctcacaggaaggcgaagacaagcgctggcgcgagctggtgctggacgtgcgcatgcacgtggagttcatcggcgtcgagctggatgcggagacgcgccagcaggtcgagatctaccgcagcggcgctggcaagtccggcggccagcgccagaagctggccaccacctgcctggccgcggccctgcgctaccagctcggtggcgccgacagccagctgcccagttacgccgcggtcgtgctcgacgaagccttcgacaaagccgacaacgagttcaccgcactggcgatgaacatcttcgacaacttcggcttccagatggtggtcgccaccccgctgaagtcggtgatgacgctggaaccgttcatcggtggcgcctgcttcgtcgaaatcagcggccgccacgactccggtgtgctgctgatcgagtacgacgaagaaggcaagcgcctgaagctgcccgagcgcagccgccagcaggccaacgaaccggaagaagcggaggcctga

SEQ ID NO: 41895 - DNA, 1353 bp, Azotobacter vinelandii DJ
atggaggatgcgctacaagcgctgtccgagatgctggctgcttatgccagtcaggagctttacgagatcgacccggatgcaacgcatctccaggccgggcgtgaacttcgtgaatggatcaaacggcgtctggtcgtagagcgagagggtcgcatatacgcaaccgacgcgttggagtccgccatccagttcgtggactcactggatagtcggatcatgacctccacggcatcacgcctttcggtggtccagcgcgagatcgaaaacctggaaacgggtctgaaccccagcccaactggccgcattgccagcctacgccgccgaatccgggatttggaacacgagcttgagcatgtagaggccggccacgtcatcgtgctggacgaagcgcaggcgatagagggcatacgcgaggtatataaccttgccaccagcctgcgcgcagactttcgacgggttgaagactcctggcgcgaggctgatcgcgcccttcggcaatccatcatcagtgagcagtctcaccgtggagaaatcgtcgatcggttgctggacggtcaagatgctctactcaacacaccggaagggcgtgtcttcgaaagcttccagcagcaactgcggcagtctgctgagctgggagctatgcgtgagcgtttgcgtaccatccttcgtcaccctgcggttccaaaggcgttgaatcgtccccagcaacgtgagctgcgttggttggcattacgcctggttcgggagtcgcaggctgtacttcaggcacgtgcccgaagcgagcgcgatgtacgtggcttcatgaagacgggcctggccgccgagcatcatcgcgtcgggcagttactcaacgatttcttcaccctagcgctcagcgtcgactggcaacgccaggccgtgcggcgtagcgctgtctgtttgccgccggttggcgtagccattaccggagtcccggcaatcgagcgtctgcgtttcaagactctggatgacgatgacacgggcgagctggatctgagtctgaagccagcggggttggaacagattgatgacgacttctgggatgctttcgacgggttggaccgtgaagcgctgattcatgacactctggcggtgctgctggagcaggggcgacctgtgagtctcggggagcttgcgtctttgcttccacctgctcacgacctggaaacctttgcgctctggttagctatggcgcgcgaggcaggtattgaggtgctgacagaggagcgtcagatcgtggatctggttgacgaggatgagcaacgctggcgcttcaacctgccttatgtcggtctcgaccacgagacactcaaggacatcgattgggagttgtga

SEQ ID NO: 41896 - DNA, 663 bp, Azotobacter vinelandii DJ
atggatgatgaacaaactgtcataagcgccgctgtacaagtcgatgagcgacggacgccgcaacgggtacgcgaggctgtacaggagatgctcaagtacgggctgctggaagagagtcacaagcccaatttgtatcgctcagcgctctccagtaccgaggcggtagacagaatcctagagccgctcgaccttgccatgggggtcgacgaggttcgtggactggtgtttgtcaccgttcgccagggcgaggtggccgagcaggatgactggtcgcaccctcttgtacggaggcaaaggctgaatctggagcagtctctgctgattgccattttgcgacagcatttcattgcatacgaacaggaaagcggtacgggtgccaatcaagcgctagtggcggttgatgagttggttccgcaattgcaggtttacctgggagagctgggcagtgaggcgaaggagcgcaatcgcatcatcacactgctggatcagctcaaggggcatggtttggtgtcggctctggacgcacatgatcgcgttatcatccgccccatcattacccatttggccaacccggagaacctgcaggcgctggtggcatggctgcgagagcaagtggagggggcaactactccggctgccgatggtgaggaggatatggcatga

SEQ ID NO: 41897 - DNA, 2940 bp, Azotobacter vinelandii DJ
ttgggcgctgtgctctggttcgagggcacaagctcctcggcgtcggatctgaaaaaactttggctgttaagcgagtcccccgagcagactctggagcattggctcaaccagcatcacgcaggaggcatgcgggctctgcgtcagatggagaaggatgggacgggtatctggccttatcccagcaagaaagccttcttggccaggctgagggattacttcgaggtcggtgaaaacgcattcaccttgctcaaccgcgctgccggcctgaagcagctcaatagtattgatgagatctttcgagagttggtgctggatgaccgctctgccttcgagcgggctgcagaggtcgccagcagcttcgatgatctgacagacattcaccgagagctggaaaccgctagaaagcagcagcgctcattgcaaccggtcgccgatagctgggagcgttataaggccttgcaagaacagttgcaggataaacaggctctcgaaggcatcctcccggtctggttcgccgagcaggggtatcgcctgtggttggctgaaaccaggaggctcgagaaggaacacaaacaggccgaactggatcaggagcaatgcaggagtcagcttgaggtccagaaaggtgtggtcgatcaacatcgtcagcgctacctgcgagtaggtggcgcagggatagatcaattacgcgagcgcatcgctgattgggtcagggagtgcgataagcgcagcctgaaagccgagcaataccgacgcttggccaaagggcttggactagcggatgagttatcggccgctgctctcaaggagaatcagcagcagatcgcggcacgcctggaaatactggcccaacaaattactgacgcgcgccaaaaggcgttcgacgctggtctcgtccagcaggggctcaatggtcgcctacagaccttacagcaggaacgtgctgaggttgagagacggccaggctcgaacctgcccgggcaatttcatgcgtttcgaagcgatctggcgcaggcgcttgacgtcgatgagtcggccctgcctttcgttgccgagctggtgcaggtcaagcccgaggaactggcctggcggggcgccattgagcgggcagtcggtagccaccgactacgtatcctggtgccgcagggctcatcccaggccgcactgcgttgggtgaaccaacggcacaaccgcttgcatgtgcgcttgttggaggtaaaggagccgtcttcgcgccccgtgttcttcgacgatggttttacccgcaagctgactttcaaggagcatccgtaccgagaaaccgtaaaggcactactggcggacaatgaccgccactgcgtcgaaagcacggagcaattgcgtcatacccctcactccatgacggcccaggggctgatgtcgggcaaagaacgcttcttcgacaagcaggaccagaagcgcctggacgaagactggctgacaggcttcgacaaccgcgaccgtctggccttcttggctgagcagattcgcgaggtcaatgaacagctcgcgcctgccaagctggccttggatgctgcccaggacgatgcccgtcagttggagactcaagcttcgctgctgaaacgcgtggaagaactgcagttcgaggatattgatctgccgggagcccagagtcagctggagtcgctgcgtacgcaactgaccaccctgacgcgccccgattctgaccttgccatgatcaagtccgaactggataaagccgagggcctgcaggactctctggatcaacagctccgccaactgatcgagcagtgcgttcagctaaaaactcagtttgatcaggccgcatccgctacccgtaaggcatataacggcgcggagaaagggctgaacgatacgcagcgtgaactggcgaaagagtacttccctactctggccccagaagacctaggcgacattatcgagttggagcgcaagcatacgcgggagcttcaacagcagctcaaatcgctcagcgaaaaactgagttatcagcaagcagagcttgctaaacggatgtccgacgccctgaaagtagacaccggtgcgctttcagaggtcggtcgggagctggcggacatacccaagtatctggagcgtctgcgtgtgctgaccgaggaggccctacccgagaaactcaagcgcttcctggagtatctcaatcgctcctcagatgatggggtcacccagttgctcagctatatcgatcatgaggtctcgatgatcgaggaacgcctagatgacctgaacagtacaatgcagcgtgtcgacttccagccagggcgctatctacgtttggttgcaggcaaggtcatccatgaaagtctacgcacgctgcaacgcgctcagcgccaattgaattcggcgcgcttcatcgatgatgaaggtgagagccactacaaggcattgcaggaactcgtagggctactcaaagacgcttgcgaacacagcaggactcaaggggccaaggcgcttctggatccgcgtttccgcctggagttcgcggtctcggtgatcgaccgcgagagtaaaaatgtcatcgagacccgaacaggctctcagggcggtagcggtggtgagaaggagatcatcgcctcctatgtgctgaccgcttccctcagctatgcgctctgtcccgacggcagcagccggccgttgttcggcaccatcgttctcgacgaggcgttctcgcgcagctcccatgcggttgccggtcggatcatcgcggcgctgagggaattcggtctgcatgctgtcttcatcacgcccaacaaggagatgcgcctgttgcgccaccatacgcgttcggcagtcgtcgttcatcggcggggcgtggaatccagtttggtttccctgagttgggaagctttggatgagcatcatcaacagcgcatcaaggcgatgcatgaagtcgcccactga

SEQ ID NO: 41898 - DNA, 1383 bp, Bacillus cereus B4264
atgaaaaaattatttgaatgcattccggaaaattatttcaatttgtttactgggaaaaatcgaggcttttatgctgaagttgcttttttactatatgaacaattccatatcaatcgagctggtattttatacagtttgatgaaagatgagattcaagaattgatagaaacaaaagaggagttaggagaatgtattgatgtagaagatgagatggaagaaagagtgcaagacagtgctgagagagcaaatgaggtgcttcggcgtttaaagaaacttaaatggattgacgtggaagtacgtgatcaatttgaggagtttatagtacttccagtgtattcgagccgtattttggctgtgctaaaggaaatttgtgaaaatagaacaattgaatatcaaagatattgttttacgacatatcaattattaacaggagtggaggcggaggagcgcccagcttcagctattttggagtctgaaaaatatagtgagcaactttatgatgaattaacaattttactgcacaatatgaaaaatcacatggaaacaattgcagctaaagatgatatacaacaagtgttggaacatcattttggagaatataaaaaagatataattgataaaagttatcatcgtttaaggacgtcggatcatgtgtcgagatatcgaaataaaatattggagcgtatacagacttggtttttagatgatgaattcatgagacgtgccgccaaagatgctgtagaaagtggatattctactagtcaagaagaagcaatggatgtattaagtaagaaaatgtatagagttgaagaaatttatagtaatttagatgaaatttgtaatcaaattgatgcacgtcattatcaatatttacgagcggtcttagatcgttctcgatatttaagtacttataatgacagtactgattacaaaatatcttatattttggaacatatcaggcaaacggatgagaatatactcgattcttccccgtttcgcttagtacagtttaggcaacttcaagaagcatcactgttatccccacgtaagaaaaaaggtgtatatgaaccagaacagcatgaggttaccgaaattaatgaagagatgcgagaggagctaaaagctgaaaatttaagacgtattgaaaaggttattaatagaaagaaaatccggaaatttgtgttggaagcaatgaaggggcgtcaagagatagagatgagtgagttggatttgcaaaatgaggaggacgctttgtatttaatttacgtttatttgtatggttacagtagggacgctggatatacgttaagtgaagagtcacctgactttattacacaaaggggctatacattttctaatcgcacgataaaacgagaaaattag

SEQ ID NO: 41899 - DNA, 594 bp, Bacillus cereus B4264
atgcaaaatatattggatagagaaagagaagagatggaagttgttattaattatttgttttctcataattttttattgaaagaatttcaacgtgagaagtatcaattggcagtacgaaataaagatatcattaagcgatatttaaaggtaattggttgggattttcttgttgatgaaaagcatgggtgtattgttattgcttcaccacattacgagcatcggttgaaattgaagaaagatgaaacgatttggttgttagtattaagacttatttatgaggaaaaacgcagttcgctatcaattagtcaatatccctttaccactcttcaagaaatcaaggggaaatatgagacgtttcgattaacatttgtatcaaaaacgaagttacgtgaacttgtgcagatggggaagcaaaatcaacttttgagaccaattgataatgacatagaattggatgattgtcgttttcagcttttccattcatgcattcatgtgctgcaacaaggagatttaaatgtattgtatgaaaaaataaaatcttatagtgaaggtggggatcacattgaaatggatgaagaaactacgattaattaa

SEQ ID NO: 41900 - DNA, 3324 bp, Bacillus cereus B4264
ttgaaatggatgaagaaactacgattaattaattggcattattacaatgatgaaacaattatatttggaaaacaaacggttatatctggtcatacaggagcagggaagtccacaatcattgatgctttacaagttctctttatttcggatgagcggaagattaaatttaattcagcagcatatgaagaagctaagcgttctttaattaattatttgcgggggaagatagggacagaagaaaagccttttgtacgagaagggtattttacaacgtatattgttgcggagttttatgatgagaaggtaggagaaagttttgtaattggtatttcaattgatgtatttaaagatgatgagaaaataaaagagtattttattatacctaaatctgaaattaatatgatttcgttttttaatataaaaaatgagaaatgttacgtagaaacacaagctgatttttcaaaaaaattaagagcgcaatttccaaaggctatagttgaaaaaagttcaattcaataccaaaaagctttattacatcgctttggtggactacatgaaagatttattaaaacttttgcgaaagcattatcatttaaaccaatcgataacatgagggattttgtatataaaaatatactggatgaaaaagaacttaaaatcgatgttatgaggagtatttttcaaacacatgaagaattgcaaagagaattagaagaattaaaagaaagaaaagaagagctggaacgaatagataatatttatatggaatgtgtaaagttggaagcggatatttccatacaagagtatgttcttcgaggactagattatttactgatacaagaagaaatgagtatgtgtcaaaaacatattgaacagaaagaaaaagaattaaaaaaatgtgaattagatcaaatgaagacagcagaacaaaaagagtatgctagaaaaaaagagattgattatgaaattaagattaaggatagtgctgaacaaaaaagacaaaaacaattacatgaacaaatagctcaagcgaaaaaagaatgtgatgatttagagcgtgccaaaaatgtatatgttcatagtttagaaagagaagaaaaggatgtttctagcctttttaattatcaaggtaacaaatatttctctttaagcaaggatgagaagcatttattagaaataggaagagattgtctagccttcttgtcacataatgatggtactggagggaatagagaagagcaaacattaaataaacttggagagagtttaaaacgaattagtgggcgtttttataagagtacagcagaattggaacacagatctgttgaattgaaaacagaagagaaaaaattactttctgatatagagaatttaaaaagaaagaagcgctcttatcccatgtctgttgaaaagttgaagggattactagaaaaacatttagagggtcaatcgaaagtatggattctttgtgaagagttagaaataaaaaatgataaatggcgaaatgccctagaagggtatttgaatactcaaagatttgatattttggtagaaccacatatgtttgcgactgcactgtctatctacgagaaggaaaagtggaattttggtcttgaaggtgttggacttgttgatactgaaaaagaaaaaacatatttagggaaagttgagaagggttctttagctgaagagatagtaggtggtaacaaaatagtacaggctcggatccatcatttattaggtagggtaataaaggcggacaatgaacaagaattacgaaagcataaaacagctgttactgcgacatgtatgagttatcaacgtcttgtagcacgtcaaattcctagaaaagtatatgaaactccatatataggtgcacatgctattcaaaggcaattagaaattaaagaagaaaacttaaaggaaattcaaaaagaactgcaaattgtagggtactatattaaggaatttaagaaatggattgaaattttagaaggtaagcaatctcattataaaaattatacgttaaacttttcattaaatgataggattttggggtttaataggaatatagataaatggtatagcgaactgaatactcttgatttgtcacaattagaaaatttacaccaaaagttggaagagtggaaaaagaaatataatcaatttaatagagaagaaggtagattgtttgaacaaattgggaaaatgaaggaagaacttcaaagtgtgaaaagtgagttatggaaaaaggaaaaagtcgcaatagagattttagagaagtgggaaagttggaagtttgaatatagaattgaattactacaagaggctgaaaaaaggtacaatcaagctatttctacaaagaaggcctatggtgctataaaaaataaatacgaaaataataaaaaagaaaatcaaaataaatacgaagaaaaatggagttttctagaaagtgaacgtaagtcttataatgaagcgcgaactttccaaggaattatacaggctaaagataataagcagtatgaagaagcactccggaaaattgcaaatctcgatatcccaaagtttgaacaagagattaaggaaacgttgcagcaagctgaagaggaatttcagtctcattttatttacaagatgcgggaggctattcaagcggcgcgtagagaatttaatcaattgaaccatgcgttaggaagatttaaattccgaaatgacacgtatcgatttgtaataaagccaagtgaacaatataaaaaattttatgatgtaattatggatgaaagagtacagccggagatatctctttttgattttggtgatgaagatagggcggagattttaaacgacttatttgctagattagtgttgggcgagcatggtgaaaacgaagagtttgtggactatcgtaattatctcgattttgatttaagcattaataatgaaaatggaacaagatttatgtctaatttattacgtgagcaatctggtggagagacgcaaacacctttttatattgccatcctagcatcatttcaacacctttatcgaaataaaaataccatccgtttagtagtgtttgatgaggcttttaataaaatggatgaagagcggattcaaattagtttacgtcttattaaacagttggatttgcaactaattgcagctgttccggatgagaaaatggctcatatggcagctgaggcagatacagccattataattaaccgagtagggcatgtatgttttgctgacatgctatcttatccaaaggaggatggggtaattggattacaagagcaagattctctcagtcttattgaataa

SEQ ID NO: 41901 - DNA, 1221 bp, Bacillus cereus B4264
ttggattacaagagcaagattctctcagtcttattgaataaatatgaaaatagtaaaactgttcatacaggtgagagaagtgctcagcgccctcaattttcatttcggcaaaagcatgaactttctaaagcatataatgatgaaatggattatacaaaccgtttagaaattaatactgcattaaaggacttacttagtaaaggaattattgaagtgaagtgggaaaagtgggaagagaatcggattgctgaaaaagtttatttacagtatgattttattccgctagcttatagagaagctggtatagagccgaaatttgaaaagatgaatcggattttaaaagtgttagaaccactggctattcattcatggagttgggttcgacaatggtataaagaagttcaacagtcgtttcaaaataaaaaaacggcaagaattgatttaaacgatgttaaaggttatgaactacttgtaaaagcactttctagattagaaggtttagaagatagtataccaaaaaggacctttagccaattagtattcggggatacaaaactttttgaaactacgatacaaaaccgattattaataatatataaaaggtatggagatatagaatatgaaagtgataaagaatatttagagagtattgggattttagagaatatccaacctgtctatgtaaaaggaaatgttgatatttgtattagaggagagaagattgctctcggttcccttccaggtgggcttggtttaatggatgaaacaataaaagaactagaaattcagtatgtacacgatgaaagtataatgcttattgagaacatgacgacctattatgaaaaaattaaaaaaaataataatatgttatttatctatacaggtggatttccaaaaaagaatgtacagcaattattaaaaaagttgaatgtgtatttaaaaaaacatccaatttcagtatatcactatggagatctagattatggaggaatccaaatatttgagtacattaagcgttcgttttttgcggagcttgagccgtatatgatggatgtgactacttataggaaatatataaattacgggatggaatttagtgaaggatatgaagagaagttactcaggatgttagaaaatgagcgttattctttatggcatgagttaattaaagaaatgcttaaagagaagaagcgtgttgagcaggaagtgattgtaatataa

SEQ ID NO: 41902 - DNA, 1575 bp, Bifidobacterium animalis subsp. lactis AD011
atggcggatgtgcggagcgagctggcgcagttgaggccggtgtatgagaccggcgtgctgcgcatgctgctgcataagtattccgacatctacatcgccatgctgcgcgcctgcttcgacccgctcactgcagaagtcccgcaggagcgactgctggcgcgtatgcgcgaggcgatcggcgagctcgccgccgatggcacctacactccgcgtgagggcgaggacgacatgatggccgcccggcgcatactcaaggagctcaaagccgaggatgccggcgactacgcgtgggtggccgattcgatcgaccgccgccagcacaggctcatgtgccgcctgacccagcgtgcccatagagccatcgaggcattggcaacgcttcagcaacgcacggtgtcgctgtccggtgcgcaggtgaattcgatcatcatggagatcgagagcgcgcgcaaacagctcaccgtgaatgtggaggagcgcattgagctgctcgaacgcgagatagaggagcggcgacaccagatcgacaatctcaaggcgcatggcattgggcagcggcccactcgcgagcaggtgtctgacatcatcaacgtcgtgtacaacacgctgcgcggtgtgcctgtcgatttgcgtgagttggtgatcaccgagcgtgacaatggcgatgcgttgcgacggcgcatcgacgacggttcgatgagcagcaatgacatgctcacgttctaccacgaggaatacgagcgcacgtaccggctcagcgacgagggacgccgcttcaacgatgcattccaggtaatgtatgccccgcagagccgcgaggagctcaatgaggcgctgcaagacatctcgaacagcgaatggctgcatggcgaggccgacgacctcatgagcgtggtcaatcgggagttcgaagacatctacgacggcatagacgatgtgcgtcaccagattcgtgtgaccgacgaaagcgtgaagcttctggtgaggcagcagaccgacatgcagttccgcacgatgtctcgtcagctcgcgaagctgttcacccagttgggtgagtcggtgcatgcgaaaggccgctacgacattggcacggcgaccacctcgttgctcacattgccgacccgtgcgcgtgaaacacccgtgaaaaccgcggctcccgaactgcagatgcaggcggacgacggcatcgcacaggtcgatctcaatggcatcgttgcggccggcggcccacgcatccaccatatgatcgaattggtggccgcgcacccggtgctcatcgacgatgccggcgatgcgctcgccgattccgttgtcgacatcgcagccagtttcaacgaacttcccgccgacgaacgccgtgagagcgaaatcgtgggcttcctgagttatctgggttccgcgtcgcctgccggtgccgctggcaatagcgatggcggccagattcccgtgccccgcgagagtctatggcattgcgtgaccaccgacggtcggactcgcgtatggcgcacctgcgcgctgttcgtgcccgggcaggtgctgaaggattttctcgacgataccatggtggaggactga

SEQ ID NO: 41903 - DNA, 744 bp, Bifidobacterium animalis subsp. lactis AD011
gtgctcagtgccgagtatgaggaaggtgtggccgacgaggccggcatggccgatctggccaatgtgcacgcactgttcgatggtgacatcggcgacatgcccgcacccgcccgtgaggctgcgattgcgctgaaacgcaacaggtcgatcagcggcgacatgtaccaccaggcactcgactatatggaacacgtgcggcgttcgctcaacaacgacatgctcgtgccggtcatcgacacctactatgaggtgatgtatgcggagccgatcaccgccgatgaatacggcatacgatcgctcaagacccgtgccagcctgagtgcccgtgaggcggtgatgctggccgcgctgcggcgcaaggtgctcgactacgagaatgtgggcgccgcggccgccgattggctcatttcgaaggaggagatcgtcaacacgatgtccaccggcgcgggcccgcttgccggccgcaattcggaggaggcggtgcaggcgcaggtggaccgcctgatcggcagtgcgaagaacaacggcttcctggcgcctgtcgaagatgacgaaggcatgtatgtgatcaccaaactcgtgcccgtggtgctcaatccggagcgcatcgccgcatggctcggcgcggacgacgcatcgaccgcacagcccgaaccggatggaacaggtgacgattccgacggctccgggcataccggccaagacgaacaccccgaagatgacgatatggaggcgctgttttga

SEQ ID NO: 41904 - DNA, 3498 bp, Bifidobacterium animalis subsp. lactis AD011
ttgagcgagacttccgacatctatgcctcgattgaactcatgccgccgcattgggcgcttgcctcgcggcaattggtgaattggggttcctacgacggctaccatgtattcgagccttccaccgccggaaacgatacggtgacgttgctcaccggccagagcgaatcgggaaaatccacactcgtcgatgcgcaggtctcgttgctctacccggcgaatgccgcattcaacaaggcctcgaacgccggacgctccgatcgcagcgactactcatacctgttggggctgaggggaatccgcaacaacaacgggcacgacgaaccggtctacctgcgcgggcgcagcgggaacggggagccgtacgcggtatggggtgcgatcgtcgaccactatgtcgacaccgccaacagcggcgcgttatggattgccaagttcatgtatctgcctgcggacggcgcgccggagagcatggtgaagctctacgtggtctccggctatgcaatcgacccgcggctcatggatgcacatcgcgaggagcgcttctcggtaccgcttatcaagcaggtgtacccaggtgtcaccgtgtataactacgcgaagcagttccacgaagacatctggaaacgattcggcctcactgagtccgcgtgccgtctgcttcaccgcatgcaggcctccgacgcgccctcccagctcgatgacatcttccgcaaaggtgtgctcaatgagccgcgcgccgttgagttcggcaagctcgccatcgatgattacgaacagttcgccgagaatttctcgagtatggagcgtacgcgcaagcgagtgcggcagctggaggcgattgcctccgagttcgccgagtatgagtccgccgaacgcggtgtgcgcgagctttccaccatcgcccccgagcagggcgatagcgcacggattcgcacccaatggcttgacgatcgcattcatgccgacatcaccgaagtcctgcccgaatatgagcagcatgccacggactgcagtgccagtgcacaggccgccaaagagcgggcggagcagatgcgggaacaggccgactcgctcaataggcagcttcagggtatgggaggcgacgagataagccgtctggaagaccgcattcgcgatgcacaacggcgccaacgcgaagtgttgggacgcagggagctgttggcctcccgattcagtgcctctggcgaagcattgccggaaagtcgcgggcagtgggatgcattggtggccgaatacacgcaattcgaatcggaataccagcagcgtaaaaccgaattgcacgggttgcagtacccattgatcgacgcccagaagaaagccgaacagcgaaccaaggcactcgagaaggacttggaacgcaaacgccagtcgaagacgcgcatctccagcgatatggacgaggcccgcaatatgattgcgcgcgccaccggcctgagcccgcaggagctgccttatgcggcggagctcatggacgtgggcgaggagaacgaggagtggcgcaccgccatgaacgtggcataccggtcgctcgcaacggtgattctggtcgacagttgccatgagaacggcttcgcagcgaaagtctcgcagattccccaggaggcgctcccacgacgcaactggcggttcgtcgacacgagcgtccatgtggaggctgaggagcgtgaagggtggctgtcgagcaagctcacgttcaacgtggaatctccgttcgccgattggcttcgtgcccgggtgaccgaggcgcggtacgacgcatggtgcgtggaggcgatcgacgacaccaatgagacgacgcgccaggtgcagcgcgacgggcagatcaaggaaggtcggaagggcagtcacggcaccaagaacatgcctgccgtcatcggattcgtcaccgatgcctatctgcgcgatctggaggcagacattgccgaggcgcgcaagacgcgggatgccgcaactcgcgatctcgaacagtacgacgtgcaactcaacgcgcttgagcaacgccatagtctggcccagacgctgcaggaccatgcatggaacgacatagacgcatatggtgtggaggaggaaatcgccagcctccaacaacgcgtcgacgaactcgagcagaaccccgaactggcacagctcaatgccacgctgaaagtccagcagcaggaaatggccaaggcgaacagtgcatgctatgccgcggaagacaaactcaagcgggcgaatgcggcggtgaggtcgacccggcagtggctggaagcgtatgaccggcgcacgcaatccgtggaacgccggcctttgaacgaggcatgcggtcggctgcttgaacggggatatctggcatacttcggcgagagcacacaatcggcgaacgaacgaatgggcagaatactcggtttggacgggcaatcctgcacctcactgggcggccatgtacgcgagaacgaggcctgcgccaaacacgtacgcgaactgctcggcacactcgcccaaaccgtgggcaggcaggtgaaggaactggctacacagcgcgacaaccggaaacggtcatgcgaggcgagcatgcgctcgtacctcgaccagtatgcgtcaggcgacgaacgagtgagcgccgaggtggagaacgagcggtacttcaggaaagacctggaggagctcaaaccaggggtgatcggcgacgaggcgacgaacgtggagtacatgaactcgctcgacaagatgctccaggacctcgtgcagttgcagacgatgctcaaacttgaccagcagaggatcaccgaacagatcggcaaaatcaaccatctgcttgaacggtacccgttcggggcgcgaggcggtaggctgtcgatcgtcgtgcaggtgcacaggcccgatgcgaagttcaccacggcactcaccgggcaaatcggccgcatcaatgcgttcaaggcaaacgacgagcatgacgtggagaggtgccgaaagctgttcgccggccttgcgggactcatcgagatgctgcgcggcagcttcgacgaatatgcgggcaacggacgtggcaacgcgaacctcgacccacgcaaacgctcacggttcttcgggtcggtgacgaacccggatggcgtggtggaatcgatcaactccaccggcggcggctcgggcggctatttgcaggagctcacgtcgttcgcctacggcgcggcgctcatgtatctgctcgccaccgacaacgcaaccgaaccctcgtatgccaccgtcttcctcgacgaggcgctcatcaaagccgacggccagtacacgcgccgtgcattgagcgtgctgccgggactcggcttccaagtgatcgtttcggcaccggaatcgaagaccggcgagatcatgggttcggcttcgaaggtcattgtggcgcgcaaggaccaggccagcggcaggacgacgctgatgcagggagatctgctgggggacgctgatggcgatgagtcctcgatgggggagcggtccgagtga

SEQ ID NO: 41905 - DNA, 1221 bp, Bifidobacterium animalis subsp. lactis AD011
gtgacggatacggcgacgctcaagactccggcggatgtgcgcggcgatgtggcgcgcattgtacagcgcgagttgttcgccgccgagagtccatggccgcgcacgattcacattccgtggcccaaggagacgcagctcgtcgccgatgtggccggcgtgcatgcggcgaataatgcgttgaaggagttcgcggcacgattcggctgccaaaccgacttcatctcgcgcaaaatgggcacggccgtgtcgcttgtcgcgcatatccatgtgcctgacgaggccacggcgctcgccattgcggggcctacgctgcgacgccctcgcgaacgagtgttggccagagcggcgcagctcgagcaacgatgccatgtcgaccatgcgctcgccatggacgtggtacgcaggttgaacaacgaatccgacgtcgatttcgggttgttcgtcgaagccgcgcagtggttcggccggcattgggccgaagtgccggggctcaccgctcgtgagatccccttgcccgggttttcggcgaaatggctggcaggttcacgatcccgcaggcgggcggcgatctgtacagtgctcggtgtggatcggctgccgctgcgggaacgcccgggcgaggtgcggtaccggtacatggaccaacggttcgccgccgaacctgaccgtgtggcgacctcggtgcagtgcgttcccgaacgccccgtctcgctggccgtcattgtggagaacaaagacacctaccaagccatgggccccattgacggagccgtatgtgtgttcggctccggattcgccgtgaaccgggtacccgaactgttgccctggcttgccggtgatggggtgcgcgttgtgtattggggcgacatcgatgctgcgggattcgagattctcagtgggctgcgggcttcgggggtcgcttgtgagagcgtattgatggatcgcatgacctatgccgaatacgagcgtttcggcacgacgagggatgcggcgagccatgagattcgctgcggcgaaccgaagcatgggctgcatctcagtccggaggagtatgcgctgtaccgtgacctgtgcacgggcgaacttgccgtgccgcgcatcgagcaggaacgcattccgattgctgaattcatgcgcttgatcagcgcaggccggagcgatggaagtgacggtgcaagagccgaccaatgccatagccaatcgctgcgcacaccaaagtga

SEQ ID NO: 41906 - DNA, 1455 bp, Thauera sp. MZ1T
atgcccctcgacttcaccaccctcgacaccctgcgcagccaccaccccgcgtggcggctactgcgctcggaccacgcggcgctggtggcgagcttcctgcaccgcgtcttcgtcgcccccaacgtgcgcggcatggcggcggcggacctcgccgaggcgctcgaggacgagctctacgcgctgcgtctgctgcgcggcgacgacgccttccccaagccggcgctcgactacctcaacgactgggccgcggccgacaagggctggctgcgcaagtactacaggcccggcaccgacgaggcccagttcgacctcaccccggccacagagaaggcgctcgcctggctggcgcagctgagcgagcgccagttcgtcggcaccgagtcgcgcctgctcaccttgttcgccctgctcaagcagatgggcgagggcagcgagaccgaccccgcgcgccgcatcgccgagctgcagcgcaagcgcgacgagatcgacgccgagatggcgcgcgtgctcgccggcgacatcccgctgctcgacgacaccgcgctcaaggaccgcttccagcagttcatgcagggcgcacgcgagctgctcgccgacttccgcgaggtcgagcacaacttccgccagctcgaccgccgcgtgcgcgagcgcatcgcgctgtgggagggcagcaagggcgcgctgctcgaacagatcatgggcgaacgcgacgccatcgccgactccgaccaggggcgcagcttccgtgccttctgggacttcctgctgtcgagccggcgccaggaggaactcagcgacctgctcgaccaggtgctcgccctgcccgcggtggccgagctgaaccccgacgcccgcacccgccgcgtgcattacgactggctcgaggcgggcgagcacacccagcgcacggtggcgcagctgtcgcagcagctgcgccgcttcctcgacgaccaggcgtggctggaaaaccgccgcatcatggacctgctgcacggcatcgagagcaaggcgctcgccctgcgcgccgcgccgccgcccggccccgtgatggagatcgccctgcccggcgcggcgatcgagctggcgctggagcgcccgctgcacaccccgcccacccggccggcgatcgccgcgctgcgcgtcgaggccggcgacgaggatgtcgacccgcacgcgctcttcgagcaggtcacggtggacaaggcacgcctcgcccgccacatccgccacgccctgcaggaccgcgcccaggtcacgctcgccgcgctggtcgccgcgcagccgctggagcagggcctggccgagctgatcgcctacctgcagctcggcagcgacgccttcaccaccaccgtcgacgaggccacccccgagccgatcgaatggcaggcgagcgccgccgacggcgccatggtcacccgcaaggcccgcctgccgcgggtgatcttcatgcgctga

SEQ ID NO: 41907 - DNA, 684 bp, Thauera sp. MZ1T
atgaagcactcgatggacgacgaagacctcgcccccagcccggccgagccgcccggccccgccgccgcacccgacctctcggtgctgctcatcggcctgctcaagggcgtgctctaccgcgaagccgacgaacgccagtggtccggcctgctgcaactgcaggcgcgggtgcgcgaatacgtcgccgtgctcgccctcgagctggtgctcgacgaggccgagggctacgccttcctgcgcggccgccccgagcccgccgacgacgacccggcgccgcgcctgccgcgcctggtggcgcgccggccgctgtcctacccggtgagcctgctgctcgccctgctgcgcaagaagctcgccgagttcgacgccggcggcggcgacacccgcctggtgctggggcgcgacgacatcgtcgagctggtgcgcgtgttcctgcccgaaggccccaacgaggcacgcctgatcgaccagatcgagacccacatcaacaaggtcgtcgagctcggcttcctcgcccgcctcaagcccgccagcgccagcgccaccgcgcccgccagctttgaagtgcgccgcatcctcaaggccttcgtcgacgcgcagtggctcgccgacttcgacgcccgcctcgccgcctaccgcgccgccctcgccgatggcaaggagaccccgtccgatgagccctga

SEQ ID NO: 41908 - DNA, 3423 bp, Thauera sp. MZ1T
atgaacgacccgcaatccctcggcctcgacttcgtcgccgacgacaccctgtccggcttccgcctgcagcgcctggaggtgctcaactggggcaccttcgaccgccacgtgtggacgctgcagctcgacggccgcaacgggctgctcaccggcgacatcggctcgggcaagtccaccctggtcgacgcgatcaccaccctgctcgtccccgcgcagcgcatcgcctacaacaaggccgccggcgccgacacgcgcgagcgcagcctgcgctcctacgtgctcggccactacaagtccgagcgcaacgaggtcaccggcgccgcgcgcccgatcggcctgcgcgagcccggcagctactcggtgatcctcggcgtattccacaacgccggctacgaccagaccgtgagcctggcccaggtgttctggttcaaggaggcgcaaggccagccggcgcgcttctacctcggcgccgagcacgcgctgtcgatcacggacgatttctccggcttcggccccgacatcacgcagcttcgcaaacgcctgcgcggcgccggggccgaggtgctcgacagcttcccgccctacgcagcgtggttccgccgccgcttcggcatcgacaacgagcaggcgctcgagctcttccaccagaccgtgtcgatgaagtcggtcggcaacctcaccgacttcgtgcgcaaccacatgctcgagcccttcgaggtcggcccgcgcatccaggccctgatcgaccacttcgacgacctcgaccgcgcccaccaggcggtgctcaaggcgcagcgccaggtctccctgctgggcccgctggtcgacgactgccaccgccacgacgcgctcgccgccgacatcagcgcgctgcggcgctgccgcgaggcgctgcagccgcactttgccgcgcgcaagctggccctgctcgaccaccgcctcgaactcgccgccgaggagtgggcgcgcgccgacgcccaggtcatgcgcctcgacacgctgcgcgaggaacaggccggccgcatcgacgcgctcaagcaggcgatcaacgccaacggcggcgaccgcctcgagcgcctcgccgccgagatccgcaagcaggagcaggtgcgcgacgcgcgcctggccaaggcacgccgctacggcgagctcgccgcggtgctcggcgcgtccgcggccgccgacgccgaagccttcgccagccagcgcctgcacttcgccgccagccgagaggaggcgcgcaaccgcgacgccgaactgcagaacacgctcaccgagcacgccgtcaccctgcgccagggcaagctcgagtacgacgcgctgagcgccgagatcgacagcctcaaacgtcgccgcagcaacatcgacgaccgccagatccagatccgcgccgcgctgtgcggcgcgctcggcatcgacgtcgaggacatgcccttcgccggcgagctgctccaggtgcgcgaggacgagcgcgactgggagggcgccgccgagcgcctgctgcgcggcttcggcctcgccctgctggtgcccgacgcgcactacaaggcggtcgccgagtgggtggacggcaaccacctgcgcggccgcctggtgtacttccacgtccgcccgccgcgcgcgggcgagctgcccgcgctgcaccccgactcgctggtgcgcaagctcgcgatcaagcccgacagcccgcactacgactggctggaacgcgagctcgcccaccgcttcgacgtcgcctgctgcgccacgcaggagcagttccgccgcgagacgcgcgcgatcacccgcgccggccagatcaaggaccccagcggccgccacgagaaggacgaccgccacgccatcgccgaccgcagccgctacgtgctgggctggagcaacaccgccaaaatcgaggccctggaagcccagcgccgccagctcgaagcccgcctcggcgaagtgggcagccagatcggccgcatcgaggccgagcgccgcaccctcgccggccgcctcgacgccctcacccgcctggaagaattcaccgccttcgacgagctcgactggcacggtgtcgccggcgcgatcgccacgctggaggacgaacgccgcgcgctcgaagccgcctccgacctgctcaagacactcaaccagcagctcgccgacctgcagcggatccgtgtcgacaccgagcgcgagctcggcgccgcgcgcgaacgccgcgccaaggtcgagcagcgccaggccgacgccgaggcgctgcgcaccgccacgctcgccctcgtcgacgccgcgccgatcgacccggagctcgtcccccgattggaagccctgtgcgccgaggtgctcggcgagcacccgctcaccgtcgagtcctgcgacaaccgcgagcaggaggtgcgcaccgcgctgcagtcgcgcatcgacgccgaggatctccgcctcaagcgcctggccgagaagatcatcaaggcgatggcggccttcaagcagcagtttcccctcgagaccgccgagatcgacgccagcctggaggccggcttcgagtacgagaagctgctcgcgcagctcgaccgcgacgacctgccgcgcttcctcgcccgcttcaaggagctgctcaacgtcaacaccatcaacgagatcgccaacttcaacgcccagctcgcgcgcgagcgcgagaccatcaaggagcgcatcgcccacatcaacaagtcgctcggcgagatcgactacaaccccgggcgctacatcgtgcttgaatcgcaggcgagccccgacgccgagatccgcgacttccagcaggagctgcgcgcctgcaccgagggcgcgctgaccggggcgggcgagggcgacgacgagcagtattccgaggcgcgcttcctgcgcgtcaagggcatcatcgaccgcttccgcggccgcgagggcctctccgaccaggatcgccgctggaccgccaaggtcaccgacgtgcgcaactggttcctcttcgccgccagcgaacgctggcgcgaggacgacagcgagcacgagcactactcggactccggcggcaagtcgggcgggcagaaggagaagctcgcctacaccatcctcgccgccagcctcgcctaccagttcggcctggagtggggcgcggtgcgctcgcgctcgttccgcttcgtcgtcatcgacgaggccttcggccgcggctcggacgaatccgcgcagtacggcctgcgcctgttcgagcaactcaacctgcaactgctgatcgtcaccccgctgcagaagatccacatcatcgagcccttcgtcgccagcgtcggcttcgtgcacaacgagggcggcagcgcctcgaagctgaggaacctgtcgatcgaggagtaccgcgcgcagaaagccgagatgcgggcggcggcgcaggccgcgccccgcgccggcggcggcgcatccgcatcatga

SEQ ID NO: 41909 - DNA, 1326 bp, Thauera sp. MZ1T
atgagctggagcaccgcgcaggacctgagggcgcaggtgatgcgcctgtgggagcgcggcgagctgctgcgcgaggggctgccgcaggacagcggcgcccccccgtgcgcgtgcttgccggaggaggagagcgagggctctggcgctcagccttgcgagctaccggccgatgccgcggcgtacacggccgtgggaccacctgcaggccacagccgcttcccgctgcgactcaccctgaagaccccaacctcggacgacatcacccgccacttcgatgccgtgcgcgcctgggttgcggcgatctcggccacgccccatgtgcgcctcgaatggcaggagacccgccaccgcgtgcagggcagccagcgcctgcccgcgagcgcctgggtcgaccgcctcgacgacgccctggcctggatcggcaagcgcgccgaggacgcgcgctttcgtgcgctgcacgccgagactgccgcacgccagcccctgctgctgccctggctgcacaagcgcccgctgcgcgcgctcgaactcgccgccgagtggtcgcgcctgctcgacgtggtggcctggctgcaggcccacccgcgcccgggcatgtatctgcgccaggtcgacctgcccggcatccacaccaagttcatcgaatcccagcgcggcgtgctcgccgagctgctcgacctcgccctgcccgcggcggcgatcgacccgagccgcaccggcgcgcagcagttcgccgcccgctacggcttcctggacaagcccgtgctgctgcgcttgcgcatcctcgacccggcgctcggcctgctgcctggcgcgccctgccccgacctcgccctcgacgccgacagcttcgcccgcctgcgactcgacgtggcgcgcgtcttcatcaccgagaacgagaccaacttcctcgccttcccccgcgtcgacaaggccatcgtgatcttcggcgccggctacggctgggaggccctcgcgcgcgccgagtggctgcagcgctgcccgatccactactggggcgacatcgacaccaacggcttcgccatcctcgcccagctgcgcgcccgcttcgcccatgtcgagtccctgctgatggaccgcgccaccctgctcgcacatgaggcgctgtggggccgggaagacagcccgcgcccggccgacgtctcgcgcctcagcgccgaggaacgcggcctgtacgaagacctgcgcaaccaccacatccgcccgtccctgcgcctggagcaggaacacatcggcttcggctggctggagaaggcgctgagaatcgtccacgcggtggatgattttcagccatctgatggttga

SEQ ID NO: 41910 - DNA, 1464 bp, Thauera sp. MZ1T
atgacggcacttcgaacttcagccgccttactcgcgttacgcggcaagccgctatggcggctgcttgctgcagacaaagctcctttggtcatgggcttgctccagagccttttgctcgaccaggacaaaaccttatccagttcagtgttccacgagcgactggctcgcgagatggagctcttgcgtgaccatggacatgaactcccgcagaccgcacaagcctacgttgcagattggattggtgaggggtggctgacgaggcgttttccccccggcgcaagcgaagaagagttcgagctgaccgccgatgcagcggtcgcactgcggttcatcaacggcatcctccggccgcgcacctccgccactgaaagtcgtctggcaaacgtcatgcagcagttgtcccgcctcgcggaagagaccgacaccaatccgaaaacccgtatggcggcactgacggcggagcgggaacgcattgaccgggagatagcagcgctcgaacgcggtggtgtgaaaacgctgcccgatgagcgtgccctggagcgcgcccgcgaaatcatctcgctggccgaggagttggcgaacgatttccgaagcgtgcgtgatgctttcgacaagctcaatcggagtttgaggcagagcctcatggagagtgacggaagccgggggcaggtgctggaggccctattttcgggggtggacctcatcgccgagagtgagcatggcagaaccttttctgcgttttggcgtttgctcaccgatggcgagcagtcagccgtgttgctcgagtcgctcgacgaggtcatcgcacgcccgttcgcgcagcaacttgaattgcgcgagcgccgtttcctgcagaacctgaccgcgacgttgatgagcgaaggtggaggtgtgcacgacgttgtccagcagttcgcgcgcagcctcaagacctttgtccagagtcgcgaattccaggagcagcgccgactccatgggctgctgaaggaggcccagcaagcggcacttcaggcgcgtcctgctgtgcggccgagcgcccacattgactatttcttcaacctcaccagcagccgtatccgctcggtcagccagtgggaactgcatgacccgacattgagcgttgccgatgcgtcgatgcccgaggccgaggcctccgaacttggactcgatgtcgtcgaagacatggtgcgccagtccgaaatcgactttcgaacactacgagagcacctgcgcgtcatgctcacgtcgatgtcgcaggtgacgattgggcaagtgctcgaacactttccggcagaacaggggtttggcagcgtcgtgggttacgttgcgcttggggcaaagcacggcgagctgacggacaagctggagacggtcagctgggtcggcgccgatggcatcagccgcaaggggcgtgtgcccacaatctactttgtcagggagcgtgcccttgagctactcgactga

SEQ ID NO: 41911 - DNA, 711 bp, Thauera sp. MZ1T
atgggggttggtacggacggtttctgcccggaggctgaagcctccggcggcgacagcggggcggcatttccaggggacagcggacgtctcccgttggagacccgacgggtactcgtccagctgcttcttgggcctgcggtcgatgggcgacgccagacgaagctctggccggtgctggtgcgcgacgaggtggttgtgcgtgagcgcttgcacgagctgtttcttgagctcgtcatcgaccatgagcagaaggtcgcgttcacgcggcaggttacggccgacgatacagagatccctgtgttgctgcggcgagcaaacttgacctacctcgagtcggtcttggtgctctttctgcggcagagactcacccaagcagacactcagggtgagcgggcagtcgtctccttgccagagctgctggagcatctgagcgtctatgagaaggatgacaacgtcgaccatgcgcgctttgtgaaacagcgcatcgcggccattgagaaggcgaagaagctcagtttgctacagaagattcgcggggcggacgaccgcttcgaggtctccccgaccctgaagttgttgtttccggcagaagagatcatggcgctcacccgtacttacgcagccttggcgcagcggactgggacgtcggcagcggatgacgaggtggatgagggggccgaatccgataccgggggtgaaggcgatgaatag

SEQ ID NO: 41912 - DNA, 3375 bp, Thauera sp. MZ1T
atgaatagcgaaatgagcgcgacggccgacctttttggtgatgctggcgctgaggccagccagttccgacttgcgcggatacaaacctttaactggggcaccttcgacaagctttttacttttgacatctccgagaagggctacttgttcgtgggaccgtctgggtccggcaagtcgaccatcctcgatgcgcatgctgcgttgatgacgccgccgaagtgggtggacttcaacgttgcggctcgcgaagcggagcgccacggcagggaccgcaacatcatcacctacatccgcggggcttggtcccagcagacaggggattccggcgaatacgtgtcgcagtatctacggcccgataccacctggtcagcgatttcggagacctaccgcgacggcaggggccgagtggttgtcctcgcccaggtactgtgggtgagaggaaagagcaccgccacgcgtgacgccagaaagctctatgtggtcctgcagcgcgagtttgatgtgcgtgagctcgagttcttcccggcaagcgatttcgacacgcgcaggttcaagttcgacttgcccgatgcgttcgtacgtgatgagttcagcgcgtatcaggagcgtttccggtatttgctagggatcgagaacgagcgggccttgaggctgctgcataagacccagtcagcgaagaatctgggcgatctgaacaccttcttgcgggatttcatgctcgatgcgccggaaaccttcgagcttgccgaccgcctggtttcgcaattccaggagctcaacgaggcgcatcgtgccgtcgtcgatgcgcgacggcagattgagaccctgcagcccgccaaggatgaggccgagcgcctggaggcggcgcggctcgccaagaacgagctcgatgagctttccgcaggcatcgacccttaccgcgagcagaaacggaaaagcctgctcgaggaggctattcgcctcgccgaggcggagattgtcggacaggcggcggaagcggcgcgattgggtgagctggcgggccgcgagttcgaaaagctgcgcgacttgcaggacaagcgcgctggcgcgggcggtaacctcattgagcaactgacacgcgacatttccactgccgaaggccagaggagggagcgacttgccaagcgggagaaagcgcaggccgcatgcgcagccatgggctgggcttacccggaggacacgacctcgttcgccggtctggttgccgagtcgaagcagcaggtccatgcggcgcccgagtggcgtgagcagcaggcggacaagcagtacgcgctccgccaggctagggacaggaaagaaaacgacttcaaggagttgcgccgggaaatcgaggcgatggaacggcagcgctcgaacatccccgcgagaatgctcgacgtcagggagaggctggcaaaggcactcaacattccggaggaacgattgccgttcgcaggcgagctcatcgaggtgaaagccgaggaggcggattggcagggggcgattgagcgggtgctgggtggattcgcgcgctccctgttggtgtcggacaagcactattccgccgtgtcggcgtacatcaacgacacgcacctcggtgagcgtctggtttatctgaggatgacggagtttctccccgccggccgctcgctgtcttcgaactcgcttgtcaagaagctgaacttcgctgcggggccgtatcgagactggttgcttgaagaggtgaagacgcacttcgattatgagtgcgccgatagcgtccaggcatttcgaagtgccccccgcgcgctgacacgtgaggggcaggtcaaacacagcacgacccgccacgaaaagaatgaccgccgccccgtcggtgacaagagccaatgggtgcttgggttcgacaacgcgcgcaagctcaagctgtatcaggagcaggccttggcgcttgtcggtgaaatcgaagagatcaagaaggcgcttacggcattggtcgatgccggacggttgaacgaagagcggctcatgcattgccagacgttggctaacctcacgtgggcagaggttgatgtcggttcggttctcgaacgcatctcggacctgcagtcgcgactcgagacggagcgagaggcgcatccggacctcgcggtgcttgatgcccaagtcgtcgaacaggacaggctctacaagcatgctgtgaatgccgccaatgagacagagggcggtttgcgtgcgaaggagtctgtgcttgccagcttggaaaagcggctgagcggccttcaggaggcgcttctcagtgtcgctctgacgccctttcagctcactggactcgatgagcggttggcgcagattcccatcccgatggagttggagcgcgttgatgaaattgtggggcggttggaacggggcatcggggccgaacgaaccggcctgctcactcgcattggtgagcacgagaagaaagtcgaacgctgttttcagacgttcgtaacgacctggccggccgaggctggtgggctcgacccgagtattgagagtgcgcccgatttcttctccaagctcgcgcgtcttatcggtgacggtttgcccgagtacgaagagcgctttcttcggctcctgcatgaacagagcgaccagaatctcacccgtctttcagcccagttggaccaggagcgaaaggcgattcgcgaccgtatggacctcgtcaacgagagcctcaagactgcgccctacaacccagggacgcacttggtgatcgagaccacggaccgcatgctcgacgatgtgcggcaattcaagcagagcctcaaggagtcgttgagccactcgttcagcgctgacccattgatggcggagcggcgctttgaagtgctgaacgccttggtgaagcgcttttccagtcaggagacggtcgaccggaactggcgaggcctggtcttggatgtccgcctacacgtggaatttgtcgcccgggaactcgatgcgtcagggcttgaagtcgaggtctatcaaagtggtgccgggaagtcaggtgggcagcggcagaagctcgcggcgacctgtctcgctgcggcgttacgttaccagctcggtggccaagaccgagcgttgccgatgttctcgaccgtggtcctcgatgaggctttcgacaaggctgacgcggagttcacgtcgatggccatgaacatcttcaaaacctttggcttccagatgattgtcgcaacgccgatgaagtcggtcatgacgctggagcccttcattggcggtgcctgtttcgttcacatcaaggaccgcaagcactcggcggttgtgctcattgactatgacgagggtgcgcagcgcttgaagctcaattcggatacgcccgatgacgaagaagctgctgttacctga

SEQ ID NO: 41913 - DNA, 1197 bp, Thauera sp. MZ1T
atgacgaagaagctgctgttacctgaggatgtacgggcgcttcttcagcgtcgctacaccaatcagcagaaatcgtggctcatcggcgaagggcaatggcctctgtccgtggcgcttggtctgccgactgagaaggatgtgaccgccgaccccgcaggcgtcaggaggtgggtccaagcgtgggcagagtggtcttcaggtggctccgtttcctggatgtcccggcagtggggccgtctgggcacgcagcaacttcccgcaagcctggcgttcgcgacaccgcatgaggtggcggcagtcgtgggggatggttcgcgatgggagcaggttgagcttcgctatcagagcatcactgaccgttggcctcagctgtccggtcctgcggtggtcagcaaacttttcaacgtactggcggagtatgacgatgctgactttcgtcggctgttcgctttgctcgactggcttgaacgcaacccggcgtcagggcttatggtccgacagttacccgtggagggcctcgataccaagtggctggaaaaacggaaggggctcattgcggacttggtacgtcaactgcggtccgtcatccccgagggcgatttccatagcatctgcggtcttcgccggcagcccaatagagttcgtatccgcatactgtgcccgactctgcggcacagggtcggtggcctacgtgacctcgaagcgcctacggaagagctggccgccctgagtctggatcccagcaccgccctcattgtcgagaacctggaaacaggcttggcactacctgatttgcagggtgttgtggccttcatgaagctcggcaacgcggttagcacgctctctcagctgccttggatacgtgacgccaggggcctttactggggagatattgacacccatggcttcgcaatcctgaacgtcgcccgcggggtaatgccagccgttgagtcgctcctaatggacgagcacacgctgatggcttatcgcaggttgtgcgtggaggagccggcgcagacgagcttgctcgagctacccctcctgaccgcgtccgagcgctcggtcttcgaaggtctgattactggacgatggggtccccggctcaggttagagcaagagcgtatcccctgggattacgccctagggcgaatcaggacggcgacgacgtacccgatgggggcgatggagggcagctaa

SEQ ID NO: 41914 - DNA, 1443 bp, Desulfitobacterium hafniense DCB-2
atgaagctttttgagattctgccggaaagtttttttcagctttttacgggaaaaaacagacaagtttatgcggaagccctcttgctcctctatgagcaatatcaggtgaaccgctttggcgttgactatgaagtgatgcgggatcttctgcaagagctgatcgagacccaggaaagcctgggctattcctttgaagttgaagaaggggaggaagctccggaggcggacctcttccggacccaggtcaattccatcctgcgccgcctgaaagttctgggctggctggatgtggagacccgggacaattttaaacagtacatccttctgccccattactccagccgcatcctgcaggtcttcaaagagctttgtgaagaacggaccgtggaattccagcgttttgcttttgtcacctatcagctgctgaccagtgaagaagccaaacgacgtccggcctttgccatgatcgaggccgagaagaccaccgaacaatttaccggcgagttaaccctgctcgccaacaatatgaagttccacgccgaacaggtggcggccaagaccagcatccaggaagttctggatcatcattttgatgagtataaaaccaagattgtcgacaagagctaccaccgtctgaaaacttcagatcatgtctcccgctaccggcaccagatcctggagcgggtccggaccctgctcatcgatcaggaaatctttcaggaagcggtggaggacggaatccgcagcgagttctttgccacccgggaggaggccgagcataagctgcgccaggccctgttaagtgttgaagaagtctaccgggaactggatgaggtctttaaccgcattgacctgcggcacaatcagtatttgcgcgcctccttcgaccgggcccgctatctgagccagcactcccaaggggtggatcagcgtctggcggaaattttggattggctgtcggagcgaaggtcctcaagcaaggatattggagcaaaaatccttggcccggaggggctccgcttcctcaccctttcccagctgagcgaaccttctgtttttacaccgcgcaaaaaacgcctgcctcaccaagcggaagatatcgaggtcatccagctatccccggaactcaaagctcagctgcgggaagaatccctgagcaaaatgcgccggaacatcacccgggaaaaggtacgggactatgtcctggctcacctgggccagcgggaaaccatggggatcgccgaactggctccgcagaatctggaggaattcctctacctaacctatgtctatttatacggttacgacgggggagccggctacaccctggagcgggagtacaaccgcgtcctggagatcggcggctaccgcttccatgatcggcaaatccggcgcctgaccgccaaaaaggagggatctcaccgtgttcgagcaactcagtga

SEQ ID NO: 41915 - DNA, 609 bp, Desulfitobacterium hafniense DCB-2
gtgttcgagcaactcagtgaacaggatcgggaaaaactgcgggatctcatcaaccgtttgctcaacgttaattttctcgtcaaagaattggagagagagcattaccagaatgcccgcaagctccgcccttatctggacgagttttttaaattcctgaactgggatttccaattggatgaacgccatgaatgtatctatgtcttttccaaggaaggagctcaccggctgaggctttcccaggaagaaagcattgcccttttggttttgcgcctgatttatcaggagaagcggcagggggtgctgctcacggcctttcctctcaccaccaaatatgaaatccgggccaagtatgagaccttccgcttgccctttccggggaagacccgctttttagagacgattaaactctttactcaatataaactgcttcagtccctcgatgatgaggtgaacctggatgagtgccgtttccgtctctttcacaccctgctctatgctttagatgcggattccatcgagcggattcacgaacggatcagagcctacgatctggagatcgatgaagaggagttattgtatgaaatggatgaaacggcttcggctcgttaa

SEQ ID NO: 41916 - DNA, 3480 bp, Desulfitobacterium hafniense DCB-2
atgaaatggatgaaacggcttcggctcgttaattggcattattttcaggatgaatccctggaattcggcaggcaaaccctgatctccggacgcaacagcgccggcaaatccaccattatcgacgctttgcaggtgcttttcatcgccgatcagcggcaaatccgctttaatccggccgcccatgaagaggccaaacgctccctgctcaattatctgcgggggaaaataggcagtgatgaaaaatctttcgtccgggagcgggattttacctcctatattctgggggaattctacgatgacaaagcccgcaaatcctttgccatcggcgctgtgatggacgtgtacagcgataacaagatcgacgatgaatttttcatcattcccgatctggaactggctgagctggagattcaaaagggcaaaagaacctatcgcaataaagaagaattccaccgttatgctctgggcatcaggcccaagacccagtttttccggggcaggcaggagtatcagaaggccttcctcaaccgcatgggacagctggaacggcgtttttaccgcacctttttaagggccttatcctttaagccgattcaggatatccgggaatttgtgtatcagtatatcctggacgagcgggagctccagcttaacatcatgaaggagaatttcgaacttcatgaacgctatcaacgggagctgaaggatttagaggagcggaaaaccgtcctggaaaaaatctcccggcagcatgaacaagccatcaaataccgggatatcgctgccacccaggaatatgtgatccggggcttaaagcatttggagctcacagagaaaagggaagacctggagcaagacattgaatcctcccaaaatgagctcaagagtgttaaggaacgggcggctctcaccgaggagcagcaccgggaggcccgggaacgggccttggagtattaccgtcaatggtccacccaccagctccagaaggaaaaggaaagcttggaagcacagattgaggacatgcagaagacccttgccgatcaaaaacgccggttggagatttgggtcgccaaagtcaaaggggagatccggcttttggaaggtctggccaccgcttttgcggtagatggggaagtatggcggcaggaagaccggcgaaagctggaaaacgtcctgggtgcgctgcggactgccttggacttagccggccggcccaaccttgaatgggcccaggaagaccaggacgtattaggggaagaaatccggcaaagtggtctttttctggctgcattgcagatgggttttctgcagacccaaacccgcctggaagatagaatcagggaacaagaagcccagcaagagcgcttgaatcaggaaatccgcggactggagcagaagaagcgcccctaccgtgaagaggttctccggctcaaagccttgctggaagagcggctggcgggacgatcgccggtctggatcttctgtgaagagatggaagttctggacgaggccgaagcctggcgcaatgccattgaaggctatcttcacacccaaagattcgacctgctcgtcaaacctcaggctttctccgaagccctccgcatctatgagcaggaaaaatggatccatcgcctccagggggtgggtttggtggatacggaaaaagaagaacggtatctgggcaagcgggagtcaggctctttggccgcccttttgcagacagataatcccatcattcaggcccgcatcgatcatttgctgggccgggtcatgcaagcggctgacgagcaggatctccgccgtcatcacacagcggtaacccggacctgcatgtcctacaccaatctggtggcccgccagattcaaaaggaacgctatgagattccctatatcggctcccaggccatcgtccggcaattggaaatcaaacgccgggaactgaggaccgttcaggataacctcagacagctccaggcagagctcatcatcatgaaggaatgggtgagcagccttgctgacaggaaaaccctttatgaaggactggctcaagggctggagctgcccaagatggtggagcagcaggagtatgaactgctggaggtgcagatcaagctggaagagctggatctttctgaagtggagcgcttgaagcaggagtatgaggaatggcaccggcgggaaggtcagctggtggaagccatgaaggagctcagcgggaaaataaccggattggatcttgagatcggccgaaagcaaaccgacctctatctcttaacccgccgggagcaagaggcccaagagctgtgggacggctggaaagccgagtatgccccggaactctgggaaaaagccgcggagcgctggcaggaagcccaaagacaaacccagcctgcgtccacgaagctggtgaactgggaaggcagccaaaaagggaatgttacccgtaaacttcaggagtttggcagactccgcgacctgagacaggattataatatccgttatacctataatggcagtctggatggggaagacaacgcctcttaccaaagcctcctggatgaagtggcgggggtggatatcccggactatcaagtcaagctggcggaagctctcaagcagtcagaggaagaatttaagtctgatttcgtggccaaactccgggaagccattgagatggcccgtcacgaattcagtcagttgaacctggccctgaagaacttccccttccatcaggataagtaccattttgaagtccggcccagcagtcactataaacggttttacgatgtgatcatggatccggacatcgtgaaccggggctccttattcgattccttagctgatgataaagccgatactctccacgaactctttgaacgcctggtgcggggggaggccggagaccaggaggaatttaccgattaccgccgctatctggatttcgatatcgccgtcaccaccgagacggggcgttactatttctcgcaagtcctcaaggaaaaatccgggggagagacccaaacccccttttacatcgccgtgttagcctcgttttattatctttacaactccggaaaaaccctgcgcttagtggtgtttgacgaagccttcaataaaatggacgaagagcggattcagaccagcctccgcctgatcaagaaaatgggtcttcagctgattgccgcagtccccgatgagaaaatgcagcatatggctccggaagtctccaccaccctaattgtccaccgggacggtcaccactgctttatcgatatgatcagccgtgaggaaatgctggatagcctgaatggagatgaagagaatgctcaggattcccaggacgatggcgttgaggggaaaggggcagatacggagacggatgccgggcaggaggcagagtcaggcgtgagcgcagatccggcatggatgcagattcggatgcaggctcaaatgcagaatcagatacagagacaaacataa

SEQ ID NO: 41917 - DNA, 1254 bp, Desulfitobacterium hafniense DCB-2
atggaggacaaggaagtcagggaatacaaaaagaagattctcacccttttattgagaaaataccaaaacagcctcagcttccaaacgggaacccccggcaagcagcgtcctcaactgactatggccaagtctgaactggccgcggattatgaagacgagctggatttccgcaaacgggagtggatccatgccgccttgaaggaactcagccgggaagggatcatccaggtaacctggccgaagctgaaagagcatattcaagtccataaggtctatctcaattttgcaggggtagagcgggcttatcagctgctgggggaaacacccctggaagataaactccgccggctgaaggagagcctgtctcccctggctgctcatccctgggtctgggtgagaagctggcaaagggagacctgtgccaggctggaggaaagaaaatccgccggactggatgcagataatccccagggctatgatgatctggttaaggtccttaaggcacttccggaacttgaggacagcaccccaaagcgggtattcagccaaagcctttttcaggacagcaagtactttgaaaagaagctggaaggacggctgatcagcctcctgcgcaaaatctatcccgaggaactggatcaagacgaagactatctggaccaagtgggcatcgtcaataatccgaagctgaccctgcttgccggtcccttgatcatccacccggatcgggatctcagtcatttttccggcggtctgggtctgtcggcccagtcggtgaaggagctgatcattcaggatatcccggcccaaaccatcctcttgattgaaaatctgaccacttatcatgaagttctgcaggcaccgcccatcctcccggcaccggtgctggccatctatacaggaggatttccccacaagtccgcccaaaagctgctggagaaggtctccggctttttagagaaccgccgccagggccaagggctggagatcttccattggggcgatatagactatggcggcattcgcatatttgaatacctgcgcagaaatttctttcctaatttaaagccttatcggatggatggggtgacttatctggagtacgaaagtgcaggcctgccttttggagaggatcaggccaagaagctggcagccttattaagtgatcccggctatagtgattggcatgaggtgatcgggctgttgctcagctatcggaagcgggtcgagcaggagggtattcgggttggctaa

SEQ ID NO: 41918 - DNA, 1458 bp, Pseudarthrobacter chlorophenolicus A6
gtgccccgctccgccaggtcatccgctgacgccatcagcgcccggctccgggacctcgaactcctcaccaaaggacccgcctgggccctcacccgctcggcgccgtgggtcatcgcggtgctgcaggcatccttcacgcgcacccggccgcagcttccgctcgaggagttccatgccgacgtcgactccttccttgaggagctccgccggcaggaccccggcctgggaggcggcgcgaacggcaagtcgttcggcgacgagtggacgcggcggcagttcctgacccgccggaaccagtcgggccagatcgtgtacgaagtcaccgaaccggccgcccgcgtgctcgcctttctggacagcctgtccagtgaacggtccaccctgaacgggtcccggctgggcacgctgctcggtgacgtcgaaaagctcgccaatgagaccaacccggaccagagcgcccggcttgaggcccttgaggaggaaatcggcgagcggcagcagctgatcgaggacatcagcagcggcgagttcgacggtctgctcgatgacgaccaagccgtggaggccgcgggcaacatcctggacctggccgccagcctgcccgccgactacaagaagatgcgcgaccggatcgaagaactggtgggcggcctccgcaaccagatcatcgaggagtcattgaccaagggcgccaccatggcgcaggtgctggaagcagacaagcgcctccgccagagcccggagggcaggacgttccggtccttcaccgcgttcctggaggaccctcagcagcagcttcgcttccgctcggccatcggtgaagtcctcggccggcagttcgcggacgacctctcgccggaggaccgcgaaacactgaagaacctggtggcagaactccgccagcagcacagccagatccagcgcatctacggcaagctcagcgaaagcctcaacacctacgtccagagcgacgacttccgccagtcggtccggttgcggcaggtcctgcgcgaggccgagcacgccatccggtccctgccgtacgagcgcgaccggcccggcctggttcccggaccggtcctgtacaacgcgggtttcgaggcgctgtccatggtgaagctgttcgaccccgacgagttcgcggcgccgcccaaactggccgatcccatcgccttcagcgattcggaccgcgtgcgctcgccgaggaccggcaaagccaaaccggttgtggtccgcgcggccatggcaggcgccacgaccctgggcgacgcctgggggcagctgccgcccgaagagcagcacatcaacaccatccgggcgctcctgtcggaggccctgcacgccggggccgacttcaaccgcagcgatttcgagggcctggacttcgaacagatagacggctccacccgcagggcctacctgccggtggtcacgttcgcaaaggattcagatgactga

SEQ ID NO: 41919 - DNA, 849 bp, Pseudarthrobacter chlorophenolicus A6
atgactgaagagatcacgacgccggcagttgagcaggtggggagcgaaactctcgagacggtggttgagaccgtcgaaaccgcggacgatccgatgccggccagccacgtcaccgcagcagtctccccccgcgacaccttcgtggacggggccgcgttgttccccggcgacacgggcgtgctgaacatgaaggtccgccaggcactggtgaagctcctcaagggcccgtacattgacggcggccgggacgaaaagctgtggacagtcctcctggacaaccaggtgatcctgcgcagccggctttcggagctgttcctgagcatgcagctggaccatgagcggaagatcgccgtcctgcgccccgtggacccggacgtgatcggcggcagcgcccggtccagcatcctgcggcagcagcgtgcgctcagccgggtggaaaccatcgtgctgctccggctgcggctcctgctggaccggcacgtcaccgcccagacggaccccaccatcacccgcgaggaaatcacggacctggtggcgcactaccagccctccggccagcaggacgccctgcgagactcggacgtggtcacccgtgccatcaccaagctcctggcccgccagctcctgctgcccacgggccttgatgacgtgtacaccatctccaacgccctcccgctggccctcccgttcgagaacatcggcgacatcccggcccacatcgaagccctggtggccgcgtcaacggaccagtccggcacggaaccgctcctggacctcgacgcagatccggtggctgagcccgccgatggcgaggaccacgacaacgacgacacagaggccgccaagtga

SEQ ID NO: 41920 - DNA, 3462 bp, Pseudarthrobacter chlorophenolicus A6
gtgaccattccgagcatgctcccgctgggggaagagacgaaccccggacagatgcggctggcgctggtccaggtggtcaactggggcacgttccacggcgcgcacaccatgcgggtagaccgcaacggaaccctgctgaccggtaactccggcgtgggaaagtccaccctcttcgacgccatgctgcgcgttttcgatgccaggccgcggtccaacgaggcagccgcccagcggtccggcggtgctgtggaggacaagcgcactaccttcacgtacatgcgcggcaaggtgggcgacaaggccgtcggcgagggctcggccagtgccttccagcgccccggtgccacctggtccgccgtcgggctgacgttcgacaacgctgcgggcacccgggtgaccgtctcggcgctgttcgacctgccgaagaacggcacggaatcgagcgtgggccggttttacctgatcgacaatgttccgctggacctcgacgcgattgaaggcatcgcggacaagcggttcaccaagggtgcgctggaaacggtcttcccgcacgcccaggtgttcgatgtccacaaggccttcgccgagcggttccggcggctgctgggcatcagctcggaccaggcgcttccattgctgcgggtcatccaggccggcaagggcctgggcggcagcgtcaacacgttcttccgcgaccaggtgctggatgcccccgcaacactgaccgcggctgacgatgtggtggaagagttcagcaacctcatgtccatccgccagcgcctcgaagacgtccgccagcagcgcgaccagctggcgccggttccggggctgaaccgtgagtatgcccaggcgctccttgacgccaaccggctccgggagctggccggcggcgaattcgagtcgtacaggcagcgcctcgccgtcaccgtccagcagaagatcctggcccggttcaaggaactggcgcaggccaaagccagggaactcggcgccgagcgctcggtccgtgatggcctggccaagaacctgcggcagctggaaacggactacaacagccagggcggcaacgccatttccgccattgagcagtcgctggagaacgcccgggtggggctgcgcctccgccgccaggtggagcaggccgcacagcaggcgctgtccgacgccgggctggagcttgagtggacggcttccggctgggagcaagcgcacgagcaggcggccgcccggtccgcggagctgaaggatgattcgcaggcgctgcaggagttgcggttcgaggcgttcgacgcacacgccagccgcaagcgcgaacttgccgcggctgagcaggaactcgtgtcgctgaagacgcgcaaatccctgctgccgccgtcgagcattgaaaaccgtgccgccattgccgcggccaccggcatcccggaggacaggatgccgttcgccggtgagctgatggacctggccgagggggaggagcggtggcggccggcggccgagcgcgcgctccgcaacctggccaccacgctcctggtccctggcgaacactttcgtgccgtcacccgctacctcaatgaccacaacgtccggggtgcgctgcgggccgtggacgtctccaagcccctcgccggcggtgcgctggcagtggaggacgcgcacgacggcgacctgctcaccaagctggacatcctcgccagcggtgcggctgccgaggccggggaatgggtgcgggaacgcatcgccctcgacttcgcctacccctgcgtggaagacccggaccagctcgccgcgctggacaggggcctgagcctgggcggcgtggtcaagcggaaccgccacaccgtggaaaaggacgaccggttcaccagccgccaggactacgtgctgggattcgacaacgccgccaagctggaacttgtggccggccaggtggaggacctccggcaggaagttgccaaggccgccgagctggcccagagccgggaagattcccaccagggcatgagccggcagctcgaagcgctccgccggatcgctgaggacgacaggccctgggaccaggtctcggcagccgtcgcagccgatgagctggcgggcatcgagcagcggctcaaggatgcccttgccgcccaggcggacctggagccgctgcgcgccaccatcgaggaggtccggcagaagcaccagtccagcaccgaatctgcggccgtgctgcagagcgagtacaaggcgctcgacaggcaactgaccgctgccgattccctgctggaagccgcacgccaccgcctggccgaggcgccgccgtcggacgccaccgtcacggcgatggaaccgtacttcgccgacttcggcgacgtgacggagatgcacgagctggacaacctcgccaacagggtgcggaccgcactgcagggcgagctgcataccgccgaatcccggggacaggccaccgcggagcggctcacccgtattttcgaggggttcgtgcgggaatggggcagcgccatctccgccgaccacggcaccagcattggcgcggccagcgaattcgaagcccgctaccacgcgatcgtcaatgacggcctgccggcgcaggaagccgaattccggcagttcttcaaccagcgcacccatgaatccttcagcaccctgctgcacctcctggacgaggaacgccgctccatcaccagccggatcctgcccctgaacggcatcctgtcgcaggtgaacttccatgagggcagcttcctggaactggacatcaagcagaccctgccgcccacggccaagcagttcaaggacgccatccagaacgcgctgaaggcccggcatacccgccccgcgaaaacggagccgggtgcggaacgggacgacgacgccgagctcacggcacgctacaaatccctggaaacgctggtgaagcgcctgggctcacaggccccggaggaccggcgctggcgggccgaggtgctggatgtccgcgggcacctgttcatccagtgcaaggagcaccgcgaggtcaccgccccctcgggcaagggaaagaaggccggcaagaagaccgaggtgttcatgcacgcggacaccggttccatgtccggtggtgagcggcagcggtttacggcgttcatcatggcggccgccctcagttaccagctgggcatcgccgaacagggtttcaccacgtacggcaccgtcatgatggacgaagccttcgtactcgcttccgaggagttcgccggtgcaggcatcaaggcgctgcacgagttcggcttccagttgctgctggccgccccggagaacgtgatcgacctgtcccggcacctgggctccgtaaccgagatcctccgggaccggcgcaccaaccgttccggcgtgctgacggcgccggtcatccgtcccaggcagggcgaggagggggcctggcggtccgaggcgaatccggtggacatcgtgctgcgctga

SEQ ID NO: 41921 - DNA, 1413 bp, Methylobacterium extorquens AM1
atgctgttcactcatctcgccgacgacctcttccgaccgctcgcttcgccgagccgcgccttcaacgcggccctgctgctgcacctgcatgcccgcgtgttcggcgatgccgccgagcccctgcgcaagagcgagttgctggccgccatcggcgatttctccgccggctggagccaggccgagatcgccgacgacgaggcgacgccggtcgatccgatcgagcggcgctcggcggtgttccggcggctgatcgaggcgggctggctggtggagcggcgcgagcgctacgtgcccgtggtcgatttcgaccccgacgcgcggctgctgatcgaggaactggcccggatcgagcgcggcgagacccgctcctacggcggcgcggtgctcgaagtcctgagcgcgctggagagcgccatcgccagccccgccgaccgttcggaagccctgcgcaacgcggcgaaagcctcgcgcaccttcctcggccacctgcgcggcttggccggcgccatgcgcaagctcgaagagcgcatcctgcgcgagcccgatctcagtgcggccttccggctctacttcgaagagttcgtcgagcgccacctcgtctccgactaccggacgctgcacacccgcttcaatccgttccgcttccgctccggcatcgtgcgcgaggccgggcgcgccttgcgcgatccgctgacgctcagggcgctggccgacggcaacctgcgcgagggccgcgccgccgacatcaccgcggccgagcggatggtgcgcaccgatctcgtcgagatcctctcgatcttcgagggcctcgatccgcatctcgatgcggtggccgaggtggtcgctcggctggaacggcgcatctcggccgcgctccgctaccgcgatccgcgcgactctgcccggatcgagcgggcggcggcggcgctccgcgcggtcggcgcgggcgaggacgacctcgccggcctgcccttgccgcagatctcgctgttgcgcccgccgatcggcccgccgcagctcacgaatccgcgcatgccgcgccggatcatcgagtatgagccgctgccggagatcgacatcgatccggcgatcgaggcgttcatcgccgccaaggacgaattccgccgccgcatcaccgtgacgccggagcgcatcgtcgcctatctcgacgcccggctcgcccaggtgaaggccctgcgcggctcggacatccaggtcgatgacgtcgatgccttcgtcgtcttccagcgcctgcgcgagatcgacgtgctgttcgacggcgtcctgcgcagccgctaccgcgtcgcccggatcgagggccgcgtctccaacggctggctcgactgcccggacttcatgatcgagcgcataccgccccccgccgcccggcgcggagccggcaaagcaggctga

SEQ ID NO: 41922 - DNA, 636 bp, Methylobacterium extorquens AM1
atgctcgaacccttccgtgcgatcctcgacggcgaggagacgcccccgcccggcagcgccgcgccgagcgaggaggagctgacccgcgcgcttcaggtgatgctgaagagccagtgcatctacgccgcgaccaccggcatcggccgctcctacgaactcgcccggcactacgcgccgttcttccgcgactacttcgcctgcctcggctaccgcttcgaggtcgcccaccgcgaccagatggtgttcctcgccctgccgcccgacggcgtgcgccacgacgcgcagggcgagcgcctgcgcaaggatgagacgctggtgctgctggcgctccggctcgcctacgaggagggcctgcgcgaccaccgcgtctccaccgacggcacggtggaatgcaccaccgacgacatcgccgacgcgatccgctccgctgcccgcaccgagcccccggacgaggcgcgcctgatcgagatcctgcgcctgttcgcccgcaagggcgccctgcggctgggcgagcgcgaccgggccgagcgggtcacgccgctgatggtgatgccgggcatcaccgtgctctcgccggatgcctggatggatcaggtccgcgcctgggcctccgccggggagggaaggggcgtctga

SEQ ID NO: 41923 - DNA, 3480 bp, Methylobacterium extorquens AM1
gtgtaccgcctcaccgacattgcgatctcgaattggtacctcatccggcgcgagcagatccggattcggggcgcggcggcgctcgtcggtcccacgggggcgggcaagtcgacgatcttcgacgcggtcggcacggtgctggccggcaacaatgccagccggctcgcgctcaacgcctccgcctcgggccgcagtgcacgcacggtgcgcgactactgcctcggctggatcagcgacccggccgagggcgggcgcccgacgcgcgaggcctgcgagacgcttatcgcgctcgtgttcgagaaccccgcgagcggccgcatcgtcacggtcgggctggcgcttgccgcccgctccgaggagccgaaggaggagacgctttcgcgcttcatcgccatcggccaccgtttcgagatcgccgattacgtgcgcgagaccagcgagggcagcttcgtcgcgccctgggccgagatcgccgcggatcttcgccgccgggccgacacgttcgaggagtttcgcacctccggcgagcgcttcaccgccgccgtgctggcgaccctgcgcgagggggcggccgtgcccgatccgcgccagttcctacgcaccttctccaatgcggtggcgttcaagccgatcttcgacaccagcgccttcgtgcgcagcttcgtgctggaggccgagccgctcgatgtcgcccgcatccgccagtcgatcgagacgtggcggcgcctgctggagaccatcgaggagctggagaagcgcctcgcccacctctcgcgcatctgcgcgcgctacgagggctgggcgcgggcgagcctcaccgccgccctcgacgagatgcgtgccgccggtgcggacctgcgccgccgcatcctcgaccacgccgaggcccgccgcctgctcgccgagacatcggagcgcctgcgcatcgcccgcgaaagcgtggcgacgagccagggcttcgtgcgcgagatcgacaccgagatcgccgcgcgcaaggcgctcatcgtcggcagcgtggcggaggcgcggctcgcggcctcccatgccggtctcgccatggtcgcccgcgaccggcgcgacctgaccaaccgcctcgccgggatcgtcggcctcgtgcaggatgccggccgcctcagcgccatcgccggtcccttgcgccggatcgatcttcaggcggcgcgcatcgtcgaggcctgcgcccgctcggggctgcgccgcgaggcgccgccggaggacattctccgggtcgatgggccgctgaaaggtctgctcgaagggctcgcgcagatgccggacgtgtccggcatcctggaagaggaagcggaagacctcgccctcaaggcccgcgagcgcgagaacgaggttcgcggcctcgatgggcaggtgaatgccggccgttcctcggcggcacgcctgtcctccgacacggaggcgttccgcgaggagttgggccggctcggcatcgaggcggcgccgatctgcgaactcgccgagatcgtcgatccgaaatggggcccggccctcgaaggcctgctcggccgcgcccgcgaggccctggtggtcgagcccgaccggctggaccgcgccttcgccctgctcgagtcccgaaaaaaccagttcttccgctgtctcctggtaaagaccactgatacggcgcggcgcgccgcgcggcgcttcgatgacgggccgatgggcctgatcgagaccgacagcgaccacgccgaggccttcctcgccgcgcggctcggcggctacgatctcgcgcccgacgatgcggcgctccggaacatgagccgcgccgtggcgccgagcgggcgctcgacttcgggcatggcctattcggtcgtgcgccccgtgccgctgatgatgacccgcggccagcgcgggcccaccgccgagacccgccgccgcctcgacgaggcgcgcgaggaggcgcggaccctgcgggccgaggccacggtgatgcgcgaggccgcccggatcgccgcgctgctgcggagccgactggcggaagcgccgatcgatctcgaggctctgcgcgccgaggccgacgccatcgagggccgccgccgcagcctctccaccgagcaggagaccgtcgcccgcgccgatgccggcgtgatcgaggcggagctgaaggagcttcagaaggagcgctcggcctatctcaccgaactcgtgcaggtgctggagcccaaacgcgacgccgcactcgcggaggaggccggactgaaggcccgtgtcgcgcaagggagggaggcggcgcgcgccgcgttcctggcctaccgcacggcgctcaagcgctggacctccggcgacaccgtccgcatccgcctcaccggcaccgttcccgccgacgtaccggacacggtggccgggatcgccgcggcacgggcggaccgcgccgcgctcgacaccaaggcgctggcgtcgctggcctcgcaggcccgggcctccgcccgcgaggccgccgacagcgtgcgcaaccagggccgcgccgccgagcgggatcttgccgagtactgcgccgcgtggcgcgtcgagaacccgctcggttcgggcgagcagccggcctcgttcggctatgcctgggcgacccgcgagcgcgacgaggtggcggggcacgaactgcgccgctaccgcgaccagtcgctccgggcggaggccgagatgcgccgcctgatgaccgaggatctgctgacccggctcgccgacaagttcgagcggatgcgtgcccggctcgacgccctcaacgagcggctggcgtcgcagaccttcaccggccagacctatgccttcgaggcggaggtggaccgccgctacgccgccgtccacgcgctcgccaccgaagtcgcgcgttcgcccgacgcggcgcaggcggtgctgcctagccccgacaatggcgctgagggcggaccggataacagcccgctcgcggccgcactcgccgagatcacggcgctgatcgagggcgaggagaacgcggcgcggctggccgattaccgcaactacttcgtctacgagatcggcatgcgcgaccgggcgggcaaccgcaccaccctgtcgagccgggcgctgcgcgggtcgggcggcgaggcgcaggcgccgttctacgtcgcgatcgccgcctccatggcctcggcctattatcccggtgatcgccccggcgacgagacgccgggcctcggcctctgccttctcgatgaagccttctcgaaactcgacgtgcgcaacagccagtcgctggtcgatctcttccgcgcctggggcctgcagctcctcatcgccgcgcccgaggacaagcgcacgacgctgacggaagtgatggacaccgtcgtcactgtctacaaaagcccggatctcggctcggtgcgaatcgaggccgagcatccgctggaaaccgccaagcgggcgctggccgaaatcaacccggatcggcgcggaatcgacgcgttccgcctgcccagcgcggccgaataa

SEQ ID NO: 41924 - DNA, 1575 bp, Bifidobacterium animalis subsp. lactis Bl-04; identical to SEQ ID NO: 41902

SEQ ID NO: 41925 - DNA, 810 bp, Bifidobacterium animalis subsp. lactis Bl-04
atggcgatggacgacagcaccgggcagggaattgccggcgatgccaatctgggcatggtctcgaaggtgctcagtgccgagtatgaggaaggtgtggccgacgaggccggcatggccgatctggccaatgtgcacgcactgttcgatggtgacatcggcgacatgcccgcacccgcccgtgaggctgcgattgcgctgaaacgcaacaggtcgatcagcggcgacatgtaccaccaggcactcgactatatggaacacgtgcggcgttcgctcaacaacgacatgctcgtgccggtcatcgacacctactatgaggtgatgtatgcggagccgatcaccgccgatgaatacggcatacgatcgctcaagacccgtgccagcctgagtgcccgtgaggcggtgatgctggccgcgctgcggcgcaaggtgctcgactacgagaatgtgggcgccgcggccgccgattggctcatttcgaaggaggagatcgtcaacacgatgtccaccggcgcgggcccgcttgccggccgcaattcggaggaggcggtgcaggcgcaggtggaccgcctgatcggcagtgcgaagaacaacggcttcctggcgcctgtcgaagatgacgaaggcatgtatgtgatcaccaaactcgtgcccgtggtgctcaatccggagcgcatcgccgcatggctcggcgcggacgacgcatcgaccgcacagcccgaaccggatggaacaggtgacgattccgacggctccgggcataccggccaagacgaacaccccgaagatgacgatatggaggcgctgttttga

SEQ ID NO: 41926 - DNA, 3498 bp, Bifidobacterium animalis subsp. lactis Bl-04; identical to SEQ ID NO: 41904

SEQ ID NO: 41927 - DNA, 1221 bp, Bifidobacterium animalis subsp. lactis Bl-04; identical to SEQ ID NO: 41905

SEQ ID NO: 41928 - DNA, 1473 bp, Corynebacterium aurimucosum ATCC 700975
atgtctgttgaagcacgcgccctctccctccggcgcctgatgcgcgattccgccgcaatccggctcctggctgcggacaacgcgcccgtgattctggcgttgattgcggagtacttcccgcgcggcacccgggcgcgcccagcagcagaggtatacgagctcatggtcaccgatttcgaggttttggccagcgagttttccatgccccgcacgccacagaactactgcaatgactgggtcaaagccggctggttaatcagaaagtccggcaagagctcccacggtgaaacgctcgagcccagtgaagatgcgctctcggcactcgaagccattgagcgctgggaagcaccggtgaccgcggtgacggcctcacgggtggaatcgatcagctcggcgctgcaaaggctggcgcgggataccaacgaggacatcgctagccgcgtggccagcttggaagcagaacgtgaccgcattgaccgcgagattgagaaggcacacctcgggcagtttgaaagcctcaccgccgcagagacggaagagcgtgtccaagacgtactgaacatggccatggccgtgccgagtgatttcgcccgggttcgccatgagctcgaggccctcaaccaccagctgcgccgacagctcttagatccggagggctaccgcggcgaggtgctggaggaaatcttcaacggcgtggaccacattgcagaatcggaggccggacgcagcttccgcggcttctactccctcctgatggatagggagcgcaacgcctggttggaccaatggatcaaggaagttctggaaagcgaacccgggcagcagctcgccccggacaggaggcagcggctgcgcagcctcttccgcgacatggaggaaaccagcttcgaggtcaaccagaccatgaccgggctggcgcgcagtttgcgcaactacgtctcctccgagcaattcgcggaggaccggcgcatgattgagctgctgcgagaggcccgcggtatggccattgatgccgcgcagaactccgagctgaaggcctttcaccggatggacacaccgctgcagcgcatcggcatgtcgattcattcggtctcccgcatccgcctggccaaccccgggcgggaagtcgtggaggagacaccagtggcctaccaccccggcacggaagacccgcaggcgctttatgagctcgtgcgcgaatcagaaatcgactttgaggaattgcacgaggcggtacgcatggccgtcgccaagtccggcccctgcactattggccaggtgctgcaggcccatcccccgacgcaaggtttggccagtgtcgtgggtttggtgcacatagcggattcccacccgctgccctcgctgaaagaaggacacgagacagtcacgtggactgaggaagacggtaccgtgcgttgcgcccagatccccaccatgtatttcgatcacaccaccgttaaggagctacagtga

SEQ ID NO: 41929 - DNA, 681 bp, Corynebacterium aurimucosum ATCC 700975
gtgaccgccgccaacaatccccgcgtcgacgccgcgcacgagccgccgctgtgggaacacgataaaggaacgctgacctaccattcgcggcgcgcgctggtgcagctgttgcagggcccgcttattcgcgcgcaaaaggagccagtgttgtgggccgcgattatctccgacgaagagaatctacgcgcccggttgcacgaggtgttcctggagctcgtcgtggatgagaccgaaggcttcgcattcacccgcatggtggaggaagacagcttgagcatcccgcaggtgctgcgcacggacaagcttaagcacatcgataccgccatcttgttgaacctgcgccaggagctgggcctcaccctgcccggcgagcgcgtcatcgtggacgtggaggatctccgggagagcatcggctatgtccgtgcggtggataaccgcgacgaggccggcttcaccaagcgcttcaacgcggcaatgaaacgcatacagaatgactattccctcatcagcgccaccgagaccgagggccgctttgaggtttccccggtgctgcgccagcttttcgacgcctccacggtctccgccattcgggatgaatacgcccgcctggcgcaggcggaagaccaggatgagcaggaaccagagcagatgcaattgcaggaggatgcctccgatgactaa

SEQ ID NO: 41930 - DNA, 3393 bp, Corynebacterium aurimucosum ATCC 700975
atgactaagaacaccacctactaccccggacaattccgcatcagccgtatccagctgattaactggggtactttccacggctacttctccatccccgtagcccgcaagggtttcctcattacaggcggctcgggttccggcaagtccacgttgctcgatgccatgtctgcagtgctagttccgcaaagtcacgtgaaattcaacgcggcgtcacaacaggacctcgggcggcacaacgggcgcaaccttgtctcctatgtgcgcggcgcgtggcggcagcgggagaacacgcagaccggtgagatcgcccccgagtacttgcgggagggcgccaccaactcggtcgtggcgctgacctacgataacggcgcgggcaagcagcacaccctcatcgctatcttccgcctcaacggcggtgagaactcagtaggccagatcaagaagttgtatgggctggtgccgggcgacgaggacatcgacaagctcagccctttgcttacccgcagcctggacacccgcaagattaaggcaatgtacaaaggccccggcgcgtccttcacgccgacctacaccacgtttgcagaccgcttccgcaaacgcttaggcatcaagaatgtggagggccaactgcttctccaccgcacgcaatccgcgaagtccctctccagcctggaccagctctttagggactacatgctggacggtccggctacctttgagaaagcggatgaggccgtcgagcaatttgaggatctgcgccaagcctatctgcgggtcgaagacgtcaaggcccagattgatacgctcgctcccctgccccagctgcattcccagcgcacaggcgcggaggcggacaaagcacaagcggaggccatggctgaggcgctgccagctgtacgcgcccgcttggtggcagaagaactggacgttcgcattagggccctgtcagcgcagttggctgaagcccagtctcaggccgcatcccttgaggccgatgttgctcacctcgatgacgcagagcgcctcgccgcagtggccgtctcccagctcagctcgggtgagctcgatgccctaagggccaagatagaaaccgccgaaaaggagattgagcaccgcacgaaggagttccagcgcctcagtgcagcggcaggccagtggactgatcactacgagctcagcccgcatggcttcgcccaactacaggccaacgcgaagatccgcatcgcggacttcgaggccgatttcgaagacctcatcaaccaacaacaggaggccggcgtggccgcccgcgacgccgccaccgcctgctccacgctggacagcgagctgcgctccttcagctcgcggagaaccaacatcgataagtccttggtggagctgcgctcgcaactggcccgcgataccggctatgccgagtccgagctccccttcgccggagagctcatcgatatcagcccgcaccagagcgaatgggagccagtaatccagaagctactgcacaatttcgccgccaccctgctcgtgcccgaagccgcgcgggaggccatcaaccagtgggtcaattcccgcaacgtgggcacgcgcttggaataccgcaccatcccggagtttgccccagcgccggcagcggcacgcagccctcggcagctcatccacaaactcgagtttcaagaccacgccatggcgagctgggtacgccaccacatttcgcgccgcttcaactacgaatgcgtggactcggtagcggaattggagaaggtcaccaaggccccggccattacccgcgatggcctggaaagccgccccaaggacaaggacggctcaacgcgcttcatcaaggatgaccgcacgcgctttaacggcaccgcctggtaccgggtgggttccaccaacaccgccaagattgaactgctgcgctcccatctcaccgaagccaaggccaccgcccgcgctacggccaagcaggtccaggaccttaaccggaagatggacatcctgcgctcccagcgcgataaagcccagcaggtgctggatacctcattccaggacatcgacaccgcctccgccgaggcccgcaggcgtgatctacaagagcagtttgactcactggcttcctctccggaagcccaggcgctggctgccgcgcatacacaggccaagcagaagctcaacgccgcccgtacaaaactcaacgaagcgcagaagcaccttggcaacgtcgagggcgagctcgagcgctccactactcgccgccgcggcatcggccccgtgccggagatcgcggacaaggaaattgagacggctgtcgttgaggccctgcacaagggcaaacgcagtctcacaatcgatgacatcgatgcccgccgcgatgaagtccaggccagtttgcaacagacctcccgcacggcagcgcgccgcatcgaggaggccaacgacaagattgtctccgtcctgcacgcctacctatcccagtggccggcggaggccgccgacttggagccgcaggccagcttcgccggcgagggcattgagaagctcaagttcctccgggcagaccgcctggctgatttccgcgcccgcttcctcgagctgctcaacggccagacggtgcgcaacctctcccacctggctacggatctgcgccgcgcccgcagcgatattgagatgcgcatggagtacatcaacaaatccctggagcgctcgcccttcaatggtgagcgcaccctgcgcatcgacgtcaaggacgcccgcggccaggtggtccaagaattccagcgggatcttgatgccgccacctcccacagcttgggcgaaatcggctccgatgattcagaggccgcccttgcgcgctaccacgcgttggacaagatcttgagccgcttgggctcgagccagccagaggatctccgctggcgcaacgtggtgctcgatacccgccggcacgtgagctttatcggccgtgagttgtaccccgacggaacgacagccaatacctatcaggattccgcctcgctgtctggcggccaagcacaaaagctcgtcttcttctgcttggctgcggccctgcgcttccggctggcggagccggaccaagacgtgcccacctatggttccatcattctggatgaggcctttgaccgcgccgatcccacttttacccgcacggccatgtccgtctttacgtcttttggtttccacatgattctggccacgcctttcaagctcatccagactctctcgccctacgtggacggcaccatcgttgtcaactacgacgagcccaccatcgacggccgcccgcaggcacgctcgggctacaagcttatcgacgcctccaccacccacgacccccaacaacccgaccccaaggactccgacgatgcggactcctaa

SEQ ID NO: 41931 - DNA, 1137 bp, Corynebacterium aurimucosum ATCC 700975
atgcggactcctaaagacctgcaggcgcatgccgccaagtacctgcgcaaccacttcgccgaagcactcgccgagcccgctgcgctcaaccttgactggccgctgcacccgccaacagctacgtccgccgcccacgatatcacagccacgaaggacttcatccgcgcctggcagcgctggccgcaccaggaagaggtcatctatgaatcccgcaactggtcgcgcgcgggccttggcaccaacgacgttcccacacgcgcaatactcaccggcgccgcgcgcatcgcggccgccgcgggcctgatgcctgactacaaccgggccctccagcgcgcccaggacatcgccgccatcttcccggacaccccggagttcgcacataccgtccaccgctcctacaaccaatggaaggatttaagcgcctacgatctacgctgccttggaccgtgtttgacctggctgcgcgccaacccccactccggtgagtgggagcgcgccgtgccggtcgaaggcgtggacggcaagtggattggtaaccaccgccgcctgctgttgacactccttgcccccttcggcatcacggacttgggcctgcgccgcagtgatgcccgcctgcgcctgcgctacctcaaccacgccccagcactctccgagatcgaaatccctctcgccgacgccgtcaagctattccccgacgcaccaccccgggtactcatcgtggagaacaaacaaaccttcctggccctgcccacgcttgccgacgcctccccaaccaccatcgccctcctcggctccggcaccgccgcccaccaactccaggcactggactggctccaccgcaccgacatcacctactggggcgatcttgacgccgccggctttgccatcctcaacgccgtgcgcgcccacttcccccacaccacatcactgctcatggaccccgccaccgtcaccgcattccagcacctcgccgtccccgaccccggcgacggctccgccacgcttacccacctcaccaccgaagagcagcgtgcctatcgccttctcttcactgcgggccggctgcgcattgagcaggagcggattccgtttgctcatgtgaatgcggtgattcatgcaacgctcgcagcagcgtga

SEQ ID NO: 41932 - DNA, 1575 bp, Bifidobacterium animalis subsp. lactis DSM 10140; identical to SEQ ID NO: 41902

SEQ ID NO: 41933 - DNA, 810 bp, Bifidobacterium animalis subsp. lactis DSM 10140; identical to SEQ ID NO: 41925

SEQ ID NO: 41934 - DNA, 3498 bp, Bifidobacterium animalis subsp. lactis DSM 10140; identical to SEQ ID NO: 41904

SEQ ID NO: 41935 - DNA, 1221 bp, Bifidobacterium animalis subsp. lactis DSM 10140; identical to SEQ ID NO: 41905

SEQ ID NO: 41936 - DNA, 1431 bp, Teredinibacter turnerae T7901
atgttcttctcttccgagcgccaacatttcttcaagcctttaaacagtaagtaccgcgaacaggtggtgcaatgcctgtgcttgctttaccagcgcctgtatagttccaacgcggactatggcagcgctctaggccgcgagcaggttctcgagatactggaagaagccctggcgcgcgcgccggtgctcgacgcccaggataatgaagacgaaacgcgcttcaagaatacgcgcgaacaagccaactggaccttgaagcagttactcgactgcggctggctggaaaaacaagtggacaccgcgaccatgcagtccaccttcccgttcagtcgaatggggcgattatttacccaacctctggtggaatcggataccacccagatccgcacacgccaccgcaacacccgcaatacactcaattcgctcgaggccttcttaacccggggcgaagtgtatgacctgctcgacgcattcgaatactcggagcgcatcgtcaccgatttcaccgatatcatttcagagttggaagaacgcaaacggcaactcgtgcaggaagtggaatcgcagcaattggttcaacaggcaaccgaccagtttttcgaatttatggaaaagcgctttcaaccggatgtttcggtgcgactgtccgccgatagcgttgaaaaacaccgcgaccaaattcacaaagcgatcggcaaaattcgtcgcaagtcgtccgacagcaaacgccacatggaattacagctgcggcggctggtgccggaaattgcgcgcaacaatcactccgcgctctggtttattctcgataccattgaacgccggatgagtaatgcagcggaaattatgctgccagcattgcgccgcgcactgcacagttttaccaaacgtgccgacattattatccgccaactgagctacctgaatagtcagccgaataatgatttactacaggtctgccagcagttacagaagctgagccccgcacaatgggacgagcgaatgtcccgcgccagtgaacaactgtcaggggtgaaattgcagcttatcgaccccgcgcaaatcaaactgctggaaagacgcaaaacaccgccgctcaacaccgcagttaacgaagaagaaacgccggaccaggatgtactgcgcgaatcccacatacaacaaatgctggaccaggcctttaccattaataatcagcaggtgcgggaatatctggtctcggcactgcgtgccgggcgcgcaatatccacggctgccctgccggttagctccgcgcaggaccttctggccgtcgcccagatcgtggaagtggccgccatcaataacctgagcagcgactatgcgtttcgcgttgagcccactgggcgtagcacacattccgagttttatgctgagcaggacgaatttattatcgaactggacaatcaacagtag

SEQ ID NO: 41937 - DNA, 702 bp, Teredinibacter turnerae T7901
atgctcgatacatttatatctgaacaattacaaacctgtggtttgcgcaaggaagagttttccgaactgctgatacgcctgctcgactacggtgttatctgccgcgaagaaagccagattgaggcaacactttacgaccgctatctgcagtgcactgatttggtcgaagcgtatttggcgcttgttggaattcgtattctgcacgaccggcaatttaattttgtgcggctgtttccgcccggcgcagaaattcccggcatgagtgacgatgataactcgccctttaacagcggctttagggtgcggccaaaccagcaggaaatcgcggtcattctcgccttgcgggcggaatacgaaaaagccctgcgcgaaggccaggtcgatgaacgcggccaggtattgattccgctggaaagcctcgccatcgcaatgaacaatttgctaaagcgacatttgcccgaaacccaggtagaccgcaaacggctttttacccgcttgcgccaactgcgcttaattcaattcaaccaggaagatgacttcgaaagcaatgagatatggttgagcattcagccatctatcaccagctttgtgaccgaagccgtattaaacaccctcggcgagcccctacctgaaagcgaagaaccagcaacaagcgaagcagaaccggaaagtaccatgttcaacgatgaggccccgcaataa

SEQ ID NO: 41938 - DNA, 3627 bp, Teredinibacter turnerae T7901
atgtttttgaaaaaaggcatccttatcaattggggcaatattcctcacctggaattcagctacgggccaatcaatttattttccggcggtaatggatcgggaaaaaccaccgctgcagatgcgattcaaaccttaatgaccgcagcgcacgaaaacctgtttaacttcaatcccggtcaggatgaaaccacccagcgcggtcgcggtggcaaacaggttcgtacccttgcctcttacgtcttgggttgtgacgatggcagctatgcgcggccgcaagcagcggatggctatattgcaggcgtttttcaccccactgcaggcgaacagggcgatgtgttcaccgccgtgatgtgcatgcgcgcacacgtcgatgccgcgggcgcgcagaagcaggcgcgcctggatgatctggtatttctaatcttgcccggcgagcagctgacactctcgcattttgtgcgcagctatccagacggcaaacacattgtacccattaccgaaattgccaatctgttgcgccaggaattcggtagtaaatcggtcgaaatatacgataaaaaaggtgcctacctgcgccgcctttacggtgccttgcgcggccgcaaagaagcggtttccgatcgcgaagccaagcatgcggcgcgtaccttctccaattttatggcgtacaaacccgttaaaagcattaatgagtttgtcgcccgcgaagtactcgagcctaaagatttaggcgatgccatccgcagcgtttccgagttgatgaaaacgattcatcaaatggaaagtgacacccgcgcactgctcaactccatcgacaccttggagcaggcccaaacctcaaccagtcagtacatcgagacctggatcgagcgcagcgtcacggactacaccgaagctgcacgcaagatggcgataaaccagcaggcctacatcacagccaaaaaccagcaggccgaaacccgcgaggccatcgccgaaaacgaagaagccgcgaacctgtgcgagcagcgcaagcgccagacccacgaagaagtcattgcgctggaagcccatcgccagggtataggcgcgttaaaagataaagatcagctcgaacaaaaaattgtcgatgccaaccgcaccctgctggaaaaaacccgcccgctattggaacaacaccagcaattggaaaaaaacctgcaggcgggccaggtgttggccagacggttaacggaaatgtcactcggcgtcgagattcccgcgctggaacgcaaagcgttccgcagcctgcttaagtccgtcgccagcaatacggcatttagtgagtttgaactgacgcgcttgctgggtaacgactggattgatatttcaccgctggaacattacctggaacaagtggtttcagcggaggcggatcatcgccgccttgccgagcaacttcaccagcctggcgacagtatccgcgacgccgtcgcggtgattgcatccagccacaagcgccgctacgaagacctgcagcaaaaagcccgcgcgaagcacaaagaaatccagcgcctggaagcgagcaaagtcagctatcccgcgtatgtggaaaccgcgctggccgccataagcaagcagttccctgcggccaacccacgtgtactctgtgattttatcgaagtgctggacgcacgttggcaaatggcaattgaaggctacctgggcggcgcgcgcttctcgataattgtcgagcaggatttcgaagccgatgcgattcgtgttgtgcgcgcactgagcgacagcaagcgcaatcgtgcgcgcgttatccaagggtacaaagcccacaaggacgcggagcgattgagcctcgccaacgactccatcgtcagtgtgatgtcgttcagccataaaaccgccgaagactatttgcgcgcgtcttacggcaacgtgctctgtgtggaagataccgaaaccctgcgcactaccgcgcgcgggttaacgccggatggtctcgccagcggcaactacagcatgtggcgctgcgacctggatgacagcgaactggtctttggccaaggcgctcgcgagcgggctctgaaagccaagttgcgcgaagctgaggcgctcgccagcaacagcaccgcgctggaaaaagagcagcaactgctcgccgacgtttttaaccacatcgacgccattcgtcctgccagttgcggcaaggtcgtgcgtgaaattctcgaccttcaccgccagatcgagtccgcccaaagtcagctcgacaacctcgacctcagcgacttcaaacatctggaagaacagctgcacacactcaaagcggagtaccgcgaacaggaatcgcaacagcgggatttaaacaagcaagcgggacgcctgcacgaacgggaacagcaaaccgcgcgcaaagcgaaagatctggcagacgcgctggagctgttccaggaagcgcgcgaagccgccgaggtagcgattgagcgtatcgccgactggcacccggattttgacgcggacaccgcactggcgcaggcagatcaggctgccgcgcaggcgagtggcgatttcagctataccgatatcctggcgaccttaaacgcccgcctggaagagacggagcggaaaatctaccagaccgtcctgagtcacaatcagcagtgcaacccgcacgacgccattgtgtacgataccggttatggcgagcgccacgacgacacgttttttcagcgcctggtgaagttgcgcagcgaaattgggttgatccacaaccgcttgaaaaacaatgtgcttatcgacaagcacgacaaaatcgccaacctcaaagacaccttcaacacggcgtttgtcaccaacctgtgccattcgatttatcaggccatcagcgacggtaaacgcctgctcgacgacctcaaccaggagcttgaacaccaccgcttcggcgcggatcgcgagcgcttctactttggctgggaatgggtgccggaataccgggaatactggcgcttctttaaagaagttatcgacttgcccaacctgggcgacggcgccagcctgttcgatgcagagctgtcggaaaaagcctgcgccgtgcgcgacaaaatgctcactatgctgctggacccggacgaacaggtcgctctgcgcgaactcaaccgcatcagcgactaccgcaattatcgccagtacgaaatttacaaggaacccgagggcaaggcccccatcgcgttgagccaatacggcaccggctccggcgggcagcttgaaacccccgcttatattattcgtgccgccgcggtgacgtcggcgtttcgctttggcgagggacacacccatctgcggatggtgctggtggatgaggcattctcgaaaatggacgaaaaccgttcgcgagaagtcatcaattacctcacggaaagtctcggcttgcagctactctttattatgccgaccagtaaatccggcccgtttatggatttaatcagcaaccagtttgtgttcagcaaatgtccgtctgccacacccataggtgaactcaatactcgcgtcctggtcgataggaagacatgtaatcaagaaaaaataatggaactctgggcgaaccatcgacgtttggtacgccatcagggtatgctcgattttatggaagggctgtag

SEQ ID NO: 41939 - DNA, 1158 bp, Teredinibacter turnerae T7901
atgaatgcagaagaaaaagggtttcgctcacgcccgcgctgggtggacgaagaacccatggtcgcaggtttgttggatacatttctccacaagcttgagcacgggcaccgcttgaccatgcgcgttaactccaaaactatgccggagctgttcgatttcaacaacgaagaaaccaagtacctctggtcgctggtgaaatcactcaacaacgaataccacattctgtcgattcgctatggccgcaccaaacccttccaggaggcctacgacaatgcgcaactgctgttcaacgacgaaaaagaagagttggtgcgggactggttaaaccgcccggcactggacccctactccctggtttggcacgaagccctgcgcaagatggccgacaaatttgaagatcacgggcaaacattcagcgaacagattgtgcgcctgcccgataggggcgcagaacagaccttgcgagcgttcgcccgcattggcggcgaattgcaaaagccgataaccctgcgcgcactttctgcccgctgcttttggggcgattccaagtttttggatcaccgcgaagaattggtccgcaccctgtacccaaattccagtcacaacctgcaaacgcgccccgtgttaatgactgtggatctggccagtcatttccggcgggtattgtttgtcgaaaatcaggatacttttctcgcgttatcaaagatggcactgcccgaggtgagcctggtgtacagcggcggctttcgcggtgcttccgcccgcatacgcacgtccggcaatgtggcattcagctacctgggcatcactgacgaagacacccgcaacgcttttgagcgctggtggcttggcctggacgacgacaaagtggcaaaggtctatttctggggggatctggatttcaccggcatggccatactcaaggccctgcgggtgtgcttccccaaaatagcggcctggaaaaccggctactatccactgctgaaaaggcttgaacaggggctgggccacgaccaggaaaccagcggcaaagaacggcaaaaagacccggaactcaccggctgcgagatcgccgatttagagctgctccctgccatgcgaacagccggcgagtttgttgatcaagaagcggtgttgatgcgggaactggaaatttaa

SEQ ID NO: 41940 - DNA, 1464 bp, Micrococcus luteus NCTC 2665
atgtcctctctcgcccaggcgctccgggtccaccgcctcgtgcaggacgacgtcgccctgcgcatgctgcgcatggactccctgcccctcgtggccggcgtcctcgccacccatctgggcgccccgaacgcgagcctgcccacgcacgagctgcatgacgccctcgacgccgagctcgacaccctgcgggaccacctggacctctcggggcggacagccaaggcgtactgcgaggactggcggcaggcgggactgctcgagcggcgcatcgcggacgaggcccgcgaggaggtctacgagctgacgccggccgcgcggcaggggctccgcgtcgtcgagcagctcctcgcaccgcgcgcgagcgtcaccgagtcccgcctcgtctccctcctcaccgcgctccatcagctggccctcgagaccgacccggacacctcccgccggctggccgccctgcgggctgagcagcaggccctggcggagcgcatcgagcgcatcgcctccggtgaggacaccgtgctggatgagcgacgcgcggtggagcggctcgacgacgtgctcacccaggcggccgacctccccgtggacttcgcccgggtccgggcacggttcggggagctcaatcaggagctgcggcgtcgcatcctcacggacgaggggcttcccggcgacgtcctggagaacgtgttccgcggcgtggacctcatcgagtcctcggacgagggccagaccttcgccgcgttctcccgcatggtgcgggaccccgcgatgtccgcggcgttccaggccgacatccgggccgtcctcgagcgcgacttcgccgcggatctgccgcccgccacgcggcgtgcggtgcgtggcctcgcacgcaccctgcaggacggctcgtccgccgtgcaggacacgctcacggagttcgcccgcggcctgcgccgctacgtcctctcccaggagtaccaccgggaccgccgtctgcacgtggccctccgggaggcgctcagcgccgccgccgacgccgccccggccacgcgtccctaccggcagacggggcgggacctggacctcaccggcatgtccctgcgctccgtcggggagatctccctgcacgatccccgcgagttcgacgtcggtcctgccctcgcggacgccgccgtggccacggtggacatggccgccctgcgtgcgctcgcccgtgagacggagatcgacttcacggaactgcgcgagaacgtgaaccgcaccctcgaggggaaggacggcgcgccggcctcggccacggtcgccgacgtcctcgagctgcaccccgccacgcagggggtggcgagcgtcgtcggactcctctccctcgccgcgcagcacggccaagtggaccccgacgccgtcgacctcctccgctggcccgccgccgccgggatgcactccgcgcacgtgatccgccaccgcttcaccgaaaggctcccctga

SEQ ID NO: 41941 - DNA, 681 bp, Micrococcus luteus NCTC 2665
atgaccccggattccgacgacgcggcgactccgcccgccacggacgctgcgcataccgccggcgccgcgcccacgctgtgggagggcgatctcggcacgctcggagagcagtcacgacgcgcactgctcgaactcctccagggtccgtacctctccggccgccgtcgcccccagctgtggcaggccctgatcgccgacgaggccgccatccgctcgcggctgcacgacctgttcctcgacgtggtgatcgaccagcatgacgagttcgcgttcacacgcagggtcgcgacggacgagatcgcggtgccggccgccctgcgctccaagtccatgacgttcctggacaccgcgatgctcctggtcctgcgccagcacctgctgacggcggccggcgaacgccgcgtgatcgtgggccgggacgaggtcttcgagcagctggccgtgtaccagcagggtgacgactccgggtgggcgcgccgactgaacagctcgtggaccaagatgctcaacagcttctccgtcctccagcagctggaggacgaccgcgccgaggtctcgccggtgctcaaggtgatgatcggcccggaggaggcccgggcgttcaccgagctgtaccgcgagatcgcggcggggcagaacgacgacgacgcggatgtcacgacccaggaggacgaccgatga

SEQ ID NO: 41942 - DNA, 3357 bp, Micrococcus luteus NCTC 2665
atgaccgcacctcatcccgcgcaggagcaggacacgttcgacctcggcatcgagttccccggccgcgacacagcggacatccgccagtggcgcctcgaggaggtccagatcgccaactggggcaccatggacggtcgcatccaccgcttccccgtctcgcgccgcgggcacctgatcacggggccctcgggctcgggcaagtcctcgatcctggacgcgatcgccgccgtcctcaccccggacaagtggctgcgcttcaaccaggccgcgcagggcggggcggagcggacggccacgcgcggcctggtctcctacgtgcgcggcgcgtggacccgccggcaggacgaggacgaggaccgcgtggtctccgcgtacctgcgccccggggccacgtgggccggcgtcgtcctcacgtatcgcgacggcgcgggcggcgtcgtctcgctgtgccgacagttcttcctgcgcggcaccgcgatgtcccgggccgacatgaaggacctgtgcctgctcgagcgctctgccgtggacctggccgaactgcagacgctgatcgacgacggcatcaggacccgccgtgtgcaggcacgctggccgcaggccgtcgtcaccacgaacggcggtcacggcccgttctacgcgcgcctgcgctcggtgttcggcatccgcgacgacgccgcgctgcacctgctgcaccggacccagtccgccaaggggctggactcgctggaccagctgttccgcaaccacatgctggagcggccgccgacgttcgccatggcggaccgcgcggtcgaggagttcggcgcgctgcgcaccgcgtacgagcgcgtcgtggacctgcgccggcagcgggaccacctgctcgaggtgcgcacggccgcacaggagtacgaggccgccgtcgccgaggagtccaggctgcgccgcctcgaggccgccatccacccctaccaccaggccaggttcctggcggagatccggcgggcgctcgaggaggtgcaggcctcgctcgcgggccttcacgcggcgcgcaccgaggccgacgccgagcaggagcgcgcggagcagcggcgccagcacgccctgatcgcgctcgccagcgtgggcggggaccgcgtcgcggagctcggacggcagatcgacgcggcacgggagcagcaccgggagcgtctggctcggcgcgccgtcctggcgaaccgcctccgcgcggcggacgtggacgcggagccgagtaccgccgtcgagttcggcgagctccaggcggccatcgccgcggacctggaggcgccgcccgagcacccggggccgagccacgcccagctgaccgagctcagccgcctgcgggaggcggtgcgcgagctcgaggcggacatcacggccctgcgccgccgcggcagcaccgtgccccggcacctggcgtcggtccgggaggacctggcggagcacctgggcgtgcggacggacgcggtgcccttcgtggccgagctgctcgacgtcgacgcgcgccatcaggagtggaccggcgcgatcgagcgcgtgctcgccccgctctcgctgaccctgctgatccccacgcggctgctctcggcggcccggacctggatcgaccggcgccacctgggcgtgcgactgcggttcgaggaagtcaggccgacgcgggccgccatccggcccgcgagcagtcaggactccctcgtgcacaaggtgacggtgaagcagggcgtgttccacgactggctccaggcccgcctctccgagcggttcgacctggcgtgtgtcagtacggccgccgagctcgcgcggcacgagcgggccgtgacggcggccggccaggtgaagctctccgccacgcggtacgagaaggacgaccggttccgcgtggatgaccgctcccgttgggtcctcggcgatccggcggcgaagctggaggtgctggtcgaggagcgcgccgcgcgccaggcggcgttcgccgtcgtcgagggcgaggtccagcgggcccaggagcgggccgatgcggagcgccggcgccgcgccactctgcgcagcgtgctcgagaccccgtggacggacgtggaccacgcggcactggagcgccggatcgcggacctccgggcgcaggcggatgagctcagcgccgccagcggcgatctgcaggccgcccgtcgcagggacgaggccgcccagcaggacctccggaccgcccgccaggccgctgacgaggcccgactggccgccgcccaggccgagcgccgccgagccgagctcacccaggaggcgcgagagctcgaggcggagagcaccggccgcgagccgctcccagcggagctcaccgccgagctcgacgcccgcttccgggccgtgcgccgctccgccacgcgttccgccctgacggagagcgccgacctcgtgcgccgggacgtgagcgcgctggccgaacgcgcgcgttccgcgggtgcgcaggcgggggagcgctgcaccgtgctcaccacgcagttctcccgccagtgggcggtggcggccgcggacgcctcgcccggcgtcgaggaccgcggcacgtacctggcgatcctcgagcgcatcgtggggcaggggctgcccgagcacgaggaccggttccaccagatcctgcacgagcgctcctccgtgctcttcggcgagctccaccgggccatcagcaccgcgcccggggagatcgaggaccgcgtggaccccatcaactcggcgctgcggcgctcccccttcgacgaggggcggttcctgcacctgcgtgtgcgcgtgcgtcgtcccgaggcggcgcagcagttcctccgcgacctctccgccgtggcggagaacgcgtgggccgacgactccctcgacgatgccgagcggcgctacaccgcgctggccgggatcatggaccgcctcgcctcctcggaccacgtggaccgggtgtggcggcagcagtgcctggacacgcgcgagcacgtcaccttcctcgcgcaggaggtcgacgacgccggcgccgtccacgccacgtacgactcgggcgccgcgatgtccggcgggcagcagcagaagctcgtggtcttctgcctcgccgcggctctgcgctaccagctggccgcccccgaggacccgcgcccgcggtacgggacggtgatcctggatgaggcgttcgacaaggccgacgcccgctacacgcgcatggccatggacgtgttcgtggagttcggcttccagatggtgctcgccacccctcagaagctcctgcagaccatcgccccctacgtcggcggcatcaccacggtggagaacccgacgcggcggctcacccagatcgccgaggtgatgtgggaggacgaggagaagtga

SEQ ID NO: 41943 - DNA, 1281 bp, Micrococcus luteus NCTC 2665
atggtggctccggaggcggcgcgcgagctggcgcgtcgggccctggcccggtcgcatcgcgggtggaccctcggcgaggtgcccacccccgcgtggtcgctgccgctcaagccgcccacggagcaggtcgtcctcgccgacccgcaggccgcgcagtcctgggcacggggctggcgggccgccaccctgcccgcgggcatccgggtggagtgggccgagcgcagctggcgcagcgtcgggcggcaacaggtgcccgtacgcgtccacgcggtcaccccggacgcgctcgtggcgtgggtcggcgggcgcgaggcgcgggagcagcgggtcttcgcggagcgcgtcgcagcgatgcggcggctggccgaggcgtggggcgggtcgggcccgtcggctgcgggtggggcggggtcagccccgcagacacaggacgacgacggcgaggccgccgccgacccccgcgagctgacactcgccgcggcactgcggcgccacgcgcagcgcctcaccgacctgagcgagccggacttcctgcgcgtggtcgcggtgctggagtggctgcggaccacgcccgtgcagggcctgcggccgcgtcagctgccgatccgcggggtcgactcgaagtggttcggggcgcaccgcaccctgctggaagcgctgcacgcgccacaggagggcggtctcgggatcgtcgacgcccacccgacggtgcgcgtccgcatcctcgatccggccctgcgcccggagggactgcgtgatctggaggtcccgctggagcaggccgccgcgtggccgatcgcgcccgcgcgcgtgctcgtggtggagaacagcgagacgctgctgtgtctgccggacgccccgggcgccgtcgccgtgtggggccggggcttcgacaccgcggcaacagtgctgccgtggctgcggggcgcggagctgcactactggggcgacctggactcccacggcttcgcgatcctccaccggtaccgcacccgcctgccgcagctgcgcagcgtgctcatggacgtccggaccctcgaggcgttccgcgacctgtgcgtcccggatcccacgcccttccgtggcgcgctggccacgctgacctcggacgaggcgcgcgcgctggagcggctgcgtgccgagggcgacgtgcggctcgagcaggagcgggtcgggtgggaccacgcgctctcggcgctggacgcgcacttcgtcttctgcgacgcgggcgatcgtgccgccggtggcgaggacgcggacggtcggcggatcgcgtcatga

SEQ ID NO: 41944 - DNA, 1443 bp, Variovorax paradoxus S110
atgcagtttttcgcccctccccgcgagcactttttccgtccgctcacccatgacagccgcgaattgtgcgcggctgtgcttcggcaattgcacgaacgggtgcacggtgcgaatgcggactacgccgaagcgctgacgcgagacgtggtgctggaagtggtcctacgctcgctttccgaccccgccctgcgcgcgttagcgttcgacggtggacggacggcttcagcggaggaggaacgaggctatgccggcgaactgctgcgcaagcttaaagaatacggctggttggaagactatcgtgatcctatcgatctcaaaccaacgctcaagctcagccgcgcgggtaaggccttcagcgaaacattcgccagtctggatgattcacgcgccaagacgcgtcaacgcaacatgcgctcggcacgcaaggcgctgtcggcctttctcgatactcgcgatgccgacgaattgctagacgcccacgagtttgccagccgcgtggtgcaagatctgcaagacgacattgagtacttccgtcacctgattcagagcctcacacgagaagcgttgacacaaaaggtggcctggggcgagttcaacgagttcatcgacaagcgctttgcccgcgaatatgcggtgcgcctggtggccgactccgttgagcggcaccgcgggcagattgtcgagacgctggacgaggtgcgcgcgctgaccgaggacgtgcgctctcaatcagacggtcatctgttgcagcgtgcgccctggctagagcgtgaggcacagggccgcagccccatgctctggctgaccgatcgcatcgaaagcatggtggaggctgcctgcgggctgaagctgccgatgctccgttccgaaatgaacaactacgtgcggcgtttcaccagcttgctgcgccaagccctgtccctggactatggtgccgaatccgcgctaggtcgtaccatggcttggctcaaggatcgacctgaatcggagcacgatttattgcttgacgtactggcggcgcgactgtcgactactgaaattcgccttgctggtggcgtcttgcgctggacgattcgcaatcgcgagctcgcgcaagaggaacaggcgccgctggtggtcgacgacgaaagtcgcctcaacgcagccctgcgacgtgccgaagccgaggcattctccttcagcgatcaggatgtcttgcaaagccttctgccgtacctggcgaaggggcctgtgacgctggcggcgctgccgatggcgacggcggaagacgccgtgcgcgtgctgcacgctgtgggcgcagcacgttcggccgaggggcgacgcctgatgcgtgcgcgcaaatcgaccaatcagatgcaaaacgccttcttccaggccgatgactatgaactggaggctgaggtgcagtccactgtacaagccagccagcctgtccgcagttga

SEQ ID NO: 41945 - DNA, 690 bp, Variovorax paradoxus S110
atgctccagtcgatctctcagttcattgaaaaccgcttgactaccgagggggccggtaacgtcaagcccgctcgcttcgcagagttggttggtcgtttgctggccagcggcgtgctttggcgcgatcattcgcggcccgaagccgcgctgtatgacgatgctgcgcaatgcgaacagctgctgcgcgaatggttcggctgcattggcttcgtgcttatccatgacactgatgcgcgcctggtgcgcttatatccacccggtgagggtggcgcggaggaagaagaggacggtgtcaggaaactgcgcgctcgactctcacgcgattttgcggctacggtgatcgcgcttcgtttcctctacaccgaagcgcttactggccgccgcccattggtggatgaacgcttggcgatcagcctggaagagttgtcgcaggccgtggtgtcgttgctggcacatcggcttcctgcgtccgccacagagcgcatggcactgctgcgtgatcttcgcaaacatcgggtggtgcatttcatcgaaggagacgatgcgggcgacatgcagatgggattggcggtgctacggcctgtgatgagcttcgtcagcgacgaggcaatggaggaagcgctgcgcttggtcggccacaaggcggcgttgctctctccctccccggcacacgacggcagcgctctatga

SEQ ID NO: 41946 - DNA, 3687 bp, Variovorax paradoxus S110
atgaagatcgccaaactcttgacttggcactggggttcgctggaggaccgcgagtggatcttcgccgacacagtgctgttgaccggtgaatctggctcgggcaaatccacgctgctggatgcgatccaaaccgtactgactgccgcgcaccagcatctggtgcagttcaacatcggtcaagacgaatcgacgcaaagccgacgcggtggcaaggagccacgcaccctggctgcctatgcgctcgggcagcaggccgacggtgttttcctgcgctcacgctctaccagctatgccgggatcgtgttcgaagcgtcccggcacgctggtgagcagtctccaccgtttacggcgctggtcggtgtcgaggcttttgaggatgggcggcgacccgtgttgcaaggttcgccacagttcttcatcgtccgccatgcgttgtctttggaccatctggcccgacgcaacggcgaggcgctcgctagatctcctttgtcgctcaaagagctctatgtgcagttgcagcaccgtttgcaggcgggcacggacaccgtagtgcagcgtttcccggacaagggtggctacttgcagcacctctacggtgcgctcatgggaaagaccgcggtgggcgagaacgatgccgttcgtgccgccaagtcgatcgtcagggccatggcttacaaggaactgggcaacgtcaacgatcttgttcgcgacgaaatccttgagccccatgatttcagtcgcgacctggaaaagatgcgcgagttgatgcgctcgatcgcatcactcaaggccgaggccgaccggctggctctgaatctggagcggttgggagtggccacggaaagcgcacagagcgcgttggatgaatcgcgccgcttcgttgtagcaaccattgctcacgctttgcgcgcgcgcagcgacacccgagacgaactggcctcggtgcagcgccagatcgcaactcaggacaagcgccaggcgcagttgcaggagaagctggcttctttggcggcacaggagacgcaattgcgcgagcagttgaagctggtcgagaagcggttggaagaaagcgacgtggcgcgtgagaaagctatgctcgacaaccagatccggttgcaagctgaccagttccgtctgcactggaaccgcgtccaagaggcggtacgcggcatcggggtgatggcaacaaaactccaacagttgctcgcactggatttggaggccgtgccttcattagccgctgctgtggaactgatgcgtccagcgggtgctgctgtgctcaagccctggccggccatggctcaggcctatgcgcgtgaagcccagctcgatgtcgaactacctgcctttgaactggaggctttcgatacccacttgaccgccttgcaacgaggcattcatgacggcgaaaattcgctacaggggaccgtggtgctggcgctaaccgatgtgggcgtgcggttgaggtcggtcggtgacgagacccaacagctggacgccgaacttcgcgtgctacagacggggcgcagcctgggtctgccggccgcgcgcgatgccactgcagccgtcgtgctgattgagcaagaactgccgcaggcccatccgtacatgctggcgcaactggtcgagccgcgtgcgggcactggttggcagaacgccatcgaaggctacatggggggtgatcggttcgcgatcatcgtcgaagccggatgggaagcgaaatgcgcgcgtctggtcaaacagcgctatcccgtgcgctcccccaaggtcgtgcaggggcgcaaggccatggaagacactgaggggcggcaactcgaggccagagcgatgcttcacgagcttcagtgcaagcaccctgtcgccaatgcattcctgatggcacagtacgggcgcgtgcgcaaggtggacagcgaggaagaactggcccgcacgccccaaggtctgatgaagcaggggttgggcagccgcggatacggcatgtttgcttgccgggcgctcgatggcgagcttactttcggcgaggcagcccgccagcggcgcaagcggtggtgcgaggatgagttggcgcggctcgcgcgggagactcaaaccctggagacactgcgcggatctttgacagccatcacacgaatgttcaacggtgccgcgttcacgccactgacaccattgcttttggctgtgctggaaagtcaggcccaacacgccaacgccgaacaggcactcaaagcgttggacctttcctccatcgacgagctgcttgcacaccagcgcgatctgatagatcgcatcgaaacggcaaggactcagcacagcgaagaaaaggaacacgttggcgccagcaaatcgacgttgggaggtttacgtcgccgcgagtccgaactgcaaacccgccttcccgagctggacggcacttgtgccaacgcctccgtttgggcctcgcgtttcgtcaacgccgtgtctgagctggcgacggaagcgcagttgctgggggaggccgaaagcatggcgcaggaatccgaaaccacgctcgacgccttgcgccaccgagctcaatcactgcgcgaaaacttacctcgtacgctacgcgagctggcacaggccgtggggatctacctctccggtgcacgtgatgacgctgagcgcttcgtatggaccgatccgccacgcaccatcgatcgattggacgagttgttgcctctcgtctttcggacccgtcaggccattgcggagcagactcagcgccagcaagccatcggcttggctgagaacgccaagtccctgcaggaggccgaagccagtttcaatcatgtcttcaccagcagcttctgcttcaagttgcgagacgatgtgaagcagggcgccgctacgctgcagcggcttaatcgccatctgcaggatatccgcttcggcaacgacaccttcaagcttgaatgggactggatcccacgcatgcggaaggttcaagagtttttcgaggcggttgagggcgtcgtcgaagggctggaacgcgagcgcggttccatcttcgcatcgcctcagctcagcgatgaacagcgtgccaccgccgaagagatccgccggcttcttctggccaatgaccagggtgcaagtgaacgtgcgttgaaggaactggctgactaccgcaactatcgtcgttacgacatcgtgcgcaccagtccagttggagagacccggctgtccacatggggcaccggctcgggcggtgaacttgaaacgcccttctatgttgtccgttcggcggtgctcgcccatgcattgggccacttcggtcgtgagcgtcgagaggcacctgcgttgcgactgatgctcagcgatgaagccttctccaaaatggatgaatcgcgttcgcgcagcgtgttgcgctttctgtcgcagacgctgggcctgcaacttgtggtagccatgcccacctccaaatcgggcgcagtcaaacccgagttcgacaaggagtttactttctccaaggttatggccagccgcgacgggaaggagctgttcatcagcgaagtgcaggaaaagacgttgaaccggcaggcattgacacggctatgggatgcccacgctgcacaggcacgcgaggtcgcacgtgttgcctatgaagcggatcgccagagttccgctcaggtgcagcaagagtcgacgcccgatccagaatcgacaggctga

SEQ ID NO: 41947 - DNA, 1206 bp, Variovorax paradoxus S110
atgcggcatgttgattccttgtccgagcacccgttcttgcaacggatcgcaagagcactgttgcagaaggcggagcggtcgatcagtcccggacagacgcggctgcagctagatcgcaaaaatgcgccggagctctatgcgcaaactgatgtggagcaactgcaactatggctgatgttgctggatgacctgtgcgccacggggtgggtcacattggtgctgaacccatcgcgagacttcgctaccttcaccgaccgcagcccccggctcgaattgcgggattttgaggcgctcgctgcctgggccggctacacgcccaaggcgttgcgctggcaacggcagtggttgggccatcttggagcgcattgggccgcgcccggagcggttgccccctcggacccagaagctgtgctcgattacctggctcgcagcccgctgacgcttgtggaggatttgccgttgatggacgcgacccgcagccttgacgcattggtcgcactctgtcggtctggccgaacgctgtcattgcgcgaggcctcagccaaggtcttccaggcgcgctcaaaagtgctggacaaccgcgaggagctgctgcgattgctgggtgcggcgcctggccagtttcgagaggcgccgatccaacttctagtggcgctgccggacatgaaagctgactttgaggaggtgcttttcgtcgaaaacttggtgaccttcgagcgcatggccgatagccgaagcccgggttgggcatccagcttacttgtctacgccgccggtttcaaaggcagctccaagcggctgcgctcccgtgaaggttgcaagccatatgtgcgcactatgactgcgcatgctgcagagatggggactgccacgtcggcttcgatccagcgtatcgaagaatggttgttcggcgatgctccctgggccgtccgattttttggagacctggactactccggcatgcagatcctagcggccctgcgcgacgtgtttccccacgcgcaggcgtgggagcaagggtacagcgtgctgggtcaactcatagatcgcggcgggggccatcttccatcacaagctggtaaagaactgcagatcgatcctggacagaccggctgtagccatgccgatcaatatctcttgcccttgatgcgtcgtcacggccgattcgtggatcaggaagcattcagtcccgaggcctcgacgtga

SEQ ID NO: 41948 - DNA, 1425 bp, Geobacter sp. M21
atgctgttcaacaggcttcccgatgagatcttcaaaccgctggccggaccgaaccggtaccttttcgaagaagtattgctctttcttttcaagtacttctcggacgaggacatggctaacgaggcggtctttccccgccgctcgcacgtcctgcgcgagatcgaggaattgctggaacgcaagggacgctcgctgcaggtcttccaggaggagggggatgccgatgagcaactgcgcaatgctcccggcctggccgcgcgctacatctacaaccggctggtggacaccggctggctggaagaggaggaggatggctaccacgtcaacgtcttgatgcctcctcacgccaacctcctgctggaagcgctcgaaggcgtcgcgcacgcggaaaagaaaaactacggctcgacgatcgcttcgatccggctgcaactggaggcaatcgccaatcagccggaaaccaacgcccgcgcctttctcgaggtggttcgggcgacgcgggacttcacccggcacctgcaaaacatcttctccggattgcgcggctttcaggagctgatctcccgacagcataacccgcgactggccttggccaccttcttcgatgacttcgtggaaaacctgctaatctcggactacaaatcgctgcaggcggaaaacaacccgtttaggcaccgcgccaacgtcctcaccctcctgttacacatcgagcacatcgacgcctgcctcgccgccttggtcaaggtctaccaggaggaccgcaatattgatgctgcccaggcgcgggaaagggtgatcaaggatctccacttcatcgcccgcgtcttccactccgtcgaccgccgactcgacgccatcgacctctaccgcatgaggttggaatcgcgcgtcgcccaaatggtccgctacctggaccgcaacgtcccggaccttaccaaccgcggcgtcaagctgctggaaaaacttggccagacctcgcagcagcgggacgacggcgaactccccgacctgccgcagcccgcgcgctggatgaacgtggggcttttcggccagcgcagcgtgcgtaaaccgcaaaaacgccggcagccgcagttcatcgaactgggcgaagagcaggaactgggcccagaggtgcgggagcgccggcgcctgattaaggagtacctgcagcgccgagtgatctctcccgccaaggtcgcggccttcgtcgatcgccagatgggcgaaaaaacggtgctcaccgcgcacgatttccatattgaaacggtcgaggacctggtcgcattttcctatattccgctgctcggcaggcccaacgccaagccgactcccaacctgccgcgcttcaatttccgtcgcaccggaggtcggatcgagaccgcctacttcgagtgcggcgacttcatcatagaaagaaaggggtag

SEQ ID NO: 41949 - DNA, 633 bp, Geobacter sp. M21
gtgctccaagaactaagacgcctgctcgataaggacgagacgctggtggccgaggatctgcgccgcaccgcctcgctggcgctggagcggcagtttctcttcggcgacaaaagccgcgaccaacgttatttcctgcagatactcgacgccgaggattactttcgcaatctcttcgacgcgctcaacctcgatctggtctgcgaccggaccgccggttacgtcggactggtgcccagagagcatcagctcaccgtgaaactcgacaccgagcattccctgtttctcttggccttgagggtgatctacgaacaggctgtgcgcgagtgccgcgtgggcgagttctcgcaggtgttcaccgacagcgagatgctggtggaaagcttcgtcgcgcacaccggccgcaagcgcccggggctggtccgcctgcgcgaaatcgtgcgtaccttttcgcggcaggggctggtggagatcgacgaggacgaggacaaggcgatcaggttccgcatccggccgtcgatccgcgagatcgtgacccaccgctttctggaggcgctggaggagtacgcggagatcggcgaccgggaggagagcggcgccgacgaggagaggagcgagcatgaagacgcttactaa

SEQ ID NO: 41950 - DNA, 3426 bp, Geobacter sp. M21
atgaagacgcttactaaggcggtcctgatccagtggttccgcctggaggcggtcgagataccgatcatcggcagcacggccttcatcggcgacaacggggccggcaagtcggcgctgctcgacgccatccagaccgtcttgaccggcgccaacaaaagccggctggtgctaaaccgcggcagcaacgagcagtcgtcgcgcaaactctgggagtacgtgctcggggtgatgtccgaccccaaaaagcccgaactggcgaccaagatcaagccgcgcgagaaggccaactgctacctggccttgaacttccacgacgaggagaccggcgagtccctctgcgccggcgtctccatctacgcctcgctagccgagatggccgagaaggtggagggatacttcatctgcccagggctggccggccacaaggatctcttcctggaacagcgcgagggggagagcatggtggttctcccctgggcgcgggttaaggagcggctggcgaaaacctgtcccgccagccgtttccactacgaacccggcaagttcacccaggatctctacggcacgctgagcgaacatcccggctcacccaacaacgacaagaccattctcaaggcgctgcaggccgcctttcggctggagcggatctccgatcccaccgacttcatccgccgctacatgctcgaccgcgacgacctacagatcaaagagttgcagagcgcgcttaaaaattaccgggatatggcggataaggcggaatcggtgagccgccgcgttaccgacttgacccggctggaagggctttgcgacaaggtcgagcacgccagggtgcaacaggcgcagggtgaattcctttccctgaagatcaggtccgagcagcttttcgaacaggccgacccgctgagagaggcgatggcggcgatcgaggagtcgctggaagagcttaaggagcgccgcggcacgcagggtgcgaggctggaggcgctgcaggtcgagcttgccgaaaaacgcgccgagcaaaagaacagcgatctgcgcatccagcgcgaaaggttgcaactcgattacgacaaggcgatcctcggggaagaggaggttaccaagaagatagcggagatccgccgcctgctgcagcgcttcgagcgccacaaggatctgccggtggccgagcccttatccgtgagcctccccgagttattgaaactcctgccgaacgacggtttggtcgagtcgcagctctggcctgaaaagcccgaactgctcgacggctgcctggcggcgctggtcggggcggtggagaaatccctgccggaattaagccgccgctacgatgcgctctgcgcggggatcgacggactcaccaaaggcgtcaaggaaacaaccgaggccctgaaccagatgcagcgcggcaaggccccgctccaggcccacactaagaacctcgttgaatacttaaagaaaaacggtatcgccgcgaggccgctctgcgacctggtcgacgtcgccgacgaaaggtggcgggagaccatcgagagcatcttgggcaacatccgcgaggcgctgatcgtgatcccggaacaggcccagaaagcggtccacctgtaccggcacgaagcgcggcgggattttcccggctgccatatcgtcaacaccacccagagcgagcgctggaaggacgcacggcgggaagggtccctcgccgacctggtgaccagcgaggacgtccacgtgcgcgccttcgtaaaccgcaggctcggcaacatcatctgcgtcgagaccgaaaaggaattgctcaagcatgaccgcgccgccaccgccgacggtatgctcagttccggcggcaccgtttccgagctgaaagtattgccgccgatcctcggacggggcgcgcgcgaaggactggtcgccacctatcgcaagaagctgctggagctctcgggggagttggatgaaaccggtaaccgcaagaagaagctgggtgcgctgaaggaactgctggacgagtttcaaactaacttcgccgacggcacggtcagcctcgcccaactcgccggccggcgcacggccttcgccgaacaagttggcactttgcgggagaaaatccagcagctcgacatggacaagcgcgagcgcaggttgcaggaggagatagaaaagctggaaaaggatgccaaggtctccaaggatgagttgggggcgctggaaaagcagacacgcgattcggagcgggagtacgacaagaaggaggccgaagtcagcggcctggaacagcagatggacctcctgaagacgctcctggacgaaaagcgccaggacgccctggtcgacccggtgaaggcggccgaggtgctgctccggtggcaggagcaaccctgcgccgatttcgcggccatggtcgtcagggcagacaaggaggtcaagtcggccgaaaagactatcctcgatgcaagcaaagaggtggtgcgggattacaccgagtactacctgcgctatgccgccgaagagggggacgaagagcgccccgaggagttcggggattacgccgccaccatccggaggaagaggaagtatctggtcgaaaccacgctggccgagtaccgcgaaaagtcgcagaaggcgctgcacgaggcggaggacgccttccgctccaagtttgtcggccgcctgatcggcaaactggagtcggtgcgcggcaccatcctgcaactaaacaagaccctggagaggcacccgttccacggcgagatttacaagttccgctccagcgccaatcccgagtttaagcacatcatcgacttcgccaaggcttgcaacagcccggtttcgctgcaggttgggggactgttcgatccgggcaacgatcccggcacgccgcacaaaaaggcgctggacgacatcgccacggcacttcaggaccccaaagccgcggagcggctgcaggattaccgcaactttctggtattcgaggtcgagatgtgcgacacggacggcacccccaccgccgacctggagcatcgcatccaaaaggggtcgggcggggaaaaccagacgccattttacgtggccatcggcgcttcgctggccgccgcctaccgcctcaaggaggaatacggcaagcactgcggcggcatcagcctggccgtcttcgacgaagccttctccaagctgagcgtgccgaccacccaaagctgcatcgaattcctgaagaagatccaactgcagttgatcgtggcggcgcccgacgaaaaattcgccaccatggcggaggtcatggacaccatagtctgggtcaccagggaaggcggtaccgtcgagaccgaggtggtgtacatcaagccgtcgatgcgggccctgttgcgctccgacaacccgtatctcaagtcaaccggcaccgcggccgcggaattcctgcatgaaccagcctag

SEQ ID NO: 41951 - DNA, 1212 bp, Geobacter sp. M21
atgaaccagcctagccgagaactactgacgaaactgctgcacgcctggcaggggaacccgaaaggggcgaggaaggtgtccctttctatcaccaaggcgcgcgccgccgcctacttccaggcagttctccccgaagaaaagggtgcgctgcacgccggccttgaggaagcagcggcgtcgggggccatcgccttggagtggggaaaaggcttcgaaagtcacatcctcaggcgggtcgtcttggttgatggagcagtgctggccgagtacctcggcgtgccgctggcgtcgcagcaggccgaccaggcccggtcggcgctggagagttgcctggaagaacgagaaagctggattgaccgctgggtggcagagctattggatcactggagccggaaccaggggttcaacggcatcgcacccggagaggtcgccacggccaccctcctggtcagggctctttcggcagtggccgccggacggcagcgcaacctcgacctgagaaccttcagcacccgcgaattgggaaactcgaaggcgatggagtcgatcctggcgaagttcgcctcgatctggaagaagcatcacgcagccgactatcccgcggagttgaccaacgaagaactcttcgaggctatcgggctcgttaaatttccccagccgctgctgttgcgcggtccccttacactcaggcttgccggtcgcgacgtcgattgcgaggggatcgagccgttcgtggggcttccgccccaagccatgctggacgtcctggccgaccagcgaccggagtactgcctgaccattgaaaacctcgccagcttcaaccgctacacgacggaggtccgcgaccgtggggtgatcgtcttcacgtccggcttcccgtcgccgggcgtcgcggatttcctgcgcctgctcgaccgggctctgccggcggcaatccctttcttccactggggagacatcgacgagggaggattgaagattttcttgtacctgcaggggctggtaaagaggggggtgcagccgcaccggatgaccccggaactcctgacggcgaaggggcagccttcgcccggattgcggcggcgggaagtggggcggctgatcgccgatgacaggactgtagccctcctcgccgaggcgatcctctcaacggcccctgccagaattctggaacaggagaacatagacccggtcgctccttccgtggcctga

SEQ ID NO: 41952 - DNA, 1434 bp, Saccharomonospora viridis DSM 43017
atgctcgccctcctccatcaaacacacgcgccgttcgtggtgacggcgctggcgatggtcttcaccgcggagcggccgagcgtggcggtggccgacgcgcacgcggagatcgacgacgcgctgcagcagttgcgggccgcgggttacggcgaggacgacaaccagccgctgcccgccgggaacgcgcgggacctgtgccggcagtgggtgcaggccgggtggctggtgcggcacgtctccgacggcgacgtcgagatgtaccggctgtcggcgcacggcgtgggtgcgctcgaggtcgccggccgggtcggcggggtgcgcaccagggtgtcggaatcacgggtcaggacgctgctgcaggcgatcgagcggctcgcgcaggacgccgatcccgacgtcatgtccaggatttcgcgcctgcacgaggagatcctgcagcggcagcgggaactcgcccggctagaacgcggcggtgaggtcgagacggtccccgacgagcagttgctcgaagccgccgagaacgtgctgcacctggcgcgggaactgcccgcggacttcgcccgtgtagccgagtcgatcaaggccgtgcagcgggacgtcgtcgccgagttacggcacgacgtgcgcccgaccggcgaggtcctccgggagtacctggaacgcggcaaacagattttggacgcgacaccggagggccgggcgttcgcgggagcgttgcggctcatcggtgatccggcgcagatccacaacctgtggagccaactgcgaacggtgcttcgacacaagttcaccgagctgctgtcggaccagcagcggcgggagctcgccgacatctcgcgccgggtcgaacagggcgtcaaggaggtgctggccgcgcagcggcaggcgtcccacgtcatcaccacccaggtgcgcaaccacgacccgctgcgcgaccgccaggtcgacgagttgctgcgaaacgtgatgtccgaactgcacgagtgggtccccgcctcccgccggggcgagcccgtcgagccgctgcgccgtctcccggtggccgacatcgggcacctgcgccagcggacgagcgagttgcgaccgcctcaaccgcccgcgccgttgcgggaatgggaggagaccgaggacgtgaccaccgccgacaccagggcctggggcggcccccgatacgccgagctggaggagcacctggtgacgttcgcgggcggggaggggagcgtggacgtcgtggcggcgtttcgcgcggcggacgaggacctccggcggccggtcgatctgctcggcctgctggagatcgcccacgacgccgggatgaccgagacggacgaggtcaccacggtcgacacggtccggcccgacgggacccggcgacggttcgccctcggcggtgtggtcgcggcgaacccggctgacaggaacggtgagcgatga

SEQ ID NO: 41953 - DNA, 666 bp, Saccharomonospora viridis DSM 43017
atgagcgaactcgagcacgacgactggtcgaccggtgctgccgccgggttcatcgacccggtcccgatggaggacgatccgaccgagctgttcccgggggacacgggcacgctggaggcggacgtgcggcgggtgttggtccaactgctgcgccgcaagttcctgttggccgagaagaacccggcgcagtggcggacgttgctggagaaccagcagatcatcgagtcgcggatgcacgatttgttcatccggctcgtggtcgaccacgagcggggcgtcgcctacaaacagcaggtgcggtcgagcgaactggacgtgccgatcctgctgcgggacgagtcctacaaccgggccgagacgttggtgctcgtgcacctgcgcaccgtgttccagcgggagcgcggctcgggggagacgtccgcgcgcgtggacatcgaggaactggaacagaccgtgctgacctacttcgatcccgaggaccacaacctggcccgcacgcaacaggaagtccgtggtgcggtgcagcggttggccaccgagggactgctcgtcgaggagtcggcgggccggtatcggatcacaccgctggtggaggtcgtgctgagcacggagaagctcgccgaactgcagcagtggttgcgcgaacggaacgaggccacggcgtga

SEQ ID NO: 41954 - DNA, 3345 bp, Saccharomonospora viridis DSM 43017
gtgagcatgatcgacacgctgttcgggttgatcccggcggcatcacggggccagcagtgggtggcccgcgacctgcaactggtgaactggggcggctacgacggctaccaccgggtgcggttcgcgcccggagcgaccctgctcagcggtggttccgggtcgggcaagtcgacgctgatggactcctacatcgcgttgctcatgccgcacacgacgccgttcaacggggcgtccaacggcggtgtggtcggcaggccgcgcggcaaggaccagcgcaacatcctgtcgtatgcgcgcggcaagctcgacgagtccagggccgacggtgagacgaaggtgcgggtgctgcgcggcgacggctgcgacacctggtcggccatcgcgatgacctgggtcgatcacaccggcgcggagttcaccgcgctccgcgcctggtacgtgccggcggcggctcgcaccctcgaggacgtcgtggcggtgcgcgccacctgcgaccggcactactgtctgcgggacctggagggcccggcgggcaagcggttcgcccgcgccgaggtcgaggccaccggcgtgacctgcttcgacaccgaccgggacttcaccgcccgcctgcactccacgctcggcatcggcgccgcgggcgatggacacaaggcggtcgccctgctcggtcgcatccaggccggccagcagatcaccaccgtcgacgccctgtacaagacgatggtgctggaggaaccctccactgtggccacggcggacgcggtggtgcaacagttcgacgagttgtccggcaccagacagcggatgatcgtcgcgcggcagcaggtgaaggcgttgacgccgatccgcgagcatcgacgcgccatcgacgacgcggtggagcgactgcggctgatcgacgcggtcggctcgttcaccgaggagtcgtcgcccgcggcgttgtggtgtcacgaacgtcgactcgacctcctgcgcgccgccgaacaggacctcgcccagcgacaccgtcgggcgaaggccgaactggcggagaccgaggctctggtcaaagccaccgaagcacagtacgagggggcggccgaggcgcttcgctcctccgggggtgaccgcctggagaccgcgcttcgggagttgcgcaacgtcgaccagcggctggtcgacgtcgaacgagcacggaaccggttggaccgggccctcgaggacatcggcgccacggtgtcgaccgccgacgatttcgccgccctggtggagacggcgcaccgcaccctggccgacgcggaggcccggcgcaccgctcagaaccacttcgccgaggccatggcggagaagaaacaggccgagaccgagttggccgagctgcgcgccgaacacaaggcggtcaagtcacgcaggggcaacatccccaccgagttgcacgcggcgcgcgccgccttggccgaggccgccgggctcacgcccgacgagctgccgttcgtcggtgaactgatcgaggtgagcaccgagttcgagccgtggcgggaggcgttcaacctggcgctcggcgggttcgccacgttgatgctcatcgacgtcggacgtctgaacgcgttccgggaggccgtcaacaaggtcaagacgacccgacgcgtgcacttccagggcgtgcgcacgggggtgcgcgacgaggtcacgctcaacccgaagacgctccccggcagactggactatcggccgtcgccgttcaccgcgtggctcaaaagcgaactcgcccgccggttcgactacgtctgtgtcgacacgccccgccagctttcgcagtacaccaaggcgctgacgatctccgggcagacgtcggagcgcggcggccggggcgcgcacggcggccacggccgcgccaacgtgctcggcttcaccaacgacaggctgctcgccgacctcgaccaccggatcgacctggcgcgccgacgcctggaggaggccgccgcgtgggtgtcgcgggcggaggaggagctcaactcgttcgaggcccgacgggcggcctaccggaccgtgacggagttgtcgtgggaccaggtggacgtcgcctcgctccaggcggaacgagagcattggaacctcctcgtcgaggaggtccgcgcgggcaacccgaagatcgaccagttgcaggaacaggtcgaggagctgaggcggcgggccaaggaactcaccgagcgggtcggtgagcagaagaagaccgagaaggaactcgccgaggcgtgggcgtcgatcgtcgacgaggtcgaccgcgcccaaaccgcgctcgatgtggccgtgcggacgggcacggtcgtgcttccggaacaccgggagtatctggaggagctgttctcgggtgcctcggacgacggcccgatgacggagctggcggagttcgacgcggcggtgaaacgcgccaccgaccgactcgtcaccgaccgacgcgcggcgaccgagacgatcgctcggtcgaggaaggcgttggaggacacgttctcgacgttcctcgaacgctggccgaacccgaacctcggcaccgatccggacgcctcgtatcgcgacttcgaccgcattctcaccgacctggagaccagcggcctgcacgagttggaggccgaatggcgcgacagcctgctgaagttgtccggcaacgacctcaccgccttggacagtgagctggccgccgcggtccgcgagatccgcgaccgcatcgacccggtcaaccgcatcctcgccgagctgccgttcgccgatgacaaccaccggttgcgcatcgatccgcaggagagccactccgcggtccgcgcccggttccgcaaggagttgcgtgacgtccgcgccctcatcgacagcgcgaccacggacgccgagcgggaacgcgcgtatcaccgcatggccaaggtgatcgaccggatccgccgcacggcccccgatttcgccgacctgatcgacgtccgcaaccatgtgcggatcagcgccgagaagtgcgacctcgacggcaaccacgtggccgtgtacgaccacatcggggagaagtccggcggcgagtcgcaggaactgatcgcgttcatcgtcggcgccgcgttgcgctaccagctgggtgatgcgggcgccacccgcccccgctacgccccggtcttcctcgacgaggcgctgatcaaggccgacgcgcgcttcaccggccgcgccatcggcgcgtggcgcgggctcggcttccagctgatcatcagtgccccgaacgacaaacacagcgcgatcgagccccacgtggacgcggagtacctgatcctcaaaaactccgagggccggtcgtgggcgaagcccttggtgggggttccggacgcatga

SEQ ID NO: 41955 - DNA, 1227 bp, Saccharomonospora viridis DSM 43017
atgaacacgctcgtcaccccggaggatgcgtgcgcggagctccgccgcagaatcgatcggaagtgggcggaagccgtgtgcacgggcgtgaatggcggcgagacagtcatcttctccgtgccgctacgtcccggcgtgacaacgggaaaagccgtggagaggctgggatacggcgtctggcacgagtggcgcatgcgctggcgtgacgtcgccgaccgactcccccacggcgtgtgcctggttcatcgcacgctcagcattcgaggagtcgccggtgacttccccgccaggctcgtcgcggatctcgacggcggcgtcgcgttcctcgccgagttcggtgccgaaccgcccactgtggatgtcgaacgggctcgccagctcgcctcggcgctgcggtccgtcgatgcggtgctcaccccggccacgctccgcgcggtccaccggcttcaggcgcacgacgtgggagtgctgcttcgcgcggtggactggctgcgtcagcaccctgacctcagcgcgtggaccctgcggcagctcccgatccggggaatgcacaccaagtggctcgactcccacggcgcgctgttacgcgaggtctccggaagagacgtccgcgcggaggtacggcctcgaccggcggtcgtgcacctgacctacgtcgatcccggttacttggcgtccggccgtcgcagacacgacgcctggaccaccggagacgtgcacgagatcgcctatcgaccccgtgtcgtgctcgtcgtggagaaccgcgactgccgcctccggttcccgcaggtacgcgacacgatcgtggtcgagggtggtggcaaggccgcggccgccctcctcgcggaggtgccctggctccgggccgccgaacacgtcgtctactggggcgacatcgacacggacgggtacgcgatcctcgaccgattccgtgccgcgctggccgagcccacaccggacggggctcctccgaaatcggtcagttcgatcctcatggacgacaccgacctccaccgctatgccgaacacggcgtcaaccacgacaaacacggtcgtcccctgacatcgtcggcggaggtcccgccgcacctgaccgaggccgaacgcctcgcctacgacaccatcgcgaccgcgggtcccaccccgttccggcgaatcgagcaggaagtcattcccttcgagcacgccgtggcccgtctgctgcacgtcacgaacagccgggactga

SEQ ID NO: 41956 - DNA, 1467 bp, Chitinophaga pinensis DSM 2588
atgaataaagacgatctatattggttaatatccacctcgccagccattcaaatgcttcgcttgcgcaatacgcaatggattttacccttcctatatggtgtttttaaggaggagaaccggttttctatatcagaaggccaactcacccgcctgcttgccgaaaccctcggccagcaggatgatggtaccgaagacctggaagaagctaagatcaactttggagaggatgaagaaacccgcgccagaaaatatatcctgaactgggtccagaaaaggctcctgcaagacctgccggatgccgaaggaaatacccagtaccagctcagtgcatacacagaaaaagtgttccagtggatgcagaccctgcagctgcgtcagcacgtaggaacagaaagccgctttaagctgctttttaattccctgcgggacattgtggagaatacagaagatgacagggctaagaaactggaaatactaaagaacaagcgatcagaactcgataaagagatcaaagcactggaactgggtattgtacctgacaggtacaacaatgcccaggtagaagaacgcctggaactattcacgcgactgtgttatgaactgatcagcgacttccgtgaagtggaggataacttcaaagcgattcaccgtaccatcgtagaacaacataccaaagctgaacaaagcaaaggggctatcatcggcttcgcttttgaagcatacgattcactccgtaacagtaatcagggtaagagcttctatgctttctgggacttcctgatctcccgtgcagggcaggaggagtggagagaactgacagaacagctggtacataccgttgaagaaagaaatatcaaggcggatgatcagttcctgctcaatatcaaatcgatgctgctacagcagggtaaaacggtatatgacgcgaacgataagatggcagaaaagctgagtcgtatcatttctgaaaaagaaatcgcccgtcacaggcgtttacggaagcagatcaataacatcaaagaattcgtatttgatctgattgaagaccagaatgtcgaatgcggcattaatatcgacgatagcgcgcagatcagaatggtgatggaaaagaagctgtcactggagcagaaaaagtccgtcgtggaagtgaaacaacctgctaatgcaactgaacagattgcggacgtggaacgtttcagccgtatgctgaatacttctttcatcaacagaaaacagctttgggagaaagtagaaacagtgctgaaagataaacagacagcgacactgaaagaagtactggagcaatctccgttggaatttgggctggcggaagtcatcagttactatgacttcctgcgtgaaaaatccagccgtgcatatattgtaaaaaacactacagaactgattccgttgaatccggaacagacacgatttgtagaggttccatatctattatttggtaaataa

SEQ ID NO: 41957 - DNA, 597 bp, Chitinophaga pinensis DSM 2588
atgagcacagcgaaaatactaccttatgcaccagtagtggtaaaactgttgaaaggccctgtagaatatgtggagaagggcgcctgggaaaaactattgcaatataaagttgaacttaccggcttcctgcaacaactgggtttgtacctggtgctggatgaacaggatggatttgcttttgtaaaacatgctttgacggaagatgacgaagcctatgtaagctggatacaccgccgttccttcagctatgaagagagcatcatgctggtgctgctgcgtgagatgatggctgagtttgaaatcagtgagtccggttcccgtgaactgattaaaaaacgccgggaaatcaaggaatacgcagagttgttttttaaagaaggcgccagccgtatcaaattcctcaaagaaatagaccgactgatcgataaagtagaagaaagcggatttctgcatcgtatagaaaatcatgaagtgcctgatgaacagaagttcaggatcaggaaaattatcaaagcaaaagtggacagtgaagcactggaaacttttcagcagcagctgagcgaactggcaataggcagtagcgtggaagctgaataa

SEQ ID NO: 41958 - DNA, 3402 bp, Chitinophaga pinensis DSM 2588
atgcagttaaacgttttcagtactgataatcataaaagtggattccgtttacaatacctggaggtattgaactggggtacatttgatgaacatattcatagtatcaagcctaacggggaaaccagtctgctcacaggcgccaatggtagcggtaagaccaccttcatcgatgccctgctgacactgatggtacctgagaaaaggtaccgtttctataaccagagtagtggtagtgaaaagaaaggtgacagaacggaagactcttatgtaatgggtggatacgggatggtcaataatgaggccaccggcgtagctaaaaccctttatttaagagagaataaagaagaggcatacagcattctgttggccaactttgccaatgaagcggaacaatatgtaaccttgttccaggtaaggtatttcgtcaatggcgatatgcgcaagatcttcggtgttgcacaccgcgcgatgcatatagccgacgatttcagcccatttgatatgggcggtacctggaaacgtcgtattgatcagctgtacaataaaggcggtcgcagacaggtagaatggttcgacgctgccagcaagtatgcacagcgtatggtggaagcattgggtatgcagagcatacaggccgtgcaactgtttaaccagaccgttggtatcaaggtgttgggtaacctggatgactttatccgtaccaacatgctggaaccgcgtaacatggaagagcagtttcaggagctgaagaaacatctgactacactgttggatgcacagcgtaatatcgagaaagcagaagagcagatccgcttactgggccctattaaagagcaccatgagaacttctcctcttatctgacttccatcatgcagctgaagcaggagcttaatacagctaccatctggaatagcttcacccgtaaccagttgctgacacaggcgcttattgatcgtcgtcacgaagtggagtctttgcagaagaagatcgaagaaacgaaagtcaatatggccgatctcctggaacaggagcgtgtgacgaaaaacctgatggagcagaataaggccggacagcgtttacaacagctggaaaaggatattcaggacctggaaaagagaaaggcagaagcagaagacagcctaaaggaattcgcgtcctggtgcgataccctgcatgtgaaagaggaagaggtaaacgacgatgcaacttatcagcgtatactgaaagaagcgaatcgcgcagccctgaaactggaaacagaacagcgtctgaatgaagaagacgagtacagtgctaaacgtgtaaaagaacgtgcagagagtgaaaaagagagcctggaaaaagaaatagaattactgcatcagtcccggaataacatcccgtctcacctggtagatctgcgtaaagagatctgtagcagtctgagaattgatgtaagtgaaattcttttcgccggtgaactgatacaggtgaaatcagaagaaatcgaatggcaacccgcactggaaaaattgttacactctttctccctgcgtttgctggtaccagagaagcactataaaaaggtaacttcctttgtcaataacaataacctgcgtacccgcctgatttattatcaaatcaaggagtcggcattgacactgtatccggaagatgatacggtatatcataaacttgacttccatcctgatcataagctcagtccgtgggtacagcagcagatcattcagaatttcagctatgtgtgtgtgaacagtgagcgggaattgcaaaggaatgacatggccatcacggtagaaggtttgatcaagaaccgtgacaggcatgaaaaggacgaccgtgcacacagtaacgatgcttcccgttatgtgatgggttggaacaatgagcggaaaaaagatgccctcatttccaaaagaagcaagctgaatgaagcgattatttcttccaatgaaatattgcagacctgtaagtccagatccgcccgtttgcagaagcaattctatgcagcaggacgtttgaaggaacataaagggtttgatgaaataaatatcggtaagctacagaaggccattcgcaaagcgcaggaccagatcggatcactgacagatgaaaaccaggaattagacggcctgaaacagcaattgctggatatcgaacgtcagaaggaagacaaccaggaactgcaggcgatgctgatcagaaatgaagcgctggaacagcgtaacattgaagagatggaagaagagcaacaggcaatgcaacacctgttacagcacgttacagaaggcgataaggatgaactgctgaacttccagcagcagaacagtcacctgcttggtaacgtcacactggagaacgtagctgcgatctataaatccctgcgtgagaataaagaacaggacctgcgactggcagaagacgcccgtcataaggaagaagtgatgctgaacagaagtatcaaccgtctgaaaaatccgcaggcagagatactacaacgtttccctgactggatttcagatgtacatgctttatctgatgatgcagtacatgctacagagtatatcgaatggctggataaactgacgaatgataacctgccaggctataagaaggatttcgaaagctatatcaacgttaccattacttataagatcggtggattgaatgaagagatggagaaatgggagcgtgatatcagcaatacgatccagaaactgaatgattccctggctggtatcaacttcaaccgcctgccggatacttatatacagctggtaaaacgtccggtggcttccggtagtgaggcacgtgaattcaagagccgtttgctggatgctttgccacagtcggccaactggcaacagagtacttttgaagaaaaggcacagcatttccgtgagagagtacaaccactgattgccgcgctggacgaaagtgaagcataccgcgcacgtgtactggatgcccgtaactggtttgaattctgggcagatgaacgtttccgtgaaacgaatgagtccaagaaaatctatcgtcagatgggacaattatccggtggtgagaaagcgcagctgacctatacgatcctgtgtagtgcgattgcttaccagtttggtattaccagagaaggtaaaaatgcaagaagtctgcgattcattgcggtggacgaaagcttcagtaaccaggatgaagagaaagcgacttatctgatggaactctgtaagcagctgcacctgcaattgctggtggtaacgccaagtgataagatccagatcgtacagaacttcattgcgcacgtacacctggtgcaacgtgtgaacgggcgtcagagtatactgtataatatgacggtaaaagaattgcagcataagatggcggactcggaagtctccgtttaa

SEQ ID NO: 41959 - DNA, 1569 bp, Jonesia denitrificans DSM 20603
gtggatcacctcattgcgcacctggaacgaacccgttccgcattcgaccaaccaactcttgccctcctcaacaggcactatgcacccacggttctgaccatcttggctcaggtcttcccacctcaccgggcgagcgtggacgcagaacaggttgcccttgaagtcgaacagcatcgactcgctcttgcccaccacaactgcgatgaccttgacggacacagcgtacggcagctgttgagccgttgggtgcgcgagaagtggctcatcaggcatctcgccgacgacggtaccgagctgttcacattgacctcacacaccaaagacgcactcgactttgtgcaccgcgcgtccggcgcccacccactggtgtccagcacccggatgcgcacgctcattgacacactagaccggttcgcacatgaagcccaaccggaccgtgaccaacgcatcgcacgaatagatcacgacatcgcacaattgtcccgcgaacgcgatgaactggctgcgggagcacccatgcccaccatgtccgtgcagcgcatggtggaaaacctcgacaatgtgcgtcacttggtccgggaacttcccgccgacttcgcgcgggtcgccgaatccatgaaagatctccaacgccacatcctcacccagctcagagccggagaccgccgggctggtgacgttctcgacgactaccttgaccaagcacaacacctcctgaccgccaccccagaaggccgcgcgttcactggtgctctcgacattttgcgtgatgacgccaccgtggctgcactcaaccatgccatccacaccatcgtgtcctcaccagcaggtcaatcgttacctttcgctgagaaagaagcactccggtccatcgtgtcctcaatcgttgactctgtggacgttgtgctcagtgaacaacaacgagcgtcacgatcactgaccacacacctacgtcactacaacccagctcatgaccgggaaatcgacgacgcactagaacacgccctgagcgctctgaccaggtggttccccagcacgtcgcgaggagaacgagtgccagccctgccaaggttccgtcgcgcgcacatcggtaagctccgcaccaccgtgcctgacatccgtccggcacaggggccacctgccctcgtcgatgatggtgaagtggcagccgaactggaccgcggttatgcgcgggcaatgggcggaccgcaccacaaggacatccggcaggttcttgaagccgcaccccgccacggatacacgacgctggcagaggtattccagcacgcaccaacggaactgcaacgaccagtggacgtgctgggttttcaggaaatcatgatgaacgacgcagcacctgacctcgatgaggatcacctcgccaccactcagcgccagtccagcaaggacaccgcgccacctgccgatcatgggaagaccgtcagggaagagcacctgccctgggatactgtgaccgcggtgcgccccgacggaaccacccgcacctttctggtgccgcgtatggcacttcccaccgcatcgcaacccaccgaaggaggcacgcaatga

SEQ ID NO: 41960 - DNA, 690 bp, Jonesia denitrificans DSM 20603
atgacctcgtcatccgctgacgcttttgtgacggtcccgccagccgaagaaacccctgaggtgtgtttcgatcacgaccgcggtgtccttgaaccgcacgtccggcgcgcactcgccctcattatgcaacgccgtttcattgcccggtccgcccacccaacagagtgggcaacgatcctggaggaagaagcggtactccagtcacgtctcaatgacatgttcctcacgctcgtcatcgaccgcaactatgaggtcatctacaaagagcaggttcggttggacggcattcacgttccgatcttgttgcgtgacgaaccctaccgccgggttgaagcagtcctgttggtgcaagcgcgggcgctgcggcgacgcgcaactcttgaaggttcgacgaccgctgttgttgatagtgaagatctggttgatctggtgcagtcattctttgacacatcggacacgaaccttgccgggcagcagaacgaaatcaaggcaggtatcgctcagctgacccgcgaaggtgtgttttctgaggtgggtagcggccgacttgtggtgtcaccagtggttgacatcatcgttccggtggagcggttgcgggagttgagtcagtggtgtgagcaggacagcatccatggcaccgtggacgctgaggatgacgagcacgaagagggacaagatgacgttcactga

SEQ ID NO: 41961 - DNA, 3456 bp, Jonesia denitrificans DSM 20603
atgacgttcactgagtcgttgtttgggctcattccggcctcctcgacggggcagcagtgggttgcggaatcgatgcagttggtgaactggggtgggtaccacgggtatcacacggttcccttccaccctgatgggaccttgttatcgggggcgtcagggtcggggaagtctacgcttcttgatgcctacattgcgttgatgatgccccacaccactccgtttaatggcgcctccaatgcggcgttgacgggtcgtgcacggggcagtgagcagcgcaatattttgtcgtatgtgcgtggtaaaactgatgatcgaccccagggcgccaacggtgttgttgaggcgttactgcgtggtagtgacggtgacacgtggtcggctatcgccatgacgtggcgtgaccaggcgggcgcgcttgtgacggccatgcgggtgttttatgtcccacgtggtgcgaaacggaacgacgagtgtgtgtttcaccgggttgtgagcgaaggaaaatatgatgtgcggcgcttggagccttttgcggctgcgcgttttccccgtcgtgtcttgacgcgcgccgaagggctcaccttttttgattcggatgcagcgttcttcactcgccttcatgacacgttaggaattggtgctgccggtggcggcgcgaaagcgatgcaactgttggcgcgcatccaggcggggcaccacatttctacggttgatgcgctctataagcaacttgtgttagaggaccctgcgacctttgagacggcagcgaaggcagtttctcatgtggatgaactctctgcggtccgtgaggaactgctcagtgcagagcagcaggttcagcatttgttaccgatccgtgagttgcacgagcgtcgaactcgagcgcagtcaactgttgatgaactggacgcgttgggtgttattggtggggtgcaaccagggtctgctgtgtcgcagtggcgtgaccagcgggcgcttgctgttctgaacgatgcgcttcgactgaaccgggcgacctaccggtcacttcgcgaccagcgggctgcgacgcaggcccggttgggggcgttagaggagcaccgtgacgttgtgcgggcggcgttgactcgtgagggtggtgagcaggttgcggatttgcgccgggatgtgcggttgttgcgtgaccggtttgagtcggttactgcggtgcgtgccgcactagatgaccatgcccggatggtgggtgttgaggtgcacgatgaacggtcgtttgaggcagcgcagcgcatgtcgcgggcatttgttgaggatgtgccgcgggcggagaagaaggcgcgacaggaccattacgaggcgttggccaggcgtgatggtctggtaaagaaacggcaggtactcgttgatcaggtggcgtcattgggggctcggcggggaaacattcccgaggacctgcaccatgcgcgtgacttgttagccaaggcgtgtgggtggacaccggcggacttgccttttgttggtgaactgttagaagtaaaagctcagtacgaaccgtggcgcaccgcgatatcgcaggcgttgggtggttttgctgtgacgctcgtcgttgctcaggatcagttgccgcagtttcgggcagcgatcaaccgggtgcagttgccacggcgagtgcattttgagggagttcccaccttttctgaaccggtggtgtgtgacgattcacgggtgatcccgggcaggcttgaggttctgggtggtccctttgctggatggcttcaggggcgactcatgcagtcatttgctgccgtgtgtgtcgatgacccaaaggagttgggtgaacacccttttgcggtgacaatcacagggcaactcagtcaggggcggcgggggagtcatggcggtacgtcccggtcggtgttggggttttccaatgacgatgcggtggcacgagctcgggaacagattgcggcccttgacaacgagattgctcagaccacgcgcgttcttgaggtcatggaccgtgagcagggggcgtggcgcgatgtggtgcgagctcacgaggtgatcgctgctgctgtgtggcctgatattgatgtggacggtgcacgtaagacgttgactgagcgcgagcagcacatcgagagtctgaccagtggtcacagtgttgttgccgagttgtccgctgaggagcgtcggttggtgacgcaaaccaatgaggtgcgcacacagatcgcgacaatgtcagcgcagatggggtccctagatgatgagtatgcggagcttgtagacgcagatgacgaggcgaaaactcgactgggggagaacccaggcgacattgatcatcggttagtgacaatccttgaggaccgcttaggcaaccgtgccctcgacagtgtggccgaccttgaccgggtggttggggagttggtgcgtgagttcactgcggaacgcgaacacgcgcacactgaggttgatcgggccaatggtgaactgcggcgattattcgacacttatgtgagtcgttggccgcacccggacctgtccactgatccagtgcgtgcctacaacgactatgaggcgatcttggctgaccttgagcatcaacgcctccatgagttacgaggtaaatgggaccgcactctcacgttgttgtctggacatgaactgacgacgctcaacgcccagatggctcggtctcttgacgatatccgtcgccgtatggaaccagtgaacgacattttgtggtcggttccgtttcatgatgaggggcaccggctgcggattgttgcgcgtgtgcgggaggggaacgatgtgaagcgtttccgcagtgaactcagtgcgttggcgcgcgagttaggtgaccacgacactcatcaggacccggttgctcgtgagtcacggttccaacggatgcgcgcgttgttggagcgggtacgccccacatccgcggagcggaaccgactcattgatgtgcgtgaacacgtgcgagttgaggctgtgaaagtggacatacaaggaactgaggtgtccatttatgatcatattgccgggaaatctggtggtgagtcgcaggaacttgtggcgttcattgttggtgctgcgttgcgttaccagttgggtgatgctgacgcggtgcgaccacggtatgcaccggtgtttcttgacgaggcattcatcaaagcagattcccggttcgctggacgtgcggtgagcgcgtggaaggggctgggcttccagctagttattggtgctcccctcgataaggtgtcagcgttggaaccgcatgttccgttgctgatccacactgtcaaagacgctcgcggtatcacccgtgtgaactggtcgttggctgctgatggtgcgttgagtgtctcggactttaccgtccctgcttctgctgagagggagggtgtgagcgagacacctgacttacgcgtgacaggtgagtcactgtttccagcgaatgaccacagccgttga

SEQ ID NO: 41962 - DNA, 1458 bp, Candidatus Accumulibacter phosphatis clade IIA str. UW-1
atgaccctcgactacgccaccctcgaactgctccgccagagccatccggcgtggcgcctgttgcgctcggagcacgcgccgctggtggcgagcttcctgcaacgggtgttcatcgttccgaatgtccgggtgatcacgcaggccgatctggccgaggcgctcgaggacgaactgttcgtcctgcgcgaccggcttggtgcccaagcgtttccaaaatcggcgctcgattacctcaacgactgggcggccaacgacaagggctggctgcgcaagttctacgcgcaagcttcggacgagccgcatttcgacctgatgccggcgaccgagaaggcgatcgcctggctggggacgctcgcggaacgcagcttcgtcggtaccgagtcgcgcctgttgacgcttttcgaactcctcaagcagatgagcgagggcagcgaaaccgaccccgaggcgcgcatcgccgagctgcaccggcggcgcgacgagatcgatgccgagatcgcgcgcgtgttgtcgggtgacctgccgctgctcgacgactcggcgctgcgcgatcgctttcagcagttcgtcgccatggcgcgcgaactgctcgccgacttccgcgaggtcgagcacaatttccgccggctcgaccggcgcgtgcgcgagcgcatcgccctttgggaaggtgccaagggcgccctgctcgaagaaatcatgggcgaacgcgatgcgatttccgactccgaccagggcaagagcttccgcgccttctgggacttcctgatgtcgagccgccggcaggacgagctgacagcgctgctcgagcgggtgctgacgctgccggcagtggccgaactacgacccgatgcgcgcacccggcgcgtgcattacgactggctcgaagccggcgagcacacccagcgcacggtcgcgcaactctcgcagcagttgcggcgttttctcgacgatcaggcgtggctcgaaaatcggcgcatcatggacatcctgcacggtatcgaggcgaaggcactggccttgcgcgagacgccgccggcgggtgaggtgatgagcattgccgataccgccgccgctatcgaactgccgatggagcggccgttgtattcgccgccgatcaagccgtcgatcgccgacctcgagctcgagtcggccgacgacgacgaggtcgacgccgccgtcctgttctcgcaggtagtcgtcgatcgcgcgcaactcgtccgccacatacggcaggccttgcaggagcgctcgcaggtgtccctgcgcgagctttgcgagacgcggccgctcgaacacggcctggccgagctggtcgcctacctgcatctggccggcgattccttcaagtcggtggtcgatgaaggcgtgaacgagttgatcgtctggagtgggacgacagcggatggtcagccctatgccaggcaggcgcggctgccgcgcgtgatcttcgtgcgctga

SEQ ID NO: 41963 - DNA, 606 bp, Candidatus Accumulibacter phosphatis clade IIA str. UW-1
atggccagccccgacctgtcggcgctggtgatcccgctgctcaagggcgtgatctatcaggaggccgacgccggccaatggaatgcgctgctgacgctgcaggcgcgcgtgcgcgactatgtcgcggtgctcgacctcgaactggtcctcgatgaggccgaaggctatgctttcctgcgcgcgcggccggaacccgaggagggcgcggcgacccggctgccgcggctggtagccaggcgcccgctgtcgtttccggtgagcctgttgctggcgctcctgcggaagaaactggccgagttcgacgccagcggcggcgacacccgcctggttctggcgcgcgacgaggtcgccgagctgatgcgcgtcttcctgcgcgaaggcagcaatgaggcccggctgatcgatcagatcgacttctacctcggcaaggtcgtcgaactgggtttcctgcgccgcctgaaggtcgagcacggccagccgccgatggtcgaggtgcggcgaatcctcaaggccttcgtcgacgcgcagtggctggccgagttcgaccagcggctggcggcctaccgctcgctgttgccgggacgccaggaagcagccgatgaatga

SEQ ID NO: 41964 - DNA, 3369 bp, Candidatus Accumulibacter phosphatis clade IIA str. UW-1
atgaatgatccgcagagcctcggtctcgacttcgtcgccgacgatacgctctccggcttccggctgcagcgcctcgaagtgttcaactggggaaccttcgatggccgcgtctggacgctccatccggaaggcaagaatgcactgctgaccggcgacatcggctcgggcaagtcgaccctggtcgatgcggtgacgacgctgctcgtgccggcgcaacgcatcgcctacaacaaggctgccggtgccgacagccgcgagcgcacgctgcgctcctacgtgcttggccactacaagtccgagcgcaacgagatcagcggcacggcgcggccggtggcactgcgcgaccacaacaactactcggtgatcctcggcgtcttccacaacgccggctacgaccagacggtcacgctggcgcaggtcttctggatcaaggatgcgcaagggcagccggcccgcttcttccttgccgccgaacgcgacctgtcgattgccggcgattttgcccatttcggcagcgacatcggcgcgctgcgcaagcggctgcggcgaccgggcaatgatctcttcgacagctttccgccgtacggcgcctggttccggcggcgcttcggcatcgacaacgagcaggcgctcgacctcttccaccagacggtgtcgatgaagtcggtcggcaacctcaccgacttcgtgcgtagccacatgctcgagcctttcgacgtggcgccgcgcatcaccgcgctgatcggccacttcgacgacctcaaccgcgcccacgaggcggtattgaaggccaagcgccaggtagccatgctcacgccgctggtggccgacggcgagcggcatgcggcggtggtcgctcaggtcgaggaactgcgcgcctgccgggaagcgctcaagccctatttcgcgggtctcaaggtcggcctgctcgacaagcggctcgccggattggcggaggagtggcggcggcaggacgcgcaactccggcgccacgccgatcagcgtgacgcgcagcgcgtcgaggaggcggagcttcgccgccacatcgccgagaacggcggcgatcggctggagcgcctggcggccgagatccgccggttggaaaacgagcgccaggtgcgtgcgcgccgggcgcagcggcgtgccgatctgctgcacgccatcggcgaggaggcggccgaggacgaggccgctttcctcgaccagcgacagcgcctggcggcgctcgccgaaacggcgcgcggacgcgaagccagcctgcagaacgacctcaccgaactgggcgtcagcctgcgccagggcaagcaggaacacgccgagctgtcggccgagatcagcagcctgaaggccaggcgcagcaatattccggccgagcagattctgatgcgctcggccctcgccaaggccctgtcgctgcccgaagagcggatgccctttgccggcgaactgctgcaggtgcgcgacgaagagcgcgactgggagggcgctgccgaacgtctgctgcgcaacttcggcctgtcgctgctggttcccgatgacgattacgcgaaggtcgccgagtgggtcgacaagacccagctccgcggccgcctggtgtacttccgggtgcggcacagtgcgcgcaacgagatggccagtctgcaccgggattcgctggtccgcaaactggccgtcaagcccgactcggcctgctacgactggctcgaacgcgagctgtcgcaccgtttcgacgtcgcctgctgcgcgacgcaggagcagttccggcgcgagacgcgggcgatcacgcgtgctggccagatcaaggcccccggcgaacggcacgagaaggacgaccgccatcggctcgacgaccgcagtcgctacgtcctggggtggaccaatgcggcgaagatcgacgccctcgaagccaaggcgcgggccctcgagctacggctggccgagctgggcggccgcatcggcaagatccttgccgagcagaatgcgctcaaggaacggctgacggcactgtcgaagctcgacgagtacggcgacttccaggaactcgactggcagtcgctggccagcgaggtggccaagctggcggaggaaaagcgactcctcgaagcgacctccgacgtgctgcagaacctcgccgttcgcctgacccgcctgcaggctgacctcgcccagaccgaggcggcgcttgccgagaagacccgcgacctcggcgcgacgcaggccaggcgcgaggccgccgaggctttgcgtcagcaaacgctggcgctggtcagcgaggcggcgcaggataccgcacatttcgtccgactcggggagatgcgcgccgaggcactcggtgagcatcaactgaccgtcgagtcgtgcgagaaccgcgagcgcgagatgcgcgactggttccagaagcggatcgatgcctgcgacgacaagttgcggacgctgcgcgaccggatcatcgacgcgatgcgcgcctattgcctcgtctttccgcttgacgcccaggaagtcgacgtcgccatcgcggcgatcggcgagtaccgggcgatgctcgacaagctgcaggccgacgacctgccgcgcttcgaagtgcgtttcaaggagttgctcaacgagaacaccatccgcgaggtggccaacttcaacgcgcaactggcgatgtggcgcgaaacgatccgcgagcgcatcggccgcatcaacggctcgcttacccagatcgactacaaccccggccgctacatcgctctcgaagcgcaggcgacgccggacgccgacatccgcgatttccagggcgagttgcgcgcgtgcaccgaaggcgcgatgaccggttcggaagacgcgcaatactcggaagcgaagttcctgcaggtgcgccggatcatcgaacggctgcgtggccgcgagggactctccgagcaggaccgccgctggacggccaaggtcaccgacgtccgctactggttcgtcttcgctgccagcgagcgctggcgcgaggacgacagcgagcacgagcactactccgactcgggcggcaagtcgggcggtcagaaggagaagctggcctacaccatcctggcggccagtctggcgtatcagttcggcctcgaatggggcgccgtgcgttcgcgttccttccgcttcgtcgtcatcgacgaggctttcgggcgtggctcggacgagtcggcgcagtacgggctgcggctgttcgcccagctcaacctgcaattgctgatcgtcacccccttgcagaaaatccacatcatcgaacccttcgtcgccagcgtcggcttcgttcataacgaggaaggccgcacctcgaagctgcgcaatctgtcgatcgaggagtaccacgccgagaaggcgcgggcagccggatga

SEQ ID NO: 41965 - DNA, 1176 bp, Candidatus Accumulibacter phosphatis clade IIA str. UW-1
atgagctggacccggcctgccggcctgcgcgcccaggtgcaaaggctgtgggatcgcggagaattgctggccagcgtggtgaccggcgagtcgctcttccctcgccgcctgctgctcaaggggccgacctcggccgagatgagcgagcgtttcaacgaactgcgtgcgtggatcggcgaactgcaggcgatggcgcactgccgggtcgagttgcgcgagttcaggcatcgcctgttcggcaccaatgccgtgccgcaggaagcctgggtcgacagcctcgacgacgctctggcactgatcggcaagcggcgcgacgccagtcgcttcggggcgctgctcgatctgacgcgcctgcgccagccggcattgctcgactggctggcgagacggccgctgcgcgcgctggaacttgccgacgcctggggtcggctgctcgacatcgttgcctgggtgcacgcgcatccgcggcccggcgtgtacctgcggcaggtggacgtccccggcgtgcacagcaagttcatcgaggcgcatcgcggcgtcctcggcgagttgctcgatctcgtcctgccggccgaggccgttgtcctttcggctgcgggagcgagccagtttgcccgacgctacggctttcgggaaaagccggcgcgcctccgtttccgcattctcgaccgcgagcacgccttgttgcccggcgatcccgaacaggacctcacgctcgatgcgcgcagctttgcccgcctcgatcccggcgtgtcacgcgtcttcatcaccgagaacgaggtcaatttcctggctttccccgaggtcaccgacagtctgatcattttcggcgccggctacggtttcgagctgctcagcgaagcgcgctggctgtcgcgctgccgcctccattactggggtgacatcgatacgcacggcttcgcgattctcgaccagttgcgcgcgcagttcgagcatgtcgattccttcctgatggatcgcgcgaccttgctggccttcgagtcgctgtggggcgaggaggacaagcagacgctgcgcgacctgccgcggctctcgccaacggagagcgccctctacgacgacctgcgcgacaaccgcctgcgcaggaacctgcgcctggagcaggagagggtgggcttcgcctgggtcaaggcggcgctggcggcgttaccatga

SEQ ID NO: 41966 - DNA, 1479 bp, Eggerthella lenta DSM 2243
atggcagtcgtatccagcacgcttgctttcatatctctacagcaggacaacgttgcctggaagcttcttcatgcacaaaacgcgcctatcatcctctccatactcgacgagaatttggggaaagagaccggcaaaagaaccgttgccgatctagtcagccttgtcgatgcggatctcgaagtgctacgcgagcgggttcccgagatagggccaaagcgctcggcgcgggactattgcgagcagtggagacgcgacggataccttgtgcgcaagccgctcgcggattcgcgccaggagacctacgagctttccgcaggcgctttggcagccatcagcttcgccaaagggttggcgaagccccatagggcagcgacgaaatcgaggctgaacatgatcctcgaccagatagcggaatcgtcgctcgcaaccgactgcgacatcgaccggcgccgcaaagtcctcctggccgagaagcagcgtatagaagaccagcttgcggaactcgatcaaggcaccttggacacgatggatcccgatcaggcattggagcaagcgcgcgacatcctcaatctcgctcaggagataccgcgcgacttcgtcagcgtcagcgccgagttcgaggagatcgcgaaaaacctgtacatcaaacttatcggctatgaagaaggctatcaagacacgctcgaaggcgtgttcgccggcatcgaccatatcacgcagtctcctcctggccagtcgttcgggggcttctatgcgcttttgcgcgactcagaggcgctcgagaaacttcaagacgacatcgactccatcctcgacaccgatttcgcgtgcatgctcgaagcggaagagcgccgattcctcagaagattcgtgcaaacactgctcgatcaagcgcgcgacgtgaacgagaccaaaacagggttgtcgcgcggtttgaggaagcttgtgcagagccagagttttcagcaagaccgcgtgctgcgaagatttctcgaccagaccctcggcatggcaagcgtgctcacggaatcgtatagctgcaccttcgctcttccgatcgagctcgagctcaccaaaaccatgatcgcgcccatctcccgattggagctgtacaaccctgccgacgcaagcgcacagcccattcccgcgagcgcgttcgaagagaacggcaggctcacgttggccgagctgtacgagcaggtacgcgaggttgaaatcgattacgacgagctggtcggcaacgtgaatgcgttcttcgcggagcgcgacgcctccaattcaaagcatccctcgatcggcgagatcctggataagtatcccgcgactcaaggtatcgcaagcatcgcagggctcatggtgctcgcctccgatcagggcatcaggaccaatgaatcggaaatcattcgctggcagtcgaaaagcgggagacaccttcaagcccgcgtcgacacattcctgttcgtgaaagaggtgcgctga

SEQ ID NO: 41967 - DNA, 684 bp, Eggerthella lenta DSM 2243
atggacgacttctggaatccttcgcctgacaccgtggagaggtgcgacgaggatcggcctcttgacgagaggcacttgtggccacaggacacgggaaagcttccctatgatgcgcgatgcgcgttgctgcagctgatcaagggaccgcacatcgacgaaagcgacccgctatggtcggccgtcttgaacaaccagcaggatctgtcctcgcaccttgccgacatgcttcttgaactctacgtggacgcagagaccggaatcgctttcgcgcgtaacgcctcgacaggcgagagaacggtgctgaaggcaacgcgaagcaacgtgatgactctgctcgacaccatcatggtgctcacgttgcgcaaagagctgcagatgggcggcaccaaccgagtattcatcgggcaaagcgagcttttcgagcaattggctcagtatcgacgcttggaaagtcaagatcagtcgagctaccaaagcaagctgaaagcatcgtggaacaggctcgtggaagctcgcatactgttgaagagcgacatcgaagaccgtttcgaaatatctccggtcctcaagttgatattcggaaccgaagaagcggcggcagtcagcgaggaattcgagctcatgctcaaacgagcgcagcaagccgttccgaaccaaggagagccccatgacgacgaccgttaa

SEQ ID NO: 41968 - DNA, 3411 bp, Eggerthella lenta DSM 2243
atgacgacgaccgttaacaccgctggaagcgtgccgtacccaggacaatggcgtcttgctcgggtggacatggcgaattgggggacgttcaacggttttcagagccttcccgtcgacaggcgcggactgcttatcaccggcccttcgggttctggcaagtcgaccgtcctcgatgctgtggcggcagtactgacgcccccgacccagttgagcctaaatgcagcggccagcaacggcggccagcgagataagggccgttcgatttccaactacgtgcgcggcgcgtgcgggcacagcgccgacgaagagggcgaggtcgtgcacacctatcttcgtccgaaagccgcggtatggagcggcgtcatgcttcgatacgaggacggtttcgacatcgagcagtgctccccttcggaagcgcgtcgtcacgaggcgatcaacgtgctgggcatcttcttccaaaaggccaacacggtcaaccccgaaggactgaagaaattcttcgcagtcgtccgcggagaccatgcgctcagcgaattcgagccttacggcttgaacgaagcggacatggctcaattcaacaaggatcacaaagagacgggacgggcatggagagaccatgcggcgttcgaaggatacctatgcaatattttgcacatcagcagcccgaaaacactcaccctcctgcacaagacgcaagccgccaaaaacatcggatcgctcgatgatctgttccgcaagtacatgctggacacgccgcgtacgcacgccttggccactgcggcggtcgcccaattcaaggagctggaagaagcccacgacggcgtggtcgaccaacgtcggcagacggaatgcctggaaccgctcctgcgtcacgaagaggcatacgttgaggcgaagataacagaagaccagaaccggcaacttctcgacaaactcgcgtcgtttgccgacgatacctcgattacgctgctcaaacggcgcctcgaaaggcagctgcacgatgccgacgcactgaccacagcggtcaaagaagccgagagcgagcaagctttcgcaaagcagaagctcgaagcagccgaggccgtgctaaacgagcagggcggcatagcgctcgaagccgctctcatgcaggtttccgaccgagagcgccagctgctccatatcgaaggcaaccgcgattcgctcgagaaggatctcgagatggccatcgaatcccccttgccctccacgcgagaggaattcgaggctttgaagcgaacgctcgcagcatgcgcggacactgcgcgcgcatggctggacggccacgaagatgaaaagatagcgcgtttcggagaagtaagcgagcagaagaagcggcatgccgagatcgccggggagctccgttttctcaggggccaaaggagcaacatctcctcccggttgcacgatatcaggctgagcattgcccggcacctgggagtttcgacggaggatctgccctttatgggggaacttatcgatgtgaagcctgaagaggactcgtggcagcccgccatcgagcgagtcctgggcggtcgagcgcgcacgatgcttgtggaaaagcgtcacgcagcgtcgatcaacgagtatctcgagagcattcacctcggagaacgattcgagtacgacgcggtgcccgacgacgtatccgtcccagaccggccgctccacccgcagtcgcttgtgagaaaagttaccgtcgtgcaggtgccgagccacgagtctctctctcgatgggcgaacaagctcctgcgcgatcgcttcgactacgtgtgcgtcgattcccctgcagatatggagcgtcatgatcgcgcactcacgcggggaggccaaacgaaagccggggaacaccatgtcaaggacgaccgacgcaagataaccgatcgaagccgctgggtcctcggcagcacgaacgaccggaaaatcgagcgcttggaacaggaattgcgcctgtgctccgaaagcctcgccgtcgcaaccaatgcgacggccgagatcaccgccaaagagcaggaatgccaagccctatgccgcaccgagagaagcctgcgagacaagcattgggaagattacgacaacgcgcaggcagctttcgatctcgaacgcgcgcaagcattctacgacgaactcgctcaaagcgatgcgttcagagaggccgaatccaggcgcgcaactgcgcaggggcgtcttgacgaggcgaacaaggccgttcaaaaggcgctcgtcaaccagcagacaaacgaggagcgaatacaggacacgcgttcggacatcgccgaggtcgagagacgcataaacaagcgaaacccttctggcatcgcgatggacgacgaaacgagggcccagttcatcgatttgttttcgtcggcgaacgaccgattcgattcggacacgtccctcgtataccaaacgtcgaacgatgtccaaaggatattggatgctcgcgtggctaaagcagcgcgagcccaacaagatgcgcgaaggcgaaccgagttggtactgcaacaatacaagtcgacctggaaactcctagctgccgacttgagcgcgagtttcgaggacagagacgcctacatcggccgttaccgccagataagagcaagcgggctgccccaatacgagcgcaaattcctcgatgtgctgaacagcttcagccaagatcagataaccgcaatctcgtcggaaatccgcaacgcgtttcgcgaggtgcgcgaccgtctcgtgccggtcaaccgatcgctactcctgtcagaatttagttccggcatccatttgcagatcgaagtgaaggagcatcggagtctccgcgtgaacgaattccttgcagacctgaaagagatcacccggggatcatgggaggaagacgacctcgaggcggccgagcgtcgttacgcgcggacggcagccatcatgaaaaggctgggatcgaacgaccgatccgaccaaacatggcgcatggcgtgtttgaatacgcccgaccatatgaagttcatcgccaaggaggttgcgggcgacggtgccgtggtgaacgtccacagcaacgacggaggcctttcgggcggtcaaaagcagaagctcgtctttttctgccttgcggcagcattgcgctatcagctttccgacgaagaccagcccgtgccgtcgtacggcacgatcatcctcgatgaggctttcgacaaatccgatcggcatttcgcagaggaagccttggggatattcgaggcattcggcttccatatggttctggcaacgccgggcaagctcctgcagacggcggaagatcatatcggagccatggttatggtcacatgctccgacgataggcattcgcggttgtcttccgtcgtattcgaagctgatgacaggtggatggaggtcgtcgatggccgatag

SEQ ID NO: 41969 - DNA, 1242 bp, Eggerthella lenta DSM 2243
atggccgatagccctccctgcatggtatcagtgcccgaagccagtcaaaaggcagcgaggcgcttcgatagggactcccgctcttgggcggccctcctgtttcgacaggagatcggacagtgcgcagatggcgagccggtgcgctgctccatctctttgcaccctcctactgagcgtcgcgtcttgaacaatcccggtgccgctcgagcatgggcgcagtcgtggcgtgcgtgtccctggactgacgcgattctttgggaaaaacgcgagtggggaagcgcaggaccgcagacggttcccgttcggctcgttttggaagaccccgacgcaatagcgcgttgcgcgaaccgttccgagcaatggaacacgcttgtcctacgctcgaagcagttggccgatcgatggtcgaatcgatggtccgagatgtgcccggatgcgcaggccgatgtgctggttgctgcggttcaatcgagcgttgggaagtgttgcgagcttgaggagcgcgattggtccatagttctgggcgttctcgactggctcgtcggacaccccgatgcaaccccctacattcgccaactgccgatccggggcattgacacgaaatggatggagcgccaccgcgctgttgtcgatccgcttcatcgagccatgatcggacgcaatccatgtttttgcaagcaatctacccagttccggatgcgcgcgctcgacgttcgactggcattgggcggtttgacggaagtttccgtatcggctgcgcagttagatcgttgcacgcatcggccagatgtcgttatcgtatgcgagaatctggtaaacgtgctggccatgccttcgatagaaggagctttcgccattcatggaagcggttatgcggtaaaggatttccgagaagtgtcgtggtttgcatccaccccgattctctattggggcgacctggacagcaatgggttcgccatcctcaaccagttccgttgttattttgaccatgtcaactcggttatgatggatgaggcgacgctggatcggcactacgatctgtgcgtagaggagccaaaaccaaacacgggaacgcttagctatctgaaagaaagcgaacaagccgcgcttgccaggctgctggccggcgatgcaaatcaaggcttcggcgccatccgcctcgaacaggagcggatcgaatggccttgggcttgcaaccaactgcaaaaacatttattgccactcgataccgtccagcgataa

SEQ ID NO: 41970 - DNA, 1494 bp, Bifidobacterium dentium Bd1
atggagcggctacggcccgtgtacgagaccggcgtgctacgactcctgctacgcggcaattcgatgttgtacgtcgcattgctgcgttcctcgttcgatccgctcaccggcgaactgccacgcgatgtattggaggagcgtatctcacgcagcctgtcgcggctggccgaaaccggcgattatacggtgaaagacgaccagacggtaagacaggccgcgcatgcgatcctactcgaactgtcccgtgaaggcgatgatgactacgcctggctcgccaattcactggatgtcgcctcgcaccgttacctgtaccgtctgacggctcgcgcacatcgtgcgattgaagcgttgcatcgactggaagacaccacgcaggcgttatccggcgcgcaagccaacagcatcatcatggaaatcgaacacgcacgcatgcaactgaccgccgacccacgtgaacgcatcaaactgctcaggaaggacatcgaggaacgtcaaaaagagatcgacgagcttgaacgcaacgaaaccatcgaaagactgacttccgagcaggtcggcgacatcatcaacgtcatccacaacacgcttcggggcgtgccgatcgatctgcgtgaactggcgctcgccgaacgtgacaacggcgacgcgctgcgccggcgcatgcagtcgggtgccatgagtgtggaagacatccttaccgcctatcatgacgaataccgtaaatcgttccgtgaatccgacagcggcagacgcttcgaggacgccttccaggtgatcgtcaccgacgaaggacgtcaggaaatcgacgatgccgtacgtgacatcgccaaaaacccgtatctggacggtgagccgggcgcgctgctcggtcaggttcgtgccgaactcgaacgcatttattcgggcatcgaggatgtgcgcaggcagacccgcgcctccgatgaggcaatcagccgactcgtccgccagcagaccgacacccgctaccgtaccatgctggccacattgaaccagctgtttgccaaaaccaacgccgaagccaaggcgagtccgaacgccacggaccggccatatcacactgatacgggtctgtcacagattgcggtattgcctaccaagccggccaagaccatggtacggaacgccaccgcggcactgaatgacagcgctccaaccgtcggcctgcccgacctcaaggccatgatcgaagtgtgcggaccacgtctgcgccacatggtcgatctgattcatcgcaaccccgtcatgtcacatgacggcacgcgcgtggactttgcggcaagctttaaccgactgccggccagcgaacgccgagaaagcgaaatcatcggcttcctcagcgcgttacgcaccgaaaacgacatggcatgcgccacctggaactgcgtatcgctcgacggcacccccagaacatggcgaaccagaccgatactcgctaccgcacagacgcttgatgacatcatcagggaaggctga

SEQ ID NO: 41971 - DNA, 708 bp, Bifidobacterium dentium Bd1
atgacagacgaacacagcgaaaccgtcggcatcgaacggtctcttccaaccgtcgaacaacccgccctcttcgacggcgacaccggcgacatgaccgccgatgcccgcatggccgccatcgcgctgaaacgagaacgctacatttccggagaactgttcgacctggtcaaagacaacgtcgaagccgtcgaacgatccctgaacaacgacatgcttcgcctcgtatccaacgagaaataccacgtcatgtacgcggcacccgtcagcggcatcgaatcgaacatccgttcgttgaaaacccgtgcgagtctcagccgtgaggatgcggccatgctcgcattcctgcgcatccacgtactcgaatacgagaaccagaaaaccccggtggccgactggcaggtcagccgcgatgaaatccgtgccgcgctcgccacgggcgccggctatctcgcgggcggcaatgatgaggaaggcacgacgaagaagatcgccgccgccatctcccgtatgacgacctacgggtatctcgagccgaccgatgacgacgagatgcttgcgatcacgccgctggtaccgattgtgcttgaccggcagctggccgacgagtggctggacatgaccacgccgtccatgacgcacgataccgatgcgggaatgttggatcccatatccgaagaaaacgaaacgaccgacgaagaggagcgatga

SEQ ID NO: 41972 - DNA, 3510 bp, Bifidobacterium dentium Bd1
atgatggcgggagacgatatgaaaatcatcgccgatcgatggatgatggaaagccgacagatcgtcaactggggttcctatgacggctaccaggaattcaggccgtccatcgacgccgaatcgccagtcaccctcctggccggcgccagcgaatcaggcaaatccacgctcgtcgacgcgcagatttccctgctataccccaatggcacgccctataacaaggcgtccaatgcgggtcgatccgagcgcaacgattacacgtacctgcgcggcatgatcggcatcagtgacggtgataacggcgaaacgcagatcttcctgcgaggacgtgacgccaatggcacgccacaggccatatggggcgccatcgtcgacacatacgtgaaccgtaccaccggaagtacgctctcctgcggcaaattcctctacctgcccgccggagacggcaaagacgaggtgcgccgtcgctacattgcatggaatcgcaaaatagatccgcaaatcatggaccggtaccgtgatacgccattcacccccagcatgttcaagaaagcgtatccggattgcagcatattccccaatgccagcgcattccacgcatacatctggcaagagatgggcctcagcgccgaagcatgccgactcctgcacaaaatacaatccgctgacgccccgtcgcgactcgacgacatcttcaaacaaggcgtgctcgacgtgcccgaggcgctcagactcgcacaggacaccgtcgacgactacgatcggttcaacgccaacttccatagcatggaagacaaagccagacgcgtcgccaaactccaagacatccaaacccaatacgacgcatacgccaaacacctgacccaagtgcgtgaatacgaagccgtgaaccccgaaagccagcagggcctcgaaaccctgaccctatggatgcgttcgcgcatggccagcgaagtgcgagccggactgcccgccgccgaacgcaaggtgaagcagcaggaatgcgacctgcacgaggcacaggagcggatctccgatgtgaacaggcaacgcgaagccatcgtcgaacgcatcaaaggcattgacggcggaaccttgcaacggctgagcgatgacctggaacgcgcccgacgcgacatgcaggatgtgcgctcgcagcgtcaaagcatcgtcgagaaattcgagggcgtcgaaggtgcattgccatccgacgagacgtcctggaacgcgaaacgtgacgcattggcccgatccatggaaacgttcgacgaacgcatggggaatctggaatccaagcgggatcgtctgatcggcgagcgcaccgcagccagtcaggaatgtgcgcagttgcgccgggactatgatcgcaaacgcaggcagaggacccgcatcacccaggcgatggatgaggctcgtgcgctgatcgcgaaggcggtgggcctgagcccggacgaattgccgtatgcggcggagctgatggatgtgtgcgagagcgacgaacgttggcgcaccgccatgaacgtcacgtatgcgccgattgcgcagaccattcttgtcgacagccgccacgagcggggattcgcggcgaagatcagcgcgatcgatccggcgctgatgatccggcgcacctggcagttcgtggatgtggacaagagctatgattgcacccgcaatgacggttggatgtcgtcgaaattgcagtattgtgaggattcgccgtttgccggatggctgaaggaacagaccgcttcggcccgtttggacgcattgtgcgtggagactatcgacgatgccgcacacgaacgccgtcaggtgcaggctgatggtcagatcaagtccggcgtgcatggtttccatggcatcaaaggcatgaatccgatcatcggtttcgtcaatgaaggctatctgacggaattgaagaaacagcttgacgaagcgcatcatagattgtccgataccgaacgtcgctgcggcatggtgcgcaagagcatcgacctgatgcacgcggaaaagaatcttgcggatctggtcgcgaatatgacgtggaataaaatcgatgtggtcggtgcggaaacgcttgtcgagaatctgaaacggcgaatcgaacagattgaagacaatcctgaaatgacgcggcttgccgagcgacgcgaggaaatcgacaggctgcttgatgaagcgaatgcccgcttctaccacgccaaaagcgaaatgcaatcgacccaggcggcggtcgatgccgaacatgcgtggctggaagcatatgagggcatcgaatttgacgatgatgcgctatccggcgatgtatcgaacatgctggccgacgtatatgagggatgtttcggtggtgtggtccatgccgaggacagaccgaagctgatcgccggcgggaacgatgagatcggcgggcattcgttcgagacacgcgtcgggcacgccatggaacgcgccatgcgcgaacagaacgcggcattgggcaaacgtgcaggggagttgcgtaccgtcgtggaacagagtatggcctcctacttggagagatacgctcccgacgatgattccgcgacaggcggcgttgaggattacaggttctatcttgaggagctgcacagtctgcagatgctcgtcacgcgagaggcgaccgacgaagaatacgccaacagcctcgacaagctcaccaagaatttcctgcaactcaaccgtgcgctcaacaccgaccaggaaaacgtcaaggaccagctcgaacgcatcaacggcatgctcgccgggcagaaattcggcccgcgcggcggcaggctgtccatcgacgtggaattccgccccatcgaacgtgcattcgtctcatccttgaaggccacgctgaacaagctcgacgaatggttcaggaacgacaaggacgatcctgatgccacacgcaaggcattcacctcctgcgccacgttcatcgaacgtgttcgtcgggaactggaacaggtacgcgacgtgaacggcatcagaagctacggcgcacgcaacctcgacccgcgtgcacgaagcacgttctacgccatcgtgcatcatgacgacggtcctgacgagcgcatcagctccaccggcggcaaatccggcggcgccctgcaggaactgacatcgttcatctacggcgcggcgctcatctacctactcggcggcgacgtgaccggcagccccacctatacgacgctgttcctcgacgaggccctcatcaaggccgacggccgctacacgcaacgtgcgctcaacgtgctgcctcgtctcggcttccaagtcatcgtatccgcaccggaaagcaagaccgccgaaatcctcggcgtatccaccaaagcgtacgtggcctacaaggatccgtcggtaggccgttcgttcctgcaggagcttacctccgaagacatcgcccgtcaggaagccgagctccacgatgcaatcgacgacatgccggcggccccgaacgatatagggcccacaacggccacgattctcgaacaggtgttctaa

SEQ ID NO: 41973 - DNA, 1461 bp, Gordonia bronchialis DSM 43247
gtgcccgtgaactacgacgagatcgcctcgctgcgcaaatccagcgctgcctggcggctcctgcgcgccgacaacgcgccgctgatcttgtcgttcctgggccgcgtcttcgtcgaggacaacgtccgcgagatgtcgtcgtcgcagctcatcgccctgctcgacgacgagctctacgcgctcagcgagcgtctgggtgccgacacgcaccccaagtcggccaaggcctatctcgacgactggtcggccggggaggtcggctggctacgcaagtactacgtctccggcagcgacgaaccccactatgacgccactccggccgtcgagcgggccgtcggttgggtgaactcgctgcgtgagcgcagtttcgtcggcaccgaatcgcgcctcaacaccgtcttcgagctgctgcggcagatcgtctacggcaccgagaccgatcccgaggtgcgcctgaccgaactccgccgccgccgcgccgagatcgacgcggagatcgacgccgtcgaacggggcgactaccggctgctggatgccacgagccgcagtgatcgctatcagcagttcgccgacaccgcccgcgcattactgtccgacttccgcgaggtcgaggccaacttccgtgcgctcgaccgcgagacccgcgagcgcatcgccacctgggacggcaccaagggtgaattgctggacgagatcgtcggcacccgcaatctcatcagcgactccgaccagggccgcagcttccagggcttctatgatctgctgctgtccgcagaccggctcgacgaactcaccgaactcatcggacgtgtgcagtcgctcgacgacatcgccggcgccgacgaccggctcgggcacatccaccacgactggctcgatgcgggcagccgtgcacaggcgacggtgcgtcaactctccgaacaacttcggcgcttcctcgacgatcaggtatggctggagaaccgtcgcgtgatggacctgctccgcaacatcgagacctccgcgatcgcgctgcgcgatgagcgaacggccggcttcacccacgagatcgacgctctcacaccggcgatcacacttccgctggaacgaccgctgtaccgcaaaccggcggccgcgtcggtcgacagcgagggaatccaggccggtcatgccgacagctcgtccgatgctctcttcgagcaaatgcacgtcgacccgcagcccctcatcgatggtgtgcgacaccgccttcgtcgtcaatcgcaggtgacactggccgagatgatcgatgcggagccgctgcgccaagggctcgccgaactcgtcacctacctgtcactctccgacgacgccttcgcgaaactctttgacgagaccgcaaccgacgccatcacctggaccgacgacaacgggaccgaacgcaccgcacgcatcccacgtgtcatctacacgcgcgctagtcccggaaggcaacgagtatga

SEQ ID NO: 41974 - DNA, 597 bp, Gordonia bronchialis DSM 43247
atgagccgcaacgtagctcgcgacgaactcaacctgtcgctcgccgtcaccaccctcatgaagggtgtcgtgtaccgcgactcgcacgaggtgatctggcagcacctcaccggattggcggcgcaggtcagcgattacgtcgccaccctgggtctcaccgtcgagatcaacgaggccgaagggtacgcctatcttcgatcgcgccccgacgacgaactcgaggaacgcggcatcccgcgcctggttccgcgccaccagttgtcgctgcacaccagcctgttgctggcacttctccgaaaacgcctcgccgaattcgacagcagcgactccggcacccggctcgtgctgagcgggcaacagatcgtcgagatgatgacgccattcctgccgcaaaccaccaacgaggcgcgcgccgccgatcaggtggagacggcgttgcgccgcgtcgtcgaacagggactggtacgtcgaatccccaagcaggaaaaccaattcgaggtccgacgcgtgatcaaggcattcgtcgacgcccagtggctgtccgacctcgactcccatctgtccgaatacgccgagctactcgccggggaccgctga

SEQ ID NO: 41975 - DNA, 3393 bp, Gordonia bronchialis DSM 43247
atgaccgcattgttctccaccaccgacctccacgactccgacgccctcaccggctttcggctacaccgctttcaggtgctcaattggggcaccttcgacggtcgcgtgtggacgctgtcgctggacggccgcaacggcctgctcaccggcgacatcggttcgggtaaatccactctcgtcgacgcgctgaccacattgctcctgcccgccaatcgcgtcgcctacaacaaggccgccggcgccgacatccgcgagcgtgacctgcgctcgtatgtgctgggctactacaagtccgaacgcaacgaggtgaccgggagttcgcggccggtcgcgttgcgcgggacgtcgagctactcggtcatcctcggcgtcttcgtcaacgagggattcgacgaggaggtcaccctcgcgcaagtgttctccatgcgccacgataacggccagccggaacgcttcttcaccgtcgctgaccgtgccctcgacatcaccgccgacttcaccgacttcggtccggagctcaaggcattgcgcaagcgcctgcgccagaacgggacacgtatccacgaccacttcccggagtacgggcgcgattaccgtcgtgccctggccatcaaatccgagcaggcgatggaactattccatcagacggtgtcgatgaaagccgtcggcaacctcaacagctttgtgcgcgagcacatgctggagtcctttgactccagctcgtgggtcgacacgctcgtcacccacttccaggatctgacggccgcgcacgatgcggtggtgctggcccgcacccagctcgccgagctcgaacccctgctcgccgaccacgatcgatacgccgaacacaccgcgaaggtcgacgaattacgttcgcgccgtgacgcattgcgtttctacttcgcgcaacgacgcgaatcattgctcgaagccgagatctccggccacgaggcggcattgggtgccgcgcactccgacctcgacgaggttgatgcgtcgcttaccgtgttgcgcacccgcctcgacgaactccgattggagcaggcgggactcggcggcaacgagatcgccaccctcgagcagcggatcaccgaagccgggcagcagcgtgacgaacgacaacgccaatacgaccggttcagcggcttcctcaccgacgccgacctgccgaccgtcaccgaccgtgcccagttcgatcagcgtgtccgcgacatcgagggcctcacaaccgaactcgacaccgaggtcaccgagcgccgcaacgcggtcaccgagctgtcggtcgaccgccggcagctcgacgtcgacggccgcaagctcgccgaggaaatcgccagtctccgcggccgcacctccaacatccccgaccgcaatctccgcatccggcaaatgatttgcgaaggcaccggcatcgccgccgaggacctgcccttcgtgggtgagctgatcggcatccgcgacgacgaaacccgttgggaaggtgcggccgaacgtgtactgcgcggtttcggtctctcgctgctggtgtcgggtgactgctacgaccccgtctcgcagtggatcaacgacaatcatctcggtggccgcgtcgtctacttcaaggtgccgccccggacgtcgatgcaaggggtgaccacgccaccgcctcccgcgctcgcccacaaactcgatatcaaggacggcccgttctacgactggctcgaacgcaagctctacgaacgcgcccggcacgtctgcgctgagaccttggacgagttccgtcgggaggagttcgcggtcaccacggccggccagatccgttccggcggtgggcgtcacgagaaggacgactcgcatcgcgtcgacgatcgacgcaattacgtcctcggctggcgtaacgaacagaagatcgctgcgctgctggccgagggacagcgaatccagaacgacctcaaccggatcgacggccagatcgacgaacacacccgccggctcggtgtgctgcaacgtcgacgcgcggcgctggacaagctgaccgtcttcacgtccttcgacatggtggactggatgtcggtcgcgacccgggtcgccgatctgcagaggcgaaaggccgaactcgaacaatcctcacacgagctggcgcgggtcaccgccgagatcgagcgcactgtcacacacatcgacgaatccggcgtccgccgtgacgaattgcgcgacacgatcgcccgtctcaccgtcgcacgtgacgacgccgtcgacgcacgcaccgcggccgccgcgattctcgcggatgatgggttcgccgacgcgaccgtgcatttcgctggcatcgacgccggcttggacccgacaaccacactctccctgcagaactgcgccgccatcgaatccacattgtcgtcgaagctgacgtccgaggccgaacaacatcaaggtcgggcgtcgaatctggccacgcgggtggtcaaccagatgtcggtgttcaaacgcaaccatccggtgctgaccaccgagatggatgccgacatcgcggccgccggcgaattccggtcgctgcaacagcgtctcgccgacgacgatctaccgcggttcgaagccgagttcaagaactacctgaacaccaacgcgatccgcgacatcgcgatcttctccgcccagctcggcaagaaggtccagcagatccacgacaagatcgacaccatcaacgactccctcgccggcatcgaatacaacccgggccgttacatccgactcgaggccaccctctcacccaacgccgagatccgcgagttccgcgacgagctgcgtcgctgcagcgacggttccttcgacgccgacgccgacgatcactacgccgaagagaagttcctcctggtcaagtcgctggtggaacggttccgcgggcgtgagggctacaccgacatcgaccgcaaatggaccgccttcgtcaccgacgtccgcaactgggtgacgttcgcggcgtcggaacgcaccgtcgccgacgacaccgagttcgagaactacaccgactccgacggcaaatccggcggacagaaggagaagctcgcctacaccattctcgccgcgtcactggcttatcagttcgatctgaaatggggtgtgcacacctcccgcgacttccggttcgtcgtcatcgacgaggccttcggccgtggttctgacgaatccgcccggtacgccctctcgctgttcaaacgactcggactgcagttactgatcgtgacgccgttgaccaagatctacaccatcgagccgttcgtgtcggcggtcggttacgtcgaaaatcgttccggcgcacaatcacaactccaatgtctgtccatcgaggagtaccgggagcgcaaacgggtgcgcgacatgatcagcatggtcgacgaatccggcaccggctga

SEQ ID NO: 41976 - DNA, 1185 bp, Gordonia bronchialis DSM 43247
atgacgtctgccaccgggccggcctggacagcgccgaccgacgtactcacgcgactccgtcgacggtgggaccggggcgactaccttcgtgcccgtgccctcggcgaaccgttcacccccatcgacatggccatccgcggcccacggccaggtgagctcggtgaacgctacgacgaggtcgccgcgtgggctcgcgcctggcatgacaccgcccgctcaccacacctacgcgtgaccatgaaaagcgtgggcggcaagaagttcggggtgacgacgctgcctgaccgcgtgatcatcgagaccatcgaccatctcgcccggctcctcggaaccacggcccagatcagccgacatgatgagatgctggccgcggtgtccgatcaatcgaaggtacgggactgggtcgcaaccaaacccggacgcgcactcgcccaccacgacgactggccgtcaatcgtggccgcgctgcgctggctcgccaccaacgccggaagtggccggcgcctgcgggagatcgacgaacctggcgtcgacaccaagttcatcgaaacccaccagcgcatcctgctcgaactcggtgcactcgtcgtcgagccggatctcgtaacgccgtccgcgaagtctatcgccggccgcttcggtttcgccaccgggcacctgcgggttcgtttccgcctgctcgatcagcaatgccgcaccccgacaccgggtttcgacgacatcgaagtccgtgccgacgacctggcgcgttcccctatcgacgtcgagaaggtcatcgtcgtggagaacctcgccacctatctgtcgttccccgcgacaccccgatcggccctgatcttcggcggcggctacgccgcatcagtcatcggttcactgcggtggctgcgcgaacgtgaggtcctgtactggggtgacctcgacacccacgggttcgcgatcctcgaccgcgtccgcgtcaccgtgccgcacgcccgctcgatcctgatggatcgcgtgacgctgctcgcgcaccgggaacgctgggtcaccgaacccgcgccggtggaccgtcggctcccgaacctcaccgacgacgaggcgtcggtgtatcgcgatctggtggaagacgcgttcggtccgtcggttcgactagagcaagagcgaatcccgatggctgtggtggagcttgtcaagatgtttgtgtaa

SEQ ID NO: 41977 - DNA, 1536 bp, Gordonia bronchialis DSM 43247
atgaggagttcggtgcagaacggtctggggcagaacggtctggggcacaacggtctggggcacaacggtctgggagacgccgccgtcggccgctcgtcgctcgccgacgcgtgggaggccaaccgggcaatccaccggtcggccgcggtacgactgttcgccgccgccaactcggcgctctacgtcaccctgatggaacagcacctcgacttcggcgtgcgactccccgagacggatctcgccgtccggctcgaacgcgacatcgccgaactcggcgccgccgaagaaccgaacggtctcgagttgatcaagttgtgggccaaacagggctggctgcaccgggtcaccgactccgcgggagatgcggctcccaacatctgctacctgacctccgatgcccgatccgtcctggactacgttcgtcggcagcgccgcgaggacagcgttgcgaccggcggatcgatcaacggtgtcgcggccgggttgcggcgagtggccgggcaggtgaccaacgatcccgagcagatccgcgaggagatcacccagcagctcaccgaactcgacgccgaactcgccgatctcgacgccggtcgtcgacctgccccggatctgcggaccgccgaggacgaggcccgcgcgatcgcctaccagatggaacagatcatcaccgacatcggccagtacgggacgatgctcgaccggatcaccacccagttgctcgacgatccgcacgattccgacctggcctaccgcgaccggcagcgccggctgttcgacgattacgaggcgctgctcgaatcgtcacagagcgcctcgtatcacgccttcagccacatgatcggggacccgcagcagcgggcccggctcatcgccgacatcgagacggtgaccgcgcaactgccgggcatcgacaccgggctgcggacggtgatggagaacttcttcggcctcgtcacccagcagatgggtgaggtgggccggacccgccaacggtgtgcgcgtcgcatccggcgcttcgtcgcgtcgggcacgctggagcagagccgcggtatcgcccgacaactcaacgatgcgcttgcgaccgcgaacgaactgctcaagacatcgctcgcggaccggcgcatcggctacgagttgccgacggccaccccgtccctggcgtccatcgggcggctggccttcgagatccgcgacccggcaccacctgcgccggcactgcccgccgacggtgataccgacctctcctccttcgcgtcgctggccggacaggtcgacaccgtggagctgaccgaggcggtcaacgcggccgtcgaggccggtccggtgccgctcaccgaggtgatcgcgcacatcgaggagccttacctcgcccacgtgatcgtgttgtggtcctgggcgttgcgtcagcccggcaacaccgcaggcgagtccacccgaatccggttccgctcgctgcagggtgaggaccagtccatcgagatccccgccctgacgttcaccgaacccatcccgaccgtggaggtcgacgcgctatga

SEQ ID NO: 41978 - DNA, 801 bp, Gordonia bronchialis DSM 43247
atgagcaccgaaaccgaaccggacgagttcgccgggtacgacgacctgcccgcggtcagcaccgccacggtgaatcagcggcccacgggcccccgattcgacggcgacgtcagcgagttgcccgatcgggcgtgctgggccctgcagaatctcgtggcgcgccgctacgtcagcggcgaccggcacccgcagctgtggtcgtgggtgagcgagtatcaggacgtgctgcgggtgcgactgtccgagctcgacctgcgactgcggatcgccgacgaactgcaggtggccttcgtcgaacaggccggctacgactcccgttggggcagaagaattctcaagcgggaaacgatccagacctacgacgcgatcctggcgctgcacctggcaaagtacgcacgggcatcccgcgaggagcatgtgctgatcacccgcgaggagatccacgaactgttcgccggggtcagcaacaccatcgaccgcgacctcgccctgttcgacaagcgcatcgagcgcgccatcgacaaactcgaggaactcgagttcgtccgcaggcaacgcgacgacccggacaccttcaccgtgagcccggcgatctcggcggtcatgaccgcatcggtgatcaccgatctacaacgacagttcgaccagttcatctcctcgggcgaggaggcagacggccccgacaccccggccccgaccagcggcgaagccgaccaccacgatctcgaccaccaagaccctgaccaccacgaacccgacgagcgggatctcgacggggacgacgaaggagacgattggtga

SEQ ID NO: 41979 - DNA, 3366 bp, Gordonia bronchialis DSM 43247
gtgagcgcgcacgtcgaccagtactcgctgtcccgattgcagctgatcaactggggtgtcttcgacggctatcactcgattccgttcagtcccaacggttcgctcatcaccggctcgtcgggaagtggcaaatcatcactcctggacgcgatctcactggccttcctgcccgacaaccggcgcaacttcaacgcctccggtgacgccaccgccgccggatcgtcgagcggcaagcggaccgtgggcaagtatgtgcgcggcgcgtggggtgagcgtcgcgacggcgccaacgccgcgcgcgagatcatgtacctgcgcggcaccggcccggcctgggcggccatcgccgtcacctacacctccacatccggctcgtcgatcaccggcctggtgctcaaatggcttgccgcgggcaagatgaccgacgcgcacagctcctacttcatccacgacggcgacgccgacatcgccgacgtctgtaacgcctgggccaccagcaaccacaactcggcacgcctgcgggaggccggctggcgcggcgggccgggggagggccgctacctcgccacgctctactcgctgatcggcatccgcgcctccgaggcggcccagcaactcctcgggaaggccaagtcgctcaagagcgtcggcggtctggcccagttcgtccgggagttcatgctcgacgaacccaccagcatcgccggcatcaaggacgccctcgagcagatcgatccactggtcgaggcgcgtgaactgctcgacgtggcgcgacgtaagcgagccatcctcggcaacatcgaagcggtacaggaacgctacgtgagcgagtccgccaccttcagtgtgctcgacacgatcgactcctcgacggtccgtgcctacgtcaacaacctcgggttgcacaacgccgtgccggaggtcgccgacctcgacgatcagatagctcgcctcgacggtgacctcgccgcgctcaccgcgcagcatgatcaactgcgccaagatcattcgcatcttctgtccaggatcgcgacctccaccggtgacctcgcaccgctgcaggagcagctggccggcgcgcagaaggtgagtaacgaggcgtccatccggcgcgcgagctacgagcacaaggtcaccgcactcggcttctcacccccgaacgacgccgaggagttctggaccctgcgcgagaccctgatctccgacgccacccatatcgacggccagctcgaggcgggtaaggcacatttcgccgagaccctggcgcgcgaggtcgccgcccgaacccaacgcgacaccgtcgcagaggaactgcagcgcgtgcgccaggccggatcggcgttaccgcgcgccgaacacgacatgcggcgcgtcatcgccaatgcgctgcaggtcgacgaatcggagctgcgctacgtcgccgagatggtggaactcgaccccgacgaagagcggtggcgactggccgtcgagaaggtgctgcggccggcgggactgcgactcctggtccccgacaggcattttcgcgttgccttgcgttttgtgaacaacaacgacatgcgtggacggatccagctgcatcacgccgaggaccgtccggcgccgaccccgcaggccggcaccctcggcgccaccctgcgcccggtggatcccggccacccgtgttcggccgaggccgtctcgatcctgacccggctcggcaactacgtatgcgtggactcgacagcggagttcggcgaccatccgaaagccttgaccgacaagggacttcggaaggactccgcgaaactcgccgtcaaggacgaccgggctccgctgcgtccgtcccagtacatcttcgtcggcaacgtcgacgccaagatcgccgctctgcaggacgagctcgacgaggaacagcgcgcctacgacgaggcgcgggaggcgagcgccaccctggaccgcgaacgcaccgagcgtgaacagcggcgcgacgcctaccggcgcctgtgtgaacagttcacacagtggagcgagatcgatctcgactccgccgacgatcgcgtcgatcagctgtccgagcagtacgacctgctgatggaggagcaccccgacatcgaggcgctgcagcgcaaggcggaggatctgtgggagcaggtgcgcggggcgatctcacaggccgcgctggtgcgcgacaagatggccacccatgaccaacggcgcaccgcgctcctcgacctcatggaccgtctgaagccggaaagtgttcccgcacaggcacagagcaccctcgacggtttccgtgaagaactggcagccaccctcgacgtgttggcgccggacgcctttcgaaccgatctcatgaaggcggtcgtccgcgatcgagaccgtatgcggtcggacacccgtcgctcacgcgacgaactcgcccgcatcctcgatcgctacgacgaggagttccccgacgcgatccccaacgacagcgacgacttcgacgagcgcacccatgactacgtgtcgctgtgccggcggatcgacgagcgggaactgccgtcggcctatgaccggatgcgccggctcatcaccgagcaggcaccgggcgccatcctcaacctgcatatggcggccgacgccgaggagcggcgcatcatcgaacagatcgagcgggtcaacagcggactgggcgccgtcgccttcaaccgcggtacccggcttcgactgcatccgggtcgcaagaacctcgcggcggtcgccgaactcaccgagaaggccaagcatatctcgggccgagccgccccggtgagcttcggcgacgaacaggccatcctcgagcagtacgccgacatcctgctgctgcgcgaacgcctggcgggtgccacgccggaggatcgggcctggacacgggatgcgctcgacgtccgcaaccgcttcgacttctactgcgaggagcacgacgccgagaccggggagaccatccgcacctacagcaatgccggcgacaactccggcggcgagcaggagaagctgatggcgttctgcctcgccggcgcactcagcttcaacctggccagcccgagcggcgacgacaaccggcccatcttcgcgcagctgatgctcgacgaggcgttctccaaatcggatccgcagttcgcccagcaggccctctcggccttccggaagttcggcttccagctcgtcatcgtggccactgtgcagaacaccagcaccatccagccctacatcgacaatgtgatcatggtgtcgaagaccgagggcacggtgtccacgagcgagggcaccagcgcccgtccggtcgccacggcgatgtcgacgtcgatccaggcgttctcggatctgcgacgcaccagcggcgcccgcctccccgtatga

SEQ ID NO: 41980 - DNA, 1533 bp, Sanguibacter keddieii DSM 10542
atgaaccacgacgacgtcgaggccctgcgccgcgacaacgccgcctggcggctgctccgagccgactccgcgcccctcgtgctgagcttcctcgggcgtgtgttcatcgagcagaacgtccgtgccatcggcgagaccgagctggtctcactgctcgacgacgccctctacgacctcaacgccgggcacgaccccgcgccctacccgcgcacccccaaggcgtacctagacacctgggccgcgcccgaggccggctggctgcgcaagtactaccggcccggctccgacgagccgcagtacgacgcgacaccgtcggtcgagaaggccgtcggctgggtggccaccctgcgcggacggtccttcgtcgggaccgagtcgcgcctcaacaccgtcttcgagctgctccgccagctcgccgtgggcaccgagaccgaccccgacgtccggctcggtcagctcgaggcccgccgggcgcagatcgacgccgagatcgagcaggtccgtgccggcgtcgtccccgtgctcgacgccgggtcgcagcgcgaccgctaccagcagttcgccgccatggccgccgagctgctctccgacttccgcgaggtcgaggacaacttccgctccctggaccgcgagatgcgcgagcgcatcaccggctgggacggcgccaagggcgagctgctcgagcaggtggtcggcagccgcgacgccatcgccgagtccgaccagggccgctccttccacgcgttctacgacttcctcctctcgcgcgagcgccaggaggagttcaccgagctcatcaccaaggtgcagaccctcgacgccgtgagcgccatgagcggcggggacaagcgcctgcgccgcatccactacgactggctcgacgccggcgagcgcacccaggccacggtccgcgtgctctccgagcagctccggcggttcctcgacgaccaggtgtggctcgagaaccgccgcgtcatggacctgctgcgcagcatcgaggggcacgcgctcgccgtccgcgacagcgccgtgggggcgcccgagctcgtcaccgagatcgacggcgtgagcctcgacatcgtgctgcccatggagcgcccgctgttccgcccgcagaccgtcgccaagatcgactccgagcacgtggctcccggcgaggtcgacttcgacaccagccgcctgttcgaccaggtccacgtcgaccccgcgcgcctgacggcgggtgtgcgcgacgcgctgcggcacgaatcgcaggtgtcgctgcccgacgtcgtcgccgcgcagcccctcgaccagggactcgccgagctggtcacctacctgtcgctcgacgacccacggttccgcgtggtcgtcgacgccgagcacacggacgaggtgcgctggatgctcggcgacgtcgagcgcgtcgcgaccgtcccgcgcgtgaccttcgtgcgcaggtccggatcgagcccgtccgacctcaccgcagcaccgtccgaccagatcgcagcgcccgcatctcacgcacagcctgaggagacctcatga

SEQ ID NO: 41981 - DNA, 633 bp, Sanguibacter keddieii DSM 10542
atgagccagcccacggcccgcgccgactcggagctgtcgcacgtcgtcacggccctgatgaagggcgtcgtctaccgcgacacccatgcccagaccttcgccgacctcatcaccctgcagccgcaggtgcgcgactacgtcgccgtcatcgggctgagcgtcgtggtcgacgacaccgagggctatgcctacctgcgctccatggacgacgacacggagcgcgagggcaccctgcgtctcgtcgcccgccgctcgctgcccttcgaggtgagcctgctgctcgcgctgctgcgcaagcgcctcgcgctgttcgactccgagggcggtcaaacgcgcctcatcctcgggcgtgacgagatcgtcgagatggtccgggtgttcctgcccacgtcgagcaacgaggtgcgcctcgtgacgcgcgtcgagggcatggtgcaccgcgccgtcgagctcgggttcctgcgggggctgggcgaggggcagtacgaggtgcggcgcgtgctcaaggccttcgtcgacgcgcagtggctggccgacctcgacgcgcggctggccgagtactccgggtacgcagcacagggacacgcgagccaggctgctcaggacgtgcagaccgacgggacggtggagtga

SEQ ID NO: 41982 - DNA, 3501 bp, Sanguibacter keddieii DSM 10542
atggaaggcctgttcagcgcagtcgagctgcacgacgcggaggcggacgtcgaccagcgcgccgggttccggctcgagcgcctcgaggtgctcaactggggcaccttcgaccgcaccacatggtccttcgacctcgaggggcgcaacgccctgctcaccggggacatcggctcgggcaagtcgaccatcgtcgacgccgtcaccaccctgctgctgcccgccaaccgcatcagctacaacaaggcggccggcgccgaggccaaggagcgcacgctgcgctcgtacgtgtcgggctactacaagtccgagcgcaacgaggccacgggcacctcgcgccccgtgggcctgcgcgagggctcgacgtactcggtgatcctcggtgagttcgtcaaccgcggcttcgaggccacgggcgtcctcgcccaggtgttctggctcaaggacggcgaccaggggcagcccagccgcttctacgtcaccgcggcgtcgagcatgacgatcgccgagcacttcgcgaacttcgacggggacatcacgcggctgcgcaagcgcctgcgcgaggccggtgcgcaggtccgcgacaccttccccgagtacggcaaggacttccgccgcatgctcggcatcgagtccgaccaggccatggacctgttccaccagaccgtgtcgatgaagtccgtcggcgacctcaacgagttcgtccgccagcacatgctcgagcccttcgactccgggcagtggaccgaccgtctggtcgcgcacttcgacgacctcacccgcgcccacgacgccgtgacccgggcgcgcgcgcagatcatgcagctcacgccgctcgtcgccgactgcgaccgcttcgcgggtctcgtcgaccaggcgagcgccgcgaccgcgcagcgcgacgccctgcgggtgttcaccgcgcagcgcaaggacagcgtcctcaccgcgcagatcgacgcctacgacgcggcgatccgcgcccgcgacgagcggctcgtgtccctcgacgtcgagatcaggacgagcgaggccgagcgtcgtcggctcgagctcgagcgggccgggcacggcggcgaccgcctcgcccagatcgaggccgagtccgcgcgcctcgacgcggtgcgcgccgaccgcgagaagcgcgcggccgagtaccgcagcaacctcgaggccgccgggctcgagggcgtcgccgacgccgcggagttcgccgcgcgccgcgaccaggtcctcgcgcaggtcgcgacggagaagaccgagctgcagcaggtcgagaccgcgatcggcgagatcgactacgcgctccgtgagcagaaggtcgtctcccgcgagatcaccgaggagatccgcagcctccagggacgcagctcgagcctgcccgcgcgcagcctgcaggtccgcgcgcagatcgcgaccgagctgggcatccccgaggacgagctggccttcgccggcgagctcatcgccgtgcgcgacgaccaccgcgactgggagggcgccgcggagcgtgtgctccgcagcttcgcgctgtcactgctggtgcccgccgcgcactacgacgcggtgtccgggtggatcaacagcaaccacctcggccagcgcctcgagtactaccgggtgcctgccgaggtccgaccgcgcgtcgagagcggcggcggggcggactggccgcacctgtccgagatgctcgagatccaggagtcgacggtctcgcggtggctcgagcaggagctcgcgcgccgtgccgactacgcctgcgtggactccctcgacgagttccgccgtgcgcaccgcgccgtgacgcgcgagggccagatcaagcactcggccagccaccacgtgaagaacgaccgcaaccgcgtcgacgaccgctcgacctacgtgctcggctggagcaaccagaccaaggtcgacacgctcctcgcgcaggcgaccacggtctccgagacggtcgccgacctcaccgaccagcgggctgcgctcatcgcgaccaaggacgccgtggtcgaccgcgcgcacgccctcaaccgcctcgagatgttccgtgacttcaccgagctcgactgggagcaggtggtccaccaggtcggcgagctcaccgccgagaagcgccgcatcgaggcgaactccgtcgagctggccgagctcgcgtcgaccctccaggagcagacgcgccgcggtgccgagctcgcggaggagcgcgaccgtctcatcagccgcaacggcggggagcggcacgcggtcgagtccttccggacgcagcgcgaggccgcgcggaaggtcagcggcggtgcgggtgcgggcgccggtgccgacggtgctgcgaccaccggtgctgcgggcgtcgaccaggaggcgctcgacgccgtcgccgcgctgtgggaggcgctgccgggccagggcggcggccggccgggtgccaccgtcgcgggtggtccgggctcgggcgacgccgccacgaccatggctgagatcgacgcggccgaggccgcgctgcgcacccagctcaccggggtggtcgaggcgcgtcagcgcgagcagggccagctggcgacgagcgtcgcgaagcagatgacggccttcagccagcagttccccgtcgagacctctgagatggacaacgacgtgcgggccgcgggggagtaccgcgagctgctcgagcgcctcgagcgcgacgacctgccgcgcttcgaggagaacttcaaggagtacctcaacaccaacaccatccgcgacgtcgcccagttcgcggccgagctgcagaagcagtccgacctcatgagcgaccgcgtggacgtcatcaacgactcgctgcgcgcgatcgactacaaccctgggacgtacatccgcctcgagatgaccagcacgcccaacaccgaggtgcgcgacttccgcacccagctgcgggcctgcacggacgggatcctcggcgaggacctcgaccagtactccgagcagcggttcttgcgggtcaaggagatcatcgagcggttccgggggcgcgagggtcagaccgaggccgaccaggcgtggacggtccgggtcacggacgtgcgcaactggttcgtgctgtccgcgtcggagcggtccaaggccgacgacgtcgagctcgagcactactccgactccggtggtaagtccggtggtcagaaggagaagctcgcgtacacgatcctcgcggcgtcgctggcctaccagttccgcctcgactggggcgcggtgcggtccaaggccttccgcttcgtggtgatcgacgaggccttcgggcgcgggtccgacgagtcgacgcgcttcgcgttgcagctgttccgcaacctcgggctgcagctgctcatcgtcacgccgctgcagaagatccacgtgatcgagccgttcatctccgccgtcggctacgtcgacaaccccacgggccgcggctcgcggctgcagacgctcaccatcaaccagtaccgcagcaagcgctccgagcacctcctgggagccctcggcgccgaggtctga

SEQ ID NO: 41983 - DNA, 1500 bp, Xylanimonas cellulosilytica DSM 15894
atgaacagagttgagggcgcctaccagggcgcggtgcgcgcgttccgcagccccatgctggcgctgctgcacaagcgtgacgcgccgctggtggtcgcgctgctgagcagcgtgttccggccggaccgccggacggtgcaggtggccgacgcgcacacggagatggacgacgcgctcgcgcagctgcgcgccgcggggcacgacgacgtctcggaccggtcggcgcgcgagctgtgccggacgtgggtcgacgccggctggctggtgcggcaggtcgacgacgcctcgcgggaggccggggtgccgcgtgagggggccgaggtgtaccgcctctcggcgcatgcggtcgacgcgctggaggtcgcctcgcgcgcgggcggcggccacgcgcgcgtctcgcggtcccgggtgctcaccctcctggaggccgtggagcggctggccgacgacgccgaccccgacgtgatgacccggatgctgcgtctgcagcgggagatcacggtcaggcaggcggagctcgaccggctcgaccggacgggggagatcgacccggtcgacgaggagcagctcctcgaggccgccgagaacgtgctgctgctggtccgcgagctcccggccgacttcgcgcgcgtcgcggagtcgatccgcgcgatccagcgggagaccgtcaccgcgttgcggcaggacgcgcgccccacgggcgaggtgctgcaggactacctcgagcgtgccgagcacctcatggacgcgaccgcggaggggcgcgccttctcgggggcgaagcgcctgctcgacgacccggagcgcatggacgccctggtcgacggcctggacacggtgctgcggcacccgttcgcacaccggctcccggagcaccagcgcgccgagctgcgcgcggtcgcgctgcgcatcgaggccgggttcgccgaggtgctcacggcgcagcgcatcgcctcgcgcgtcatcaccacccaggtgcgccatcacgacccgctgcgcgaccgccaggtcgacgagctgctccgcgacgtcgtcgccgccctgggggcgtggatgccgacgtcgcggcgcgcgcagcccgtggaggcgctgcggcgcctgccgcgcgcccgcgtgggtcgcgtccgcacgacgctcgccgacctcacgccgcggcgcggccccgagccgctcaccgagtgggacgacgacgaggcgggctcgttggagcatgcggccgcctggggcgggccgcggtacgcggcgctgcgcgggctgctcgacgaggcgggcggcgcgcgcctcgacgacgtgttcgcgggcggccccgacgatgcgcgccgcccggtcgacttcgtcggcctcctggagctcgcggcccgcgcaggtctggacgacctggacgaggtcgcgtacgtcgacacgatccgcccggacggcacgcgccgccgcctggcattcgaggccgccgcgctcgcgcgtgccgcacggaccaccgcagagggtgacaccgatgactga

SEQ ID NO: 41984 - DNA, 753 bp, Xylanimonas cellulosilytica DSM 15894
atgactgacatcccggtttcggacggcttcatcgagcccgtcgcgatggaggccgaccccaccgagctgttcgcgggcgacaccggcacgctcgacgccgccgcgcgcgcggtgctggtcgacctgctgcgccgtcggtacctctccgcggacgccagcccgcagcgctgggcggcgctgctggagcaccagagcgccatcgagtcgcgcctgcacgacctgttcgtgacgctcgtcgtcgaccgggatcgtggcatcgcctacaagaggcaggtgcgcagcggcgaggtcgagatcccgatcctgctgcgcgacgaggcgtacacccgcgtcgagacggtgctgctcgtccatctgcgcaccttgcaccagcgggagcagggcgcgggggaggtcgccgcgcgcgtggacgccgaggagctcgagcagcacgtcatgagcttcctcgaccccgcggagaccaacgtcgccgcacgccagcgcgaggtgcgcgcggcgatcgcgcggctcgccaccgagggcttcctcgacgaggagagccccgggcggttccggatcacgccgctggtcgaggtggtgctgcccgtcgaccggctcgcggagctcgcgcagtggctccgctccggcggccgccccgccgtcgtcgccgacgccgacggcgtggcggatgccgacgacgcagaggcggacgacggggacacggacgacggggacacggacgacggggacgaccaggcggaggaggacgactga

SEQ ID NO: 41985 - DNA, 3363 bp, Xylanimonas cellulosilytica DSM 15894
atgacgatgatcgacacgctcttcggactcgtcccggcggcatcgaccgggcagcagtgggtggcccgggacctccaggtggtcaactggggcggctacgacggcgcccaccgcatccggctcgcccccacggcgacgctgctcgccggtgggtcgggctcgggcaagtccaccctgatggacgcgtacatcgccctcctcatgccgcacacgacgccgttcaacggggcgtcgaacggcggcgtcgtcggccgcccgcgcggcaaggaccagcgcaacgtcatctcctacgcgcgcggcaagatcgacgagtcgcgcaccgccgacggcacgcgcgaacgcgtgctgcgcggcgacgggcgcgacacgtgggcggccatcgcgatgacgtgggcggaccagtccggggcgctgctcaccgcggtccgcgcctggtacgtgccggccggggccgcgtcgatggacgcgctggtcccggtgcgggccacgatcgccgggccgttcgagctggcgtcgctcgcggtcccggccgaggcgcggttcgcccgcgccgccctgaccgcgctgggcctgacgtgcttcgacaccgacaaggagttcgccgcgcggctgtactccagcctcggcatcggtgcggcgggcggcggcgacaaggccgtcgggctgctcgcgcgcatccaggcgggccagcagatcaccaccgtcgacgcgctgtacaagtcgatggtcctcgaggagccggagacgctggcgaaggccgccgacgtcgtcgagcacttcgacgagctgtccggcacccgcgagcagatggtcaccgcgcagcagcaggtccgcgcgctgcgcccgatccgcgcgcaccgcgcggccgtcgacgaggcgcgcgaccggctcgacgtgatcgacggcgtcggcggtgcggccgacgacgcctccgccgtcgggctgtggcgtgccgagcaccgggccgcgctgctgcgcgcggtcgaggacgacgtgcgcgggcgctcgcgcgccgagaccgcgcaggtgcgcgacctcaaggcgcgcgtcgacgcccgcaaggacgagctcgagggtgtgcggcagacgctgtgggcgtcgggcggtgccacgatccagaacgccgagcgcgagctggccgccgccgaggcccggctcacggacgcgcggcgcacgcgcggccgcctcgacgccgcgctggaggtgctcggcacgacggtcaccaccgaggcggacttcgaccgcctcgccgcggcctcccggtcgcggctcgccgacaccgccgcgcggcacgcggcgttcgacgcgcgcgacaaggcgcgggacgcggagaaggccgcgacggccgagctggccgcgctcgagaccgagcgggcagggctcgccgcccgcgcgggcaacgtccccgaggagctgcaccgcgctcgggtggcgctcgcgcaggccgccgggctcacgccggagcagctgcccttcgtcgccgagctcgtcgaggtgcgcaccgagcacgaggcgtggcgcgaggcgttcaacctggccctgggcgggttcgcgacgacgctgctgctcgacgccgccgacctgccccggttccgggccgcgatcgacagcgtgccgtcccggaggcggctgcgcttcgagggagtgaccaccggcctcgacagccgctcggccatcgacccggcgaccctgcccggccggctcgactacgcacccggcgtgttccgcggctggctgcgcgagcacctcgccgagcggttcgccttccgctgcgtggactccaccaccgccctcgcccagcacccgaaggcgctgacccgcaccggccagacgtcggagggctcccgcggcgcccacggcggccagggccgccccaacgttctcggcttcaccaacgcccgccggatcaccgagctcgaccgccagatcgaggaggcccgcacggtgctgcgaacggccgcggaggcgttccgcggcgccgggctgcggctcgacgccgtcgaggagcaggcgaccgcggcacgcaccgtcgcggagctgcggtgggcgtccctcgacgtccgcggtgccgaggcggcctgcgagcagtggcggtccgtcatcgcggcggcccgcgccgacaaccccgagctcggggtgctggagacccgcgcgcgcgagctggacgccgaggtggagcggctccagaaggagctcggcgccacggaacagcgggcgggcgcgctcgccgaccgctgggagcgggtcagcgaggaggtcgacgccgtccaggccgtcctcgacgccgcggccgacgacggcgcgaccctgaccgaccggcagcgcacctacctcgacgagctgctcggcgaagccaccgcgacccccggcacggacggcgccgcggaacccgagccggcgcaggcgctcgcggcgttcgacgccgtcgtcgcgcgcgtgggcgaacggctgcgccacgaccacgagaccgccgtgaccgccgtcgccaccggcacggacgcgctgcgcacgatcttcgaggccttcgtccgccagtggccgagccctgacctcggcaccgaccccgacgcgtcctaccgcgacttcgaacgcgtgctgaccgtgctcgagacggaccggctgcacgagctcgagggggagtggcggcgctcgctgctgcgcctctcgggcgacgacctcaccgacctcgaacgcaccatcgcccggtcgctgcgcgagatcaccgagcgcatcgacccggtcaaccggatcctcgccgacctgccgttcgccgacgacgaccaccgcctgcgcatcgacgcgcgcgccgcggcgtcgtcggtcgtggccaagttccgcaaggagctgcgcgacctgcgcgagctgctcgcctcggacgcctccgacgccgagcgagaggcccggtacgcgcggatgtcccgcctcgtggagcggctgcggccgggctcgcccgagcgcgcggacctcatcgacgtgcggcggcacgtgcgcctctcggcggagaaggtcgacctggccggtaaccacgtggcgctctacgaccacatcggcgagaagtccggtggtgagtcgcaggagctcgtcgcgttcatcgtcggcgcggccctgcgctaccagctcggcgacgccggggccgaccgcccgcggtacgcgccggtgttcctcgacgaggcgctcatcaaggccgacgcgcagttctccgggcgcgccgtcggggcgtggcgggggctcgggttccagctcgtcgtcggcgcacccaacgacaaggtctcggcgctcgagccgcacgtcgacgcgtcctacgtcgtcaccaaggacgccgcgggccgctcgcggccgcgcgcggtgatcggcgtgccgtag

SEQ ID NO: 41986 - DNA, 1575 bp, Bifidobacterium animalis subsp. lactis BB-12; identical to SEQ ID NO: 41902

SEQ ID NO: 41987 - DNA, 810 bp, Bifidobacterium animalis subsp. lactis BB-12; identical to SEQ ID NO: 41925

SEQ ID NO: 41988 - DNA, 3498 bp, Bifidobacterium animalis subsp. lactis BB-12; identical to SEQ ID NO: 41904

SEQ ID NO: 41989 - DNA, 1221 bp, Bifidobacterium animalis subsp. lactis BB-12; identical to SEQ ID NO: 41905

SEQ ID NO: 41990 - DNA, 1461 bp, Allochromatium vinosum DSM 180
atgaaagcagacaaggctatcgcgacctaccgacgcatgcggactcagcccctgtggcgtctgctggcctcggacaacggccccactgtcattggcctgcttcaaatccatctctatgagagcgagcaaagccttcccgcctccacttttcatgagcggatcgggaggagtttggaagtgcttcgcgctcaaggtgaggatttcccccaaaccgcccaggcctatgtcgccaactggctcgccgatggctatctggagcgccgctttccggccggcgcttccgaggaggaatatgaactctccacggcagccatcgaggctattcgctttgtctctgggctgacgcagccccactccgctgcgaccgagagccgtctgacactcgtcatcgaagcgctgacccggcttgccgaggacaccgacaccgacaagttccgccgcatcgatcggctcatggccgagcaggcgcgtatcgacaaggagatagacgccatccagaaggggcagatgcgcgtgcttcctcatgcagcggcgctggaacgcacgcgggagatcatcacgctggccgacgatcttgcgggcgacttccggcgcgtgcgtaatcagttcgagcaactgaatcgagatctccgtgagcgcctcatggacaatgatggcaatcggggcgaggtgctggattcgctgtttgccggaatcgacctgatttcagagagcgaagcggggcgcaccttttccgctttctggcgcttgctaacggacccggaacaggcggccaccctcgaccaggcccttgatagcgtgctgtcgcgggaattcgtgactcaactcgacgccaaggagcgacgcttccttctccggctgacgcgaacccttcttgagcaaggcggaatggttcatgaggtgctccagactttcgctcgcagcctgaagcatttcgttcagagtcgtgagtaccttgagcagcgccgactcaatcaccttttgaaggatgcccagcgtgccgccctcgccctgaaggatgaggtcagggccacggaaaccctccagtacacgctcgaactctcaagcagccgtttgcgctccctatcccagtgggtgctgtacgatccctccctacaagccttgcctggtcagatggccgaaggggacgcgctgcccatcgacctggagtctgtcggcgaactgatcgctcaatccgagatcgatttccgcacgctgaaggccaacgtgctggccgtcctggaacaccgatcccaggcttccattgccgacgttctggagcggttccccgccgcacagggactcggcagcgtggtcggccttctggcgttaggcagtcggcatggtttccggtccgatcacagcgaaaccgtgggctggattggaggcgacgaccagagtcgtagcgcccgaattccaaagatcttgtttttgagggagcgggccaatgagctggtctga

SEQ ID NO: 41991 - DNA, 711 bp, Allochromatium vinosum DSM 180
atgagctggtctgagattgacgaagcggcgttgccggacgaagaacgagcgccggatgcagtgccggcctccgccaacacgctgttcataggcgatagcggcgaattgcccctggacacccggcgcgccctggtacagctcctggcggggccgtcactcgatggataccgacaccccaaactctggccgatcctgatcagagacgaagtgccgatacgtcgccgcctcgccgaactgttcctggagctggtcatcgaccgggacatgcaagtcgccttcacccgtcaggcggataccggtgaactggaggttccgaccctgctgcgtcgcgcccagttgaccttcatcgactctattctgctgctccatcttcgccaacgcttgacccaggcagattcgcggggcgaccgcgccgtggtgtcgacggatgagatcatggagttcctcaacctctatgagcgagcgtccaacaccgaccgcgccgggttcgtgaaacggatccatgcctccatcgagaagatcaagaagcacagcatcctccagaaaattcgttccagtgaggatcgattcgagatctcgccgacactgaagctcctcttctcggccgaggaaatacaagccctgacgcacctgtatcaacgcatggccgccgatgagacgccggcgcctgtgactcggaccgaatctgatgatgaagaggccgacccatga

SEQ ID NO: 41992 - DNA, 3375 bp, Allochromatium vinosum DSM 180
atgatcctggaaccacaaaccgcctccttgttcgcccgggaacaattccggatggctcgcttgcaggttttcaactggggaacattctctggcctgcatgacatcccgatcagcgagcgcggctttctgttcgtaggccgatccggagcgggtaaatcgactctgctcgatgccatttcggccctgctggtgccgcctcagtggatcgacttcaatgccgccgctcgcgaggccgatcgcagcggccgcgatcggaatctcgtcacctacgtccgcggcgcatgggccgagcagaaggatggcgagtcgggtgaaatcgccacccgttatctgcgcccagggaccacatggtcagccttggcgctgacataccagaacacattgggtcagaccgtggtgctggtccgggtgttctggctgcgaggcagcgccaatggcagtgccgatgtcaaacgccactacctcatcctggagcggcctttcgatctgcgcgaactggaggacttcggacaatccaactttgacgttcgcaagctcaagcaatcgttcccgaatgccttcgcccgcgacgagttccgcccgtattgcgagcgattcagtcgcttgctcggcatcgagagcgagatggcgctgcgcttgctgcacaagacccagtcggccaagaatctgggcgacctcaataccttcctgcgcgacttcatgctcgacaagcccgaaacctttgaggtggcgaatcgcttggtcagcgaattcgacgaactcaacgcggcgcaccaagcggtcgtgacggcgcgcgagcaggtggaaaccctgctgcctgcgcgagagcaggatcaacatcgcgagtcgctgttatcacggcgcaatggactggaggaacttcggctgggggtggatggctaccgggaaacccgccgcattgaactactgaagcagcaggtggcatctctggaggtgcaagccggcggcacagagggtgagatcagccggtgcaaaagtacactagacaaccataaaacgacgttgcgagacctggagaggcagcatcgcgaggctggtggtgaccggatcgagcagtgggagtccgagaaatcgggcttggaaacccaacgtacggaccgccttcgcaaacgcagtcaggcagaagaggcttgcaaaaagcttggctggagcctcccggattcaccccaagcctttgccgaatcattgggtaacgcgcggcaggagatcgaaaaccgggagcagttcagcaacgaaaatcgggaagaacaatttcgtctcgccggtcggaagaaggacgccgagacggcgttttcgcaagcggtgaaagaggtgcaggcactccagcgccagccgtcgaatgtgcctgccgatatgctcgaaatgcgccgcgatattgccgcagccattgggatctcagagtcggccctgcccttcgtcggcgaactcatcgaggtgaaggccgatgaggccgagtggcgcggcgccatcgagcgcgtattgcatggatttgcactctctcttctggtggacgagcgtcattattccgcgctggccaatcacatcaacgacacccatcttgggcagcgcctggtgtactaccgaaccggccgccctgagacctggcaggtcagacccatcgggcccaactcgctggtcctcaaactgaacgtcaaggaaggggcctattccgattggttacaggctgagctgcgacagcgtttcgattatgtgtgcgtcgacggaatgacgtctttcaggaccgctgatcgggccatcacgcgagagggtcaggtcaagcacaacaaaatccgacatgagaaagacgaccgtcgaaatgtcggtgatcgacgaagctgggtgcttgggttcgacaaccgcgagaagctcgcgctctttcaggcacaggctcaggaactggcagccacgatcagccgcctcgcaagagagatcgacgccctggcctcccaggacaaggaccgtgcggaccgagccatgcagtgccagactctggtgagtctccagtggcaggaaatcgacgtcgttccgttgctggaccgtattgccgccatcgagcggcagatccgcgaagcgcgtgaaggcaatacagccctgctgcaccttagtgagcggatcgagcagcaacagaagcgggttgcggaagccgaacaaggcctccaagacgccagggtgacgcacgagtcggttctgaaaaaaattcgggaaagcactcaagagctggagtctctcctccaggacgcctccagggttccactgactccgcatcagattaccggactcgacgaacgcttcgacaaacaggcggatgtactcagcctgaacaacctcggcaaggtagcgaccactgtcgagcgagcgctcaacacagagatcacggacatcgaccacgcgatccgcgattgcgagaagatcatcgaagcgcgctttaccgatttcaaacggcagtggcccatggatgccggcgacatggatacgagtctctccagcgcgccggacttttttgcccggctggttcggctggagacggatggtctgccggcgcatgaacaccgcttcttcgagttgctgcagaaccagagccaccagaatctggccgcactcgcctcctacttgcgcgatgagcgaaaggccatccttgaacgaatggacctggtgaacgacagtctcagccaagtgccgttcaatcagagcgccaaccaacgcacctatctccacatcgacaccagcgaccggcaacttgccgacgtcaaggaattccagcagaacattcagcgggcactcagccacgcctggagtgaggaccgcgagtttgccgaggcacggttctcggtcttgcgccaacttgtcgaacagctcgccagtcaggagcccgagcacagacgctggcgcgagtccgtgctggacgtccggcagcatgtcgagttcatcgggcgggaaatcgatgagtgcggcgtcgaggtcgagatctaccgcagcggtgcgggcaaatcgggaggccagcgccagaagctggccaccacctgtctggccgccgccctgcgttaccaattgggcggaaacgatcatggcgtgccgatgtacgcaccggtcgtgctcgacgaggcgttcgacaaggcagacaacgaattcaccgccttggcgatgcatatctttgccaatttcggatttcagatgatcgtcgccacgccgctgaagtccgtcatgactctggaaccgttcatcggaggcgcgtgcttcatcgatatcagcgaccggcgcgtatcgggtgtcctgatgattgaatacgacaatgatcgtcagcggttgagactgcctgagcacgcccaagaggaggccgacgttgaagcttcctga

SEQ ID NO: 41993 - DNA, 1170 bp, Allochromatium vinosum DSM 180
ttgaagcttcctgaagatgtccggcagcttctcgcccgccgctttcagagcaaacaccgctcgtggctggccggtgagtccggcgaaaaccaatggccactgaaaatcgcgctcggtgtacccacggagcaggccgctctgcggcaagtcgaaggcgttcgcgtctgggtgagcgcatggcagcactggcatggaccaggtgcgctgtcctggtgcgagcggcgttggaagacgcttggcgttcaacgagtgcccgacacgctgatactgaacggccccgatgaggtggctcagtggatcggtgaaggcactcgctggaagcaggctcaatcgcgttatcagacactcattgcacgttggccgctgctggctcggccgttgcggaaatacttcgatgttctcgccgactacggcgacgccgattttcggcgcatggcggacatgctggcctggatcgcaagccacccgaactccggtctctacccccgccagttgcccgtgtcgggtctggacagcaaatggctcgacggacgcacaggcctgctgaaggatctgatggccgcgatacagggagacgccgccaacgacctggatttctacgaacgatgcggtctgaaagcaccaccgcttctggtgcggatgaggatcctcgatcaggggctgcgaacctggatcggcggtatgggagacatcaccgcgccggtggaagacctggcgcgtatccatttaccggcctcgcatgtgttcattgtcgagaaccttcaaaccggattggccatgtccgacatgccgggcgctgtcgtcttcatgcggcttggctacaacgtgaacgtgctggccggactgccttggctcacccacgcccagtgcatctactggggcgatctggatacccatggatttgcgatcttgcaccgggcccgttcctatcttccaggcctgcggtccgtccttatggacgaagacaccttgctccgtcacaaagccttgtgggtggatgagaaggaacaacatgcagcggcggaactgacgcttctgaacgagactgagcgggaggtctaccagggactcaaacagcagcgatgggggcagaacgtccgcctggagcaagagcggatcgcttgggatacggcttggcctaccttgcagcggctcgtcggcaccctgtag

SEQ ID NO: 41994 - DNA, 1446 bp, Mycobacterium liflandii 128FXT
atgcacgacgacaacgcgggactgtcggcgaccgagctgctcgatctcaatcgcgacttgcagggctctcgcgccattcgcctgctcgccaccaccaacctcagcctttacgcgacgctcatggagcgccacctcagcgacggggcgctgcctgagaccgagctcgtcgtacagctcgagcgcgacctcgaagacgtcaacgatccgcagcccgggctcgccctgatcaagtcctgggccgcgcagggctggctgcaccgcatcgtcgacgagcgccacggccagaatgtctgctatctgacccaggacgctcgccgggcgctggactttctccgcggcttgcgtcgccaggacaccatcgccaccggcggctcgattacgggcatcgccgcgcgcctcaagcaagtggccgtcaaagtggataacgaccccgcccggatccgcaaacacatcgaagccgaaatcgccgcgctccacgaggagcttgaccagctcgatgctggccagcgtccccaaaccgatgtcaccgactgctacgacgaggcccgcgcgatcgccctgcagatggaacgcctgatcaccgatatcggccagtacggcacgatgatcgagcgggctacctccgccctcgatgaacccatcgattccaacgccgagtaccgcgaccgccaacgccagatgtacagcgactaccaggccgcatgggactcccagggccgcgactcccaccgcgccttcctgcgcatgatcaacgaccccgaccaacgcgccgagttcgaggccgacgtcgccgccgtcgccgaagccctgcccagcctcgacccggccctgcgcaaggtcatggccggcttcttcgagctcgtgggccatcagatcgacgaagtcgagcgcatccagcagcgctgcgcccagcgcgtcaaacgcttcaccgcgttcggcaccatggaacagagccgcggtgtcgcccgccaactcaacgaagccatcgccgcagcccgcgccctgctcaagtcgtcgttcaccgactcacgcctggacatcgaggtcccgctggcgcggcacgcgatcagttccgtcggtgccctcggcttccggatcggcgacctgtccaaccccaagcccgccaaacccggcgacaccgaggtcgacctcaccagcttcgccgccttcaccacccaggtcgacgcgcccgcgatgtccgacatgctcaaccacgcgatcaccgcggggcttgtcgcgctacccgacgccgtcgccatgctcgacaccgcctacctgggccacgtcatcgtgctgtggtcctgggccctcaaacagcccaaccccgacaccgccgagtcgaccgccgtccgcttccgctccctggacggccgtgacctcgaaatcgcggtacctcgtttgacatttaccgagcccatcaacaccatcgccggagccagcacgtga

SEQ ID NO: 41995 - DNA, 696 bp, Mycobacterium liflandii 128FXT
gtgaccctccaagacgatgaagtcgacatcgacttctcctcactccctcaggtcgaccagaatgcccgcccaccggttcagcgccggccgcgcttcgacggcgacgtctccgaactgcccgaccgggcctgttgggccctgcagcacctgcttacccgccgctacatcagcgccgaagccgacgccgacgtctacagttgggtgctcgaataccgcaaggacctggccgtccggctctccgaactcgacttgctgctgcgcatcgtcgacgccgccgatgtcgcttttgtcgaacaggcccgctacgagtctgcgaggggaatcaagcttttacgccgcgagccgctcggcacctacgactcgatccttgccctgcacctggcccagatgatgcgtgcctccggtgggcagaccgtcctgatcagccgtgaggagatgcacggcctattctccggggtgctcaacgacaccgaccgcgacgcggtctcgttcgccggccgcatcgacggcgccatcgcccggctgaccggcctagagatcctgcgcaagacccgcgacgacgaggacagctacacgatcagccccgtcatcaccgccgtgatgactgcctcggtgatcaccgagctgcagcagcagttcgagcagctgctcaacggcggtgcgccagcagaggaagaagaacccgaaggtgactga

SEQ ID NO: 41996 - DNA, 3363 bp, Mycobacterium liflandii 128FXT
gtgactgaacagttccacctgtctcggctgcaggtcatcaactggggcgtgttcgacggctaccactcgatcccgttcagcgtaggcggcgcactcatcgccggagcctccggcagcggcaaatcgtcactgctggatgcgatttcgctgggattcctgccgttcaaccgccgcaacttcaacgcgtccggagacaacaccgccgccgggtccagcgccgggcgccgcactgtcgacaagtacgtccgcggcgcctggggccagcgcagcgacggcggcaccagccgggtgatgtatctgcgcggcgacggcaccgcctggtcggccgtggccgtcacctacgccagtgactccggccgcaccgtcaccggcctggtgctcaaatggctgacaggcgagtcccgcaacgactcgtcgagccgcttcgtactcggtgacggtgacctcgacatcgaggaagtctgcaaccgctgggcctccggccgtttcgacgcaggagtcttcaaagaagactggcggttttccaccaaggtcgaatcgcagtacctcgcccagctctacgcggcgatcgggattcgcgcgtccgacgccgcccagcagctgctcggtaaggccaagtcgctgaaaagcgttggtgggctagagcaattcgtccgcgaattcatgctcgacgaacccgacagcctggcccggctgcccgaggcgctcaagcagatcgaccccctggtcgaggctcgcgaactgctggccgttgcgcagaagaaacgcaagatcctgggcgacatcgaacagatccagcagcgctacgcctcggagtcctccgacctcggcatcatcgacctcgtcgacgcgccgatggtgcgcgcctacaccgaccacgcccggcttgcgcaatgtcccgcccagatcgccacgctcgacggcaccgtcgaccagctcgaaaacgaatacgaggacgttacccgcagcctcaatctggccaaggccgaggcggattcgctcaacgcgcagatcagcggttccagcgcgaacatcgctccgctgcaatcgcaggtcaccgccgccgagacccaggccgagcaggtggagcgccgccgaacgacctacgaggacatgctggccgcccagggtatcgaaatacccgacaccgcagacgagttctggaaccttcgcgaggaactgctcgcgcaggccaccgaactgctcgccaaggtcgaacgaaaccgagaggcatccaccgacgccgagtacgcgcagaaggctgcccgcatcgcccgcgacgatgtcgccaaggagctcaagcgcgtcgaacacgtcggttcggcgctgccggagttcgcgctcgcgatgcgcgaccacatctgcgctgcaatcaaagtcgacgccgccgagctgccctacatcgccgaactgctggatctcaggcccggccagacccgctggcgcctcgctgtcgagaaggtgctgcgcggggtgggcctgcggctactggtgcccgaccagcattgggagaaggtgctgcggttcgttaacgagaccgacatgcggggccgactgcagctgcaccacgtgcgggcgaagttcctcggcgccgaacctgctgcgcccgagccgaacacgttggcgggcaagcttttccccgtcgatccgaagcatctttgtgccgccgaagctgtcgacgtcatcaccggagccggcgaccatgtgtgcgtcgatactcccgacgtattctcgcggttccgccgcgcggtcaccgacacggggctgtacaaggactccgaccggctggccgtcaaggatgaccggcgaccggtcaagctgtccgagtacctctaccagggcgacgtcaccgcgaagatcaacgcgctgaccgtcgagctggcggccgccgaggaggcctatcagaaggcccgccgcaccgccgacgacatcgccgcccagcgccagcagtggcgcgaccgggcggcggcgtgcaaggcgatctgcgagcaatacccgcagtggagtcagatcgacaccgagaccgccgacgggcatgccgagcggctgcgcgagcagtacgaactgctgatggccgacaatcccgacatcgaggcgctcaacgcccgcgccgacgaatgctggtcgcagattcagaaactgatgacgcgccgcggcgcgatccacacgcgccgcgacagcctcgacgagcggcgcacccggctgctggagctccaggagcggctgtccccggcgttcgtgtccgagccgttgacagagctgctgcagcgctacgccgcgcagctgcccgtcgcgctagagctgcttgacccggaacctcaccgcgatgcgctgttcgccgcgatcaagaaggaacgtgaacaactgcgtgaaagccgccgtcgttcctatgacgaattggcccgtatcctgaacacgttcgacacgtcgtttcccgatgcgattccgaatgactccgacgattttgacgagcgtgtgcacgattacgtcgcgctgtgccgccacattgacgaacgcgaacttcccgaagcctacgagcggatgatgcggctggtcaccgagcaggcgcccgatgcgatcctcacgctgcaccgtgtcgccgagcaggaggcgcgacggatcagcggccagatcgaccgcgtcaacacgggtttggcggcggtggagttcaaccgtggcaccaggctgacgttgcgggcgaccccgcggcacctggtagcggtggatgagctgacccagatcgtgcggtccatctcgcggcgcatcgccgaggtcgggctgggcgacaagcaggcgatcctcgaccagtacgccgagatcctccgactacgcaaccggctggcctccacggcgccggaggacaaggcgtggacgcgcgacgcgctcgacgtgcgcaaccggttcacgttcgactgcgccgaatgggacgtcgacaccgaggaactgatccgcacgcacagcaacgccggcgacaactccggtggcgagcaggagaagttgatggcgttctgcctcgccggcgcgctgagcttcaacctggccagccccgaaagtgacaacaacaagccggttttcgcgcagctgatgctcgacgaggcgttctcgaagtccgacccccaattcgcgcagcaggcgctgcacgcattccgcaagttcggcttccagctggtgatcgtcgcgacggtgcagaacgccaccaccatcgagccctacatcgacagcgtggtgatggtgtccaaaaccgaacccaccggcggcaacgcgcgaccggtggcgtcggtggcgaccaggacgatctcggagttcacgtcgctgcgacaagagatgcgcaagacggcggaacgagtaccagccggggtgtga

SEQ ID NO: 41997 - DNA, 1461 bp, Mycobacterium abscessus
atgaatgatctgacagtcgaagagctgttcgcgcacaacgatgacgtgcagaaatcccgtgcggtccgcctgttggccgccaagaatctggccccctacatcacgctcatggaacgccacctggaccgcagcgccaaagtctccgaacctcagctggtggccaagctggaccgggacctgagcgccgtcgggctgggagaacagtccgggctggccctcatcaagagctgggcgagcgacgggtggctgcaccgagcgtcggacggcaccggccccgatgccgagaacgtctgctcgctgaccgaggacgcgcgcagcgcgctggcctttgtgcgccgcctgcgccgtgctgacacggtggccacgggcgggtccattgccggtatcgcggcaggcctcaaacgggtggccacccagctggacggcgacccgtcacgcctgcgcgccgacatcgaagcccagatcgcagaactgcagacccagctgcatgccatcgacgacggatatcgtccggaaccggatatcgtcgatcttgaggacgagacccgggccatcgcataccagatggaacaagtgatcaccgacatcgtccgctacggcagcatgcagaacgagatcaccgccggactcatcgacgccgccgaggactccgactccggcttccgcgaccgcgcccgcagaatgttcgcggactacgacgccctcttcgattcccgcgagcgtgcctcttattcggccttcacgcggaccatccaagatccggatcagcgagccgcgctacggagtgatattgcctgtgtcgcagagggtttgcctgatctcgaccccgggctgcgtgaggtcatgaggaacttcttcaagctcgtgtctcagcagatcgcggaggtctcccgcatcgaacagcgctgcgcacagcgcatccggcggttcttcgccgccggcaccacggagcaggctcgtggccgtgcgcgacagctcaatgacgcgctggcggccgggcacgctctactcaagatgtcgacggcggactctccgatcgacgccgagctaccgatcgggcgttccgccgcagcggcgatcggcgcgctgtctttcaccatcaaggacaccgcgccgccggtgctcgcacaggacgccccgtcggggccgctggatttgagcgggttctcggcgctggccacccaggtggatatggccgcattggccgatacggtcaacagtgctattgccagtggcccagtttccttgcccgacatgatctctcatgtcgaggccccctacctaggtgatgtgatcgtgttgtggtcgctggccctcaagcaggacaacactgccgaccgcgaatcggtaaaggtgaagttccggtccctcgacggacaggaccgggtgatggaggtacctcagttgatgttccgtgaaccggtgctggccaccctcgaagaggagggatcgacactgtga

SEQ ID NO: 41998 - DNA, 750 bp, Mycobacterium abscessus
gtgacgacacaggcttcagggaccgccctggggaacatcaattttgacgacctgccgggtgtcgaacccgatgcctcggcaccgcgaatggccaaggggccgcgattcgacggcgacaccagtgagcttccggacaaggcctgctgggcgctgcagaacttggtggcccggcgctacctgagtaaggacggtcagcccgaactgtgggcgtcgatgatcgagcatcgcaaggtgctggccgcgcgcctgtccgaattggacctgcggctgcgggtgttcgacgatctcgaggttgcctacgccgaaccagctccgttggagaaccccagcgtgtacggcgccagggtgttgcgccgggaaccgttgggcacctacgcgtcgatcgtggcactgcacctggccaagatcgccaggaccgcgcacgacgaacatgtattggtcagccgcgacgatattcacgaacttttcgccaacgtctcccacgacatcgaccgcgacgaggcgatgctgcgtgatcgcgttgacgaggcgatcaagcggctgtccaaggctgagattctgcagcgcacccgcgatgacgagcacagctacaccatcagcccagtcatcaacgcgctgatgtcggcgcagatgatcgaggcactgcagcgtcagtacgagcagttgcagcgcggcggtgccgcccccgaagacgccgacggcgcagaccccaccgacgaagaagatggcgagaccgatgacgacgagtga

SEQ ID NO: 41999 - DNA, 3348 bp, Mycobacterium abscessus
atgacgacgagtgatgcagcgacacaacagttctggttgtcccggctgcaggtcatcaactggggcgtcttcgacggctatcacagcatcgagttcagccgtcgcggtacgctgatcaccggctcctccggtagcggtaaatcatctctactggatgcgatctcgctggcattcttgtcttcgaaccgccgtaacttcaacgcttcgagcgacaccaccgccgcaggttccagcatgggcaagcgtaccgtcgacaagtatgtgcggggcttgtggggagagctgaaaaacccgggggagcgccccaagcagatgttcctgcgcggcaagggtggggcctggtcggctatcgccgtcacctactccggcaccgacggtcgggtgatcaccggcctggtactcaagtggcttgccccgggctcggactcggactcgtccagccgctactacctgatcgacgcggacgccgacatccgcgatctctgcaatgcatgggccagcaagggatacgccggctcggtattcgagggcgcgggttggcgcggccacaagagcgaacgctggtacctggaacagctatacgccgccgtcggtattcagggttcctctgccgcgcagcagctgctgggcaaggccaagtcgctcaagagtgtcggcggcctggagcagttcgtacgcgagtacatgctcgatgaaccggagtcgatggcagcgatatccgaagcgctagggcagatcacaccattggtcgacgcccgtgccgccttggcgatcgcgcagcgccagcggcagacgctgggcgatatcgaacagatccaacagacgtacgccagcgatgcggcgcagttggccaccgtggacgtcgtggaccatcacaccgtgcgcgactacgtggatcagcagcgcctggcgctggcgggcccggagatcgatctgctggataccgagatcacccggctgggcggtgagtgtgacgaaatccagtcgcgccaggacattctcacgggagagcgggacaaattgctcggccggatcgccgctgccgacagcaatctggcaccactcaaaagcgagctggctcatgctcgtgcccgcgcagaagaggtgtcgcgccggcgtacggcctacgacagtgcattgtgggacctgggtcatgaagacgatatcgaatctgccgaggaattcgaggccatgcgggtggagagcctgcgggcagtcacccggatcaacgctgagctcgaagccggccacgatgcatatgtcatggccgcgggtgcgctctcgacggcacgtgaccagctgcgtgccgcatccgccgaattcaagcgggtcgagcacctgggtaccccggtgccaccggatgaggaccgcatgcgcggggagatcgcggcggcgcttgggcttaccgccaaggacctgccctacgtgtgcgaactgatggatttgcgcccagggcaggaacggtggcgcaaatctgtggagaaggtgttgcgctccaccgggctctgcctgctggtgcccgatcagcaccaccgtcaggtgctgcgttacgtcaacgagaacccgatgcgtggctacctgcagatggagcgggtgattccctccggtaccccgcggcgcgccgagccgggcacgctcgccgactgtttgcgcctgaccaaccccaaccacgaatgcgccagtgccgccatgaatctggtggccggtgtcggcgactacgtgttggtcgacagccccgacgaattcagcaagcaccgccgggcggtcacagatcagggactccgcaaggacggtgaccggcgcgcggtcaaggacgatcggcgtgaattgcgggcctcccagtacatctatcagggcaacgccggtgacaagcgcgccgcgctttccgacgatgtggtcgaagcgcagcaggcggtgagtgatgccgaaaagttcatcggcgaaatggacaccaagcgcgaagagctgcgttcggaggtggtgcggtggtccaagctgcacagccagtacgagtattggagccagattgatacggactcggccgaagctgccgtggcgcgtctgcaggaccagtacgacgcgatgctggaagccaaccccgacctgaccggattgcagcagcaggccgactcctacctcgacgagatcaagaggctctccgaacgcatcggagcattgcgcaagcaagaatccgagcatgattcgcgccggacccggctgctggatctgctggacaacctgagcccgcgtgaggtgggcgggcacacccgatcgggaatcgaggcctacgtgccccaactctcgtccagcctggatgtgttggaacccgatgcctaccgactggagctgtggcggcagatcgagaaggatcagtcggtgctgcgtgagagcgtcacccgctcacgtaacgagctgaaccggattctcaacgcgtacgaccgggacttccccgactctatccccaacgacagtgagaacttcgacgagaagatccacgactatgtcgcgctctgccgccggatcgatgaacgcgacctgcccgctgcctacgaacggatgctgcggctgatcaccgagcaggcgcccactgccgtgttgcggctgcaccagctcgccgaggaggaggcacaccgcatcaccgaccagatcgaccgtgtcaatagcggtttgggttcggtcgagttcaaccggggtacccggctgaccctacgtgccgagccgaaggcgctcgaagcggtcggcgagctcaacgagcgtgcccggcggatatccgggcgtgccgtcgccgtttcgatgggggacgagaaggccatccacgatcagtaccaggacatcctgcaactgcgtaacctgttggccgctgagacacctgaggcgcgccagtggacgcgcgacgcgttggatgtgcgtaaccgcttcgtgttgtactgcgaggagcgcgatgccaggaccggcgaaccgatccgtacctacagcaacgcgggtgcgaattccggtggagaacaagagaagttgatggcgttctgcctcgccggcgcgctgagcttcaacctggctaacccggagacgggggacaaccggccggtcttcgcgcagcttatgctcgacgaggcgttctcgaaatcggatccgcagttcgcccagcaggcgctgtccgcgttccgtaagttcggattccagctggtgatcgtggccaccgtgcagaacaccaccaccatccagccctatatcgacagcgtggtgatggtgtccaagccggacggcccgggggtgcgtccggttgcttcgacgcgcactgtgccgatcggtgagctcggtgacgtacgcaaggccgtgagcgcccgctag

SEQ ID NO: 42000 - DNA, 1431 bp, Cupriavidus taiwanensis LMG 19424
atggtggattcggggtatccgcagttctttcgtccgttgacgctgaagaggcgaaagctgatcgctgcctgcatccgcgcattctatgcgcggctttatggctcccatgccgactaccgctccatccttgggcgcgaggacttgcgtgacctctttgtccagacgatgcagtccgccacgctgccggccgatcctgccggtgaagatggcgacgacggattcgccgccggtgacctggccgacgaccagaagctggcaagcgccatcgtgcgcctccttgttgcggacggctggctggaaaccgccgaggatcgcgtccgactggttaccgcctatcgcttcacccgcgccggcaagatcttcgctcaggcgctgacgctggccgaccgcccacgcgaacggacccgtcagcgcaacatgcgctcctgcaagaatgcactgagtgccttcatcgagcgccgcgatgtggaggacctgctcgacgcctacgagtatgccgatcgggtcattgccgacctctccgaagatatcgagctcttttacgacctggctcgcaagatattgctcgatgcgcatgtgcagggcaattgggatgggtttatcgagttcgtagagcgacgttttcgtgatgagttctcgccccgcctagtctatgacaatgccgagcgccaccggctggacatcggggcgctaatcgaacgtcttaacgatttgagcgcggccgagatgcaggccattgacgatgacttggccaaccacgcggcatgggccgcgcaggccgcgccggacggggcgatcttgagatggatgcttgatcggatcgacgagatggtgaccgcggcctgccggacgaaacagccggaattgttccgggccatggaaagctatgtccgccgccatgtggtcttgttgtcgcagagtctgttcatgggggcatcaggcagcggggcggcattgtccaccctgatccgccgcctgggggagatgccggagcgggatcagggcgcgtggctggagcggcagggagcggcgctcgcaccggtaagcgtggcgctgtatgatccggccgcggtgcagccgagaaagaccgccgagcgtaaccgggcacaggccgtgagcatcgttccggaaatcacacgagaagagcgtttgcgtcagttcgtgcggcaagcgcaggagcgggccttctccttgtcgcatcacgatgtcgtggattacttgctcggttccatgcgtggtacgggcgcgctgcgcctatccgagttgccggtcgacgatgctatccaggcgttatcgttgttgcgggcagtcgaggcagcacgggaccatgagggactggacgtggagcggctagatgccgagccgctggacaatgccatcatgtcgggcactgactatgcaatcaggaggcgccacatcggccatggatga

SEQ ID NO: 42001 - DNA, 687 bp, Cupriavidus taiwanensis LMG 19424
atggatgaaattacgattgggcaactggtggaagcggaactgaaggcggggggcgtccggccggaggcgttcgggcagatccttggccgcctgttcgggctgtccatcttgcaccgggaggacagcgccatcgagcgtcagctctacgacgacgccgtgcgtatcgaaggcctgctcaatgcgtacttcgatgtgggcgggttccggctgctgcacgagcgacatcagagttattttcggctttacccgccgggggcgcgcgtgccgggactgcccgccgaggacgatgctatcgcggtggacgccgtgcgggcgaagctctccgccgatttcgtggcatgctgcctggtgctgcgcttgctgtacaacgaaagcctgcgccaaggctcgatcaacgagcgcaacgaagcgcttgtcaccgtggaatacctgaatgccacgctgactgcgcaggcgcgccgctcactgccggccaagactgcgcgggagaagctcttcgccgacctgaagcgtgcccgtctgatcgattaccgggcggattccgaggtggaagatgctgacgctctggtcgccattcgtgggacgatcctgcagttcgtggcggattccgccattgatgccctgctgaccgaaacacggacgcccgtgtcggccgtcacgtcgccggagcccgacgatgaggcttga

SEQ ID NO: 42002 - DNA, 3672 bp, Cupriavidus taiwanensis LMG 19424
atgaggcttgagaagctcatcctggtcaactggggcttcgtggtgtcccgggaatacccctttggccacaccaccttgctgtcgggttcgaccggcgttgggaagtcctctttccaggacgcgatccagctggtcatgaccggcggcaagcagcacatcaacgtgttcaactcggcgcaggacgagagcggcgcctcgcgcgcgggcggcaaggtgaggcggacgctggcgtcttacgcggtaggcatgcgcgacaacctctgcgtccggccgtatggatcgcacacctatgtcgtcgccgtcttcgcgcccgatgagtgggagtccgccgaaccattcaccgccgtggtggccgtcgaagctgccgtgtctggtacgcgcgagcaaggtcgcagcgtcgacgtggcgcgcaagctctactttgtgctaccaggcagccgcgtaatggaggcggatttcatcgagtcgcgcaagggcaattccattaccgcggtgaaggtcgaggatatctaccatcggctgcgccagcgctatccgcgcgtcctgccgttcgagaacagcatcgaagattatctgtgcaagctctatgctgagtttcgcggtggtggcaagacgctggtcgggccgcgcgaggccgaagcggcggcgcgggctttcgtccagtccattgctcgcaagaccgtcggctcggtggacgagttgatccgggagcaggtgctggccgagcctgatttttccgatcagatcgggcatatcgcttcgctcatgcaaaacgtgcaacgtctgcgcaagatcgccaccgaattactggcgtgccgggagcggctgggcgtgctgaaggcacacgcggatgcgttccttgccgcgttcgaagaggccatggaggccgaactgggcgaagtactgcgccgacagcgggatgtcgaggaggagatccaaaggctggaggcctgccggcgtcttgccttagccgatgtcgagaagcagcaggcgcttgccgaccggcatgcacaggcgctgaagcgcgccacggaattgcatggcactgccaagggtcggctcaacggcaatccggtggcgcaggatcgtgagcggctcagccgcgagatagccgtggccaccgatgggcgatcccgtatcgcgctggacgttctggccgccctagcgggcttgcgcggcgtgctcgacgaactggctgccctggccaaactgcctgcaggaccggcctccgcctacgcatcccatgtggagcggctggttgtcgatgccacggcgatcgatggcgcggacggccaagccgccgcgcgtgagttggcggcgatgctgacaggcgcgcagatcgaacccgcgagcctgcggcgcgaccggttcgccaagctggatgccgccctggctcccattgcgcagcgactgcacggcgccgacggcctgtatggggcagtggtacaggagcaggcgcgggagtcggatcgcgctgccgccctgcaaggagaaatcgacgacctgaagcggcgccggcaagggctggaagatggccactttgacttgccggcgcatgtggaggtcgcagtccgatatctcgaggcccagatgccgggcgcccgtcccagggtactttgcaaccttgtccagccgcgggagggctcacgctggcagaacgctatcgaagggcttttgggcggcaaccgcttcgtgatcctggtggacgcgcaatacgaggcgagcgccatccgggcgctgcgacacgagctggtggcgactagacaaggacgagaggcttccgtggtgcagggcgaactggccaagcggcgggcggaaaaccaggcgctgtcgcccgacgccgtgctgcaggaattggtgatcgccgatgagaccgcgcgcgcctatctggttgcaagttacggccgttatgtcaaggtagcggatgcgcaggcgctgcgcggcgcgccacaggcactgaccgtggacggcatggccagtggggggttcaagatgttttcgtcatgggtggacgacggcgaactggccttcggtgccgaggcccggcgcaagcgcgtggtgaggctcgtccggcagatcgacgaaaagtcgcaggaaagggacgcacatcgcgcaggcgctgcggagttggccgcgtggggtgcgcgtctgctcgccctgcagcttgtgcctgtcgcgccaatgctggacaagctgggtgagacgcagcgcgaactgaatagtctcgcggcgcagctcgccagcctagatgacgccgatctcatcgtgctggagcggcgcgtggcgcgtgcggagcagctattggagggccaccaccgcctatccaataccgcatcacgcttagcaggcgaagcggaggggagggcgcgtggcttcgaagcgaacatcggtgacgctgaagctaagcttgttgagtgcaaagatgccgtgcgccagataaacgcccgcgtggctgaactgatccggctcaatccgcatttcgatccagtccggctggagcagcgcgctcgggaagcggccaaggagcagaccgccgcgtcctttgatgggcggcggcgccagcaagccgggatctaccgccaggagcgcgaggcattcgagcggaaactggaggcccataatctcttgtcatcctcgttcgatgagcgggtcgactttcagccttgccagtcaacccagggggagtacgagtggcaagcctatggcggcgtacctgccgcccggcgacagatctcggccatgttagaacggctcgaccaagtgcgcattctcaacaacaccagcgagctgcgggacgccgagaagagcttcaacaacaccttcagcacgcatttcgcgctggccgtacgcaccgcggtggagcagggcatcgatccgctcaagcggctcaatgagaagctcaagcgactggcattcggcgaagaccgttttgagatcgaatacgggcagatggtcaaggagtacaaaaagtacttcgacctgttccaagaactgaaccggctggccgagacacaaacgccggtggatttgttctcggccgccgaaggcgtcctttctgccgaaagcgtcgtggcgctggacgacatcaagctgctattgctcgacaccaaccgcgaccacgcattgcggcgactgaaggacatagcggactaccgcaactatcgccaatatgacatccgcaaatattcggaggacgggcgcgaggcgtccttggcaagaatggcgacgttctcgggaggcgagctgatgacgccagcctatctggtgcgggccgcggtgctggcccaggcatttcggcagttcgagaagacgccgagcctgaagctcatgatgatcgacgaggccttcgacaagatggacgaaggccgcaccgctgctgtgatgcgctatctcaatgagaaccttggcttgcaactggtggttgccatgccgtcccgcgcgtccggtcccctgctcgagttgttcagcttcgagcatcgtttttctctgatgaaggttgagggcctggcaggcgaactcgataagattaccgaggtggacagctccctcttgaaggccgaccgactacatgccctatggactgaacgtcgggaggcggtgcgccgtgaagcggcatggcagttcgacttgcaagaggcgcgcaagcagttgatctcggacatgggggcatga

SEQ ID NO: 42003 - DNA, 1164 bp, Cupriavidus taiwanensis LMG 19424
atgagcgccgacgacattccggggcgccggccggacgcgctcaccgcgttgctgaatgcactggtggaccgtatcgaggcaaagccgtttgccgagagacgccgcgatatcggcttcccgttgagtgccgggacgtggccggagtttttctcgatcgaccttcacggcgaacgcatgttcgtatggcgcgccctggaagcgctgcaggcgcaacccggatttgcactgatgctagaccagcgtcgtggccagcgggatcttgatatctgggagcgctcaccgaagctcgtcatcgcagctcaagcggaagcgtttcttcgcgacgagacggggcgccagcccaatgccgtggtcgcctggatggctcagtggcggaaggctgtgccagcgcgcgtcaacaacgcggcgctgtgcgagcggctgctgtcccgcccgatcctcatccttccgcgttcaccggagcaggtgctagagcgtttcgcgggcatcccggcgcttgcgagcgagagcctcatgctccatgaggtagcaagccggcagttctggggcctgtctaaagttctcaacggccagcaggaggccattgccctgttgcttgacacggaagtttgcccctttccagacaagccggtgcaactgctggtagctgcgcgtacagccgatcctgccgccccggtcctgtttgtggagaatgccgcaacgttcgagtcgatggcggcggggaggctgagcgccgccgagggttttgtcctgatattcgcatccggatacaaggcgagcgcgaggaggctgcgccagccgggtggcagctcagtctactttgccccgagcgtgtttgagcggaatgcggcattggggcgtagctttcttgcatggctgcatggcaccgacgacacgcgcccagttcatttctggggcgacctggattttgccgggatggatattcttaaggagttgcgcgtggtatttccagacgcgcaagcgtggaaagctggctacgaggcgctgcttgcacgcctgctcgcggaggagtcccacgcggcggatgaagcaaggaagtcgggccagaccgatccgggctttaccggctgcccttatgcggatgaagtgctgctgccagcactacgcaggcacggccgatttgtcgaccaggaaagtctgtag

SEQ ID NO: 42004 - DNA, 1401 bp, Corynebacterium urealyticum DSM 7109
atgcttcgtgcccataacgccccagctgttctttctgtcttaagtgctgtcttcgaaggaagtaatcgccagatcgccggatccgatctcactctctcagtggaatcgttgctgatcgatattcgggaacaaaccaatttggaactgcccaagtcggcagtggcttatatcaacgactgggtgaagctcggatacctcacgaggcgcagtccacagggctcgagggaggagttttacgagctcactacggacgctcacgttgccatcgattatgtgcagcagttgatcagtcctcagcgggtggtgaccaaatcccgtctcggcaccctattcaataatcttcaggatctcgcagctgaaacagaccccgacgaggcgagggcgattagccgactggaggcccagcgggatcagatccaagctcgtatcgacaacatccgcatcaacggtgtcggcgtgatttccgacgaggaggcagtggagagggcgcgggaaatcctcgccctggctagggatttgcccaccgacttctcccgcgttcgagaggaggttgaaaatgtcgatcacgaacttcgagaatcgctcgtcgaagggcaactcaacgctggtgaggtgctggacaatgtcttccgcggtgttgatctgatcgcagagtcggaggcagggcgagccttcaactccttctatgagcttttccttgacccggagcaatcaaagcagctcgatgccgtgatggatgccgtgcaatctcgggacttcatggagcagctaggcccggaagagcggattgagatcgctcaattagttgacatgctggattcctcctcggggcaggtacatacctcgctcacgggcctatctcggtcgctcaggcgtttcgtgcagtcccgagaagcagaatcgcagcaggcgctcacgcgggcaatcaatcaggcgcagcagcaagcactcgagctcgcaaaacgagggatcgcgccctacgagaaggtcggctacgagcttgagctgacgacgcggcaaccgacgtcgctgtccagctgggaactacacaatcctaaggaataccgcattgagcgctcgatggaagtcaacgagtcgggcgagatcgatttcgaacagatgcgtcagcgcatccgggaatcagaaattgactggcaggaactgcgcgtcgcaatcaacgatgtggtcggcagtaaggggcaagcatcgattcgggaagttttggaagaacatcctgctacccaggggctagcgagtgtggtggggctcatcaaacttgcacatgatcacggtgaaaggtccgacggtacggaaatcctgcagtgggagagaccaagcgggaaaaggtaccaagcacggtatgaacgtttcgaatttcggaggaaggttgggcgcatttag

SEQ ID NO: 42005 - DNA, 588 bp, Corynebacterium urealyticum DSM 7109
atggaaaataaactgtatgaaggcgataccggaaccctgacaggtttgcagcgtcgtgccctggcggaactcatccgtggcccatacgtgtcgagcgtgaaatcgccggaggtcttcactgcgatatccaactcacgggagatccttgcccaacagctggataacctcttcctcaccctcatcctcgatgagaacgcgggggttgcctacacaaaggcgtgggaagcggatgtccctgaaaagcgtgcgttgctgcgtaaacagtcattgactttcatggacacggtggtgatcctccacctgcgccgtgaactggtgacgacgagccccaacgagcgaaccatcgtggatgagggcgaggtttttgaggcgaccctgccgtatcaagggcacgccggcacagataagtccacgcagcgtaagcgttttactgcagcgtggaacaagctgaagaactactcgattatcgccagcaccccgaccgaggggcgtttcgaggtatccccagtgctgcgcatcatcttttccagcgaagaaatcgctgctgtcaccgagactttccgtgctctcctggaggaagaagaatga

SEQ ID NO: 42006 - DNA, 3351 bp, Corynebacterium urealyticum DSM 7109
atgacgacgactctgcctggccaattccggctttcccaaatccaggtttataactggggaacattcgacaacctccactgtgtcgaggtgccacgggaaggcttcctcattacgggcccttcaggttccggtaaatcgacgctaattgatgcgatttcgacgattcttgttccacccggcaagattcgtttcaacgctgcagcggataaccaagcgcactcgggtcgtaacttggttacctactgccgcggcgcctggcgccgcgagcattcgatcgaggcagacgaacttacgcagtcctatctccgaacaggtgcgacgtggacgggcgtcgctctacgctacagcgacggggcgggggagactgtaacagcgtgccggttgatgtttttgcccgcaaatgcttactcgcgtcaggagatcacagacctctatattttgcttcctcgggacgccgacctgacggagtttgaggatctggcgcagaagaacctgccggttaccgaggcgaagaagacgtacggtgatgctctgcatgttagtcgaaatcacccgaagttcagcttggcactgcgccgagcagtggggatcgcggatgccggcgctttggacctgctgaaccgaacgcaatcagccaaaacactcggcgatcttaaccacttgatgcgcactttcatgctgcccgaaccagagaccttcgagatcgcggagcaagcagcggagaacttcacagacctacgtacggcgtatgagtcggtggtgaaaactcgtaagcaaatcgagcaactggtaccggtacgcgtggcggcagagaagcgcgcagaggtcgaagacagcctgaccagggtgaaagaagaccgggacggtgtcgaaacattcgtcgacgagtggcggcagcgttttgccgaacaggagcgggatcagcggatctccgagatcaaagcagtcagcgcgacgatcgaagaagccaccggggagcgggacatgcaccgggcgcaagtagatcagctgcgcacgttgattcatggtgcacaggattcggccttggtttctgcacaggctcggcgagaccgcctgcaagaccggctggagcgagtgaccaaagaggaaaaggcattcaactcccggctcaaggccattggggctacaaagcccgggagcgcggaggaattcaccaacctcgttcttcagttgagtgaagagcggaagcggttgagcgctgcatgtgaaacggaagacggaaagctagcccaagcacatgtgcgagttcacgagctgggcgagaacaagaaagagcgcatcgcggagcttgaagcgttgcgtaaatacgaatcggccatggataaccggctgctccgggcgagagccttgattgcggagcggtctggggtgcgagaatctgatcttccattcatcgctgacctcgtgagcatgaggcctggtgaaggccactggcagggaaccgcagaacgggtgatgggtggttttgctcggcggatcctcgttccagatgaacattatgaccaggtttcttcggctattgatgggacctaccttggtgcgaaggtgagctacacccggttcacgcaggatctggaagaacagcgcccatcgcgttttgtgccgaactcgctgggcctaaaaatcaacgtgaaacccgggcggtatcacgactggatccagactcaactttctaagaatttcgattacctgtgctgtgactctatggaagagtttcgtgccgcccggcgggcggtgactgcaaaggggcaggtgaagcataaccgcaatgaccacatcaaggatgatcgccgccgaatcgatgaccgttcgaactgggtgctgtggggcaacctcgctgacaagattgatgctctccaagcatcggtgcgctccactgtggcgaaacttgaagacgctgaacgtcaacgcaagaccatcgcggctggccaggagaaacggcgtgcccaaatagctacgatcgagcggctattggagacggagcgttttcaggatatcgacgtgtcatcggtggcccaggagcttgcggaagcccagagcgacgtggatgaactcactgatgggaacgccgagctggctcagctgaaggcgaagttgaagagtgtcgaatctgctctcgacaaagttgaggagcaggtcatggcgctgcgtaatcagctcagcggcttcaaaattcgcctggagcaggcagaggaaacgcttgagagggttcggaatcgccgaggtgggaagaccgtctccgaggacgttgcagctcgtctgacagaacgttgcaaggctatcgatcgcaccatccggtccgataacatcgatgcgctcagcaaccagctcgttcgcggtattgaggatcaacttgcagagctcaatgctcggttcaccaaacatggtggcgacttggtgaacgcgatgaacctctacttggtgcgctggccggatcgagcgggcgacctcaaggcggacatggaatgggagcaggactttctccaggaactgggcaggcttgaggcagacgatttgccacgtttcgaacagcgtttccgggacatgctgcaagacgaaacccacaagcatcttgggcgcctgcggcggctgatccgtgatgcggcagcaaagacgcgcagctcgatccagatgattaatgattcgctcgctgaggtcgaattctatccgggtgcttacctgacgatcgaggtgcgggaagcacagcctgcgatcgcccgcgatttcgttgagctgctggattctgcgttggctgggattatcaatgatgctgatcaggaggagagtgagcagcgattccataaactgcaggcggtgatcgacgcagtgacggtctcggacggtacatcaactcgtgatcgccagctgcgcctggacacgaggcaacacgtgaagttcctgggcgtggaatatagcgaggacggagcgcgtggtgcggtctatgactcatcggaaggtctttcaggtggccaagcccaaaagctgtcctccttctgcttggctgctgccttgcgttaccggctgactgggatgggcctgccggccgcgcaagaaaagaaatccattgtccgggtgggggaggatatttacccgcgattcggcaccattgttctggatgaggcttttgaccgtgcggatacggagttcacccgggctgcgatggaggccttccgccgctttggttttcacatgattctggccacgcccgagaagctgctgcagaccgtgcaggactatatcgggggtgtgctgatggtggaatgcccagaccggaagcgatcgcgaacgagttctttgacgatcgaggaggtgcaggatgaagactcctga

SEQ ID NO: 42007 - DNA, 1116 bp, Corynebacterium urealyticum DSM 7109
atgaagactcctgatcaggtgcgccaacgcgctgcggtcttttactcgcgcaaccatcgcagctggctggccgggaaattcaagactctgaccatcaacctggatccgccgactggacgggcggcagagcgtgataacggcgctgccgtgcgagcatgggtggcacagtggaaccgcagttcaattaccgctgagtgggaggataaaaagctcagctacttggggacgtattcgctgccccggcgtgttgttctctccgatgcggatactgcggctcgcgtggcgggcaagctcgatcattggcaacgtcttcaggcggtcttgggccgtttctgcatggagttgggggaaagcgttcgcccagaactcatcaggcacctttcttcatgggaagactggggcgacgtgaccgtggaacagttcatcgctgttgtccggtgggtccacgaacatgaggtcagcgacttttatattcgcgaactgccaatctttggcgtcgatagcaagtggttcgaggcgcatagggcggtcgttgaagcggtagtcggcccattgaattttaagtctaaaccccagttggtagaggtccgcagccttgacccggcgctggatattagcgggatgcgatatctagcgtgcccggtggctgagctgggtgaaacgcctggggagcgggttcttatcgtcgaaaatcaccagagtttccttgccttgcccgacttgcctgcgacagtggcgatcttcggtggtggattgaacgctgccaggatcgtccagcagatcccatcgttaggggagatagacgttctttattggggcgatctggattcgtatgggttctacatcctggaactcgtgaggcgatacgtgcctcacgcgcgttctgttctcatggacctggatacggttcgggatcatgttgatcttgcggtggaggaaccgcaacctagccggtttgatcctgagctgttgagttacggggagcgcttggctttggattatctccgggggcggtctgcaggcggatgcttgcgcattgagcaggaaagaatcttgttcgactatgcgcagcagcagctatgccacgcagtgagccccaatggtgcgggtgcatag

SEQ ID NO: 42008 - DNA, 1470 bp, Xanthomonas campestris pv. campestris; identical to SEQ ID NO: 41635

SEQ ID NO: 42009 - DNA, 708 bp, Xanthomonas campestris pv. campestris; identical to SEQ ID NO: 41636

SEQ ID NO: 42010 - DNA, 4017 bp, Xanthomonas campestris pv. campestris; identical to SEQ ID NO: 41637

SEQ ID NO: 42011 - DNA, 1470 bp, Stenotrophomonas maltophilia K279a
atgaagcatcgcgaacgcattgcccgttaccgccacctgcgcgaacagccccagtggaagctgcttgccgccgaccacgctccggaaatcatcggcctgctgcagggcctgctgatggacggcgagcgcacgttgccgtcctcggtactgaacgagcgactgcagcgcgcgctggaccagctggccggcgatgaactctcgcgcgagctgccgcgcaccgcgcaggcctacatcgcgcactggctggcccagggctggctggaacgccgtctgcccgaaggcgccgaccaggagcagtacgagctggcgaccgcggcactgcaggcgatccgcttcgccgacggcctcgagcaggcccgcgtggccgccaccgaaagccgcctggcgctggtcattgaacagctctcggcgctggctgcgcagaccgaagccgatcccgatgcgcgcctgtccgcgctgcacgacgagcgcgaccgcatcgatgccgaaatcgcccgggtcggcaccggccgcgtggttgcgctggacggcaagcgcgcgctggaacgcacccgccagatcatcggcctggccgacgagctgaccgaggacttccgccgcgtgcgcgatgacttcgagcagctcaaccgcgatttccgcgaacgcatcatcgacgacgagggcgagcgcggcgatgtgctgtcgcagctgttcgaaggtgtggatgtcattggcgaaagtgacgccgggcgcagtttccaggccttctggcgcctgctcaacgacgccgaacagagtgcccagctcgatgccgcgctggaagcggtgctggcgcgcggcttcgcccgccgcctggaccgcaacgaacgcaacttcctgcgcagcttcaccagcaccatgctcgagcgcggtggccaggtacacgacgtcctgcagaacttcgcgcgcagcctgcgcggcttcgtgcagagccgtggctacctggaacagcgccgcctcaaccagttgttgaagcaggcgcagtccgaagcgctggccctgcgcgacgaattccccgcacaacgcggcatcggccgcgacctgcagctgaccaccagccgcctgcgctcgtggtcgcagtggaagctgcatgatccgcgcagcgcccaggtcgacggcaatgtcgagtacaacgacgcggccgcgatcagcctggagagcgtcggcgacctggtcgcttcgtccgaaatcgacttccgcaccctgcgccgcgacctgcacgacctgctcgatgcacagccgcggctcagcatcgcccaggccctgtcgcagcgcgaggcgccgcagggtcttggcagcgtcatcggctatctgtcgctgggcacgcgcttcggcaacgtggtcgccggcgagcaggagcttgcgcaatggcgtggtggcgacggccaggtccgtcgcgcccgcatcccgctggtttggttcacccaggagagacgccatgagctggcatga

SEQ ID NO: 42012 - DNA, 702 bp, Stenotrophomonas maltophilia K279a
atgagctggcatgaagatcccatcgacgcagcgcaggccgacgtggcggaagacgcctacgaggccgaaccggtggcggccgtggcgcagccccgccgtggcaacgacgtctattacctcggcgacaccgggcgcctgccgctggatgcgcgccgcgcgctgtgccagctgctgatcggccccagcatcgaccagctgcgccacgccaagctgtggccggcactgatccgcagcgaagcggccatccgctcgtcgctggcggacctgttcctggaactggtgctcgaccgtgacagcggcgtggcgttcacccgccaggccgataccgaagacgtcgacgcgccggtgctgctgcgcacctcgccgctgaccttcatcgactcggtgctgttgctgtacctgcgccagcagctggccgaagccgatgcgcgcggcaaccgcgcggtggtcgccgatgccgaaatggccgaagcactggccatctacgaaaagaacctgtccaccgaccgcgccggcttcaaccgccgcgtcgcctcggcggtgcagaagatgaaggacaaccacatcctgacccgcctcagcggccaggaagaccgccacgaagtctcgccggcgctgaagctgctgttctccgccgaagacgtgtcccagctctcggcggtctaccgccagctgcgcgaaaccccggccgccgaggcctga

SEQ ID NO: 42013 - DNA, 3381 bp, Stenotrophomonas maltophilia K279a
atggctatctccaagcacactcctgccctgttcaacgaaggcctgccggacccgcgcctgcagcagttccgcatgcgccgcctgcaggtacacaactggggcaccttcaacggcctgaccgaagtgccgatcgccgagcgcggcttcctgttcgtcggacgttccggctcgggcaagtcgacactgctcgatgccatgtccgcgctgctgacgccgccggccatcgtcgacttcaacgctgccgcgcgtgaagccgagcgcagtggccgcgaccgcaacctggtgtcctacgtgcgtggcgcgtgggctgaccagcaggacagcggcaccggcgaaatcgccacccagtacctgcgcaagggcgccacctggaccgcactggtgctggaataccgcgccggcgacggccgcgtggtcagcttggtgcgcctgctgtggatctccggtaacggcacctcggccggtgacgtgcgcaagcactacatgattgccgagcgcccgttcgacatcgccaaggatcttggtgggttcgacctggacctgcgcaagctcaagcagaagctgtccgacctgcaccacttcgacaccttctccggctacgccgagcgcttccgcgacctgctcggcatcgacaacgagatggcgctgcgcctgctgcacaagacgcagtcggcgaagaacctgggcgatctcaacgtcttcctgcgcgacttcatgctcgacacgccgaagaccttcgacgccgccgagcgcctggtcagcgacttcgccgagctcgatggcgcgcaccaggcggtggtcaccgcccgtcgccaggtggagaccctgctgccggcacgcgcctactacaacgacctgaaggaaatgcaccgccggcgcggcgacgacgaagccctcaagctcggcgtcgacagcttccgtgaaagccgccgccaggcgctgatcgaagcgcgcctgcgcgagatggacgtgcgtgaccgtggcctgcttggcgaagaagcccagcgccgtgccgcactggacaatcacaccgagcgcctggccgaactggaactgcagcgccgccagcagggcggtgagcgcatcgaagaactggaacgcgagcagggccgcgccgaagccgagcgcgaccgccgccaggccaagcgcgagcaggcaagcctggccgcgcagcagctgggggccgaactgccggacgacgcacacggcttcgccgaactggttgagcgcgcacagaacgagctgcaggaccgccagcgcgcctcttcggcgctggacgatgcgatcagcgatcgcctgggtggcaagcgcgatgacgagcgccgcttcggcgaggtccgtgcggaactcgaagcgatgcagcgcacgccctccaatatcccggcgccgatgcagaagctgcgcgcgcgcctggccgaggaaaccggcatcgccgaagcggcgctgccgttcgtcggcgaactgatccaggtccgctcggaagagcagggctggcagggtgccatcgagcgcgtgctgggtggcttcgcgctgtcgctgctggtcgacgacaagcattacaacgacgtcgccgagtgggtgaaccgtacccacctgggcatgcgcttcacctactaccgcgtgcgccgcaacgatgatgcgttcgcccgtgagccgtcggcgaagtcgctgctgcacaagctggaactgcgcgaacacgtgttcgaaagctggctgcgccgcgagctcggcaagcgattcgactacgagtgcgtggatgccaagcagctgcgcaacgtcgaccgcggcatcacccgcgaaggccaggtcaagcatccgggcgaccgtttcgagaaggatgaccgcagtgcggtgggcgaccgccgtcgctggatcctcggcttcaacaaccacgacaaggtgggcgccttcgagcgcgaagctcaggaactggccaagcgcatcgccagctgcgagaccgacatcgcgcgcctgcgtgggcagcgtgaccgcgacaacgaacgccgcctggcctgccacgagctggtcagcatcagctggaacgagatcgacatcgccgccccgcagcagcgcctgagcgacatcgaggccacgctgcgcgacctgcgcgaaggcaatgccgacctcgccaagctggccaagcagattgacgccgtgcgcgccgacatcgagcaggcccgccgcacctatgaagacgtccgcgtcgagcgcgggcagctggtcaaggaacgcgaccgcctggaccgcgcgcgccagcagagccgtgcgctggtgctgccgagcctggcccaggagcaggaagccggccttgccgagcgcctgcaggagcagggtccgctcagcctggaaacgctggaagcgcacatgcgccaggtcagcaacgcgctgaacgagcagctgtcgtcctcgcagcaggacctcaaccgcatcgagaaccagctgatcggctgcttccgtcgcttcatccagcaatggccggaggaatcgggcgacttcaccgtgtcggtggcctcggccgaggacttcctcgcacgcctcgaacgactggagcgcgatggcctgccgcagcacgaagagcgcttcttcgatctgctgcagaaccagagcaagaacaacctgctggccctgcagcgccacagcgccgaggcccgcaagtcgatcggccagcgcctggacgaagtgaacgccagcctggaacaggtgccgttcaaccgcggtacgttgctgaccatcgaactgagcgaccgtcgtctgccggaagtgggcgagttccagctgcagctgcgcgaagtgctgtcgcagcagcagaccgagcagcgcgagctggccgaatcgcagttcaccgtgctgcgccagctggtcaaccgcctgggctcgcaggaaggcgaggacaagcgttggcgggagctggtgctggacgtgcgcatgcacgtggagttcatcggcgtcgagctggatgcggaaacgcgccagcaggtcgagatctaccgcagcggcgccggcaagtccggtggccagcgccagaaactggctaccacctgcctggccgcggcactgcgctaccagctcggcggtgccgacagccagctgcccagctacgccgcagtggtgctcgacgaagccttcgacaaggccgacaacgagttcaccgcgctggcgatgaacatcttcgacaacttcggtttccagatggtggttgccaccccgctgaagtcggtgatgacactggaaccgttcatcggcggcgcctgcttcgtcgaaatcagcggccgccacgactccggcgtgctgctgatcgagtatgacgaggaaggcaagcgcctgaagctgcccgagcgcagccgccagcaggccaacgaaccggaagaagccgacgcctga

SEQ ID NO: 42014 - DNA, 1413 bp, Methylobacterium extorquens DM4
atgctgttcactcatctcgccgacgacctcttccgaccgctcgcctcgccgagccgcgccttcaacgcggccctgctgctgcacctgcatgcccgcgtgttcggcgatgccgccgagcccctgcgcaagagcgagttgctggccgccatcggcgatttctccgccggctggagccaggccgagatcgccgacgacgaggcgacgccggtcgatccgatcgagcggcgctcggcggtgttccggcggctgatcgaggcgggctggctggtggagcggcgcgagcgctacgtgccggtggtcgatttcgaccccgatgcgcggctgctgatcgaggaactggcccggatcgagcgcggtgagacccgctcctacggcggcgcggtgctcgaagtcctgagcgcgctggagagcgccatcgccagcccggccgaccgttcggaggccctgcgcaacgcggcgaaagcctcgcgcaccttcctcggccacctgcgcggcttggccggcgccatgcgcaagctcgaagagcggatcctgcgcgagcccgatctcagcgccgccttccggctctatttcgaggagttcgtcgagcgccacctcgtctccgactaccgaactctgcacacccgcttcaacccgttccggttccgctccggcatcgtgcgcgaagcgggacgcgccttgcgcgatccgctgacgctcagggcgctggccgacggcaacctgcgcgaaggccgcgccgccgacatcaccgcggccgagcggatggtgcgcaccgacctcgtcgaaatcctctcgatcttcgagggcctcgacccgcatctcgacgcggtggccgaggtggtcgcccggctggagcggcgcatctcggccgcactccgctaccgcgacccacgcgattcggcccggatcgagcgggcggcggcggcgctccgcgcggtcggtgccggcgaggacgacctcgccggcctgcccttgccgcagatctcgctgttgcgcccgccgatcggcccgccgcagctcacgaatccgcgcatgccgcgccggatcatcgagtacgagccgctgccggagatcgacatcgatccggcgatcgaggcgttcatcgccgccaaggacgagttccgccgccgcatcaccgtgacgccggagcgcatcgtcgcctatctcgacgcccggctcgcccaggtgaaggccctgcgcggctccgacatccaggtcgatgacgtcgatgccttcgtcgtctttcagcgcctgcgcgagatcgacgtgctgttcgacggcgtcctgcgcagccgctaccgcgtcgctcggatcgagggccgcgtctccaacggctggctcgactgtccggacttcatgatcgagcgcataccgccccccgccgcccggcgcggagccggcaaagcaggctga

SEQ ID NO: 42015 - DNA, 636 bp, Methylobacterium extorquens DM4
atgctcgaacccttccgcgccatcctcgacggcgaggagacgcccccgcccggcagcgccgcgccgagcgaggaggaactgacccgcacgcttcaggtgatgctgaagagccagtgcatctacgccgcgaccaccggcatcggccgctcctacgaactcgcgcggcactacgcgccgttcttccgcgactacttcgcctgcctcggctaccgcttcgaggtcgcccaccgcgaccagatggtgttcctcgccctgccacccgacggcgtgcgccacgacgcgcagggcgagcgcctgcgcaaggacgaaacgctggtgctgctggcgctccggctcgcctacgaggagggcctgcgcgatcaccgggtctccaccgacggcacggtggaatgcaccaccgacgacatcgccgacgcgatccgctccgccgcccgcaccgagcccccggacgaggcacgcctgatcgagattctgcgcctgttcgcccgcaagggcgccctgcggctgggcgagcgcgaccgggccgagcgggtcacgccgctgatggtgatgccgggcatcaccgtgctctcgccggatgcctggatggatcaggtccgcgcctgggcctccgccggggaggggaggggcgtctga

SEQ ID NO: 42016 - DNA, 3480 bp, Methylobacterium extorquens DM4
gtgtaccgcctcaccgacattgcgatctcgaattggtacctcatccggcgcgagcagatccggattcggggcgcggcggcgctcgtcggtcccacgggggcgggcaagtcgacgatcttcgacgccgtcggcacggtgctggccggcaacaatgcgagccggctcgcgctcaacgcctccgcctcgggccgcagcgcacgcacggtgcgcgactactgcctcggctggatcagcgacccggccgagggcgggcgcccgacgcgcgaggcctgcgaaaccctcattgcgctcgtgttcgagaacccttcgagcggccgcatcgtcacggtcgggctggcgcttgccgcccgctccgaggagccgaaggaggagacgctttcgcgcttcatcgccgtcggccaccgtttcgagatcgccgattacgtgcgcgagaccagcgagggcagcttcgtcgcgccctgggccgagatcgccgcggatcttcgccgccgggccgatacgttcgaggagtttcgcacctccggcgagcgcttcaccgccgccgtgctggcgaccctgcgcgagggggcggccgtgcccgatccgcgccagttcctgcgcaccttctccaacgcggtggcgttcaagccgatcttcgacaccagcgccttcgtacgcagcttcgtgctggaggccgagccgctcgatgtcgcccgcatccgccagtcgatcgagacgtggcggcgcctgctggagaccatcgaggaactggagaagcgcctcgcccacctctcgcgcatctgcgcgcgctacgagggctgggcgcgggcgagcctcaccgccgccctggacgagatgcgcgccgccggtgcggatctgcgccgccgcatcctcgaccatgcggaggcccgccgcctgctcgccgagacgtcggagcgtctgcgcatcgcccgcgaaagcgtggcgacgagccagggcttcgtgcgcgagatcgacaccgagatcgccgcgcgtaaggcgctgatcgtcggcagcgtcgcggaggcgcggctcgcggcctcccatgccggtctcgccatggtcgcccgcgaccggcgcgatctgacgaaccgcctcgccgggatcgtcggcctcgtgcaggatgccggccgcctcagcgccatcgccggtcccttgcgccggatcgatcttcaggcggcgcgcatcgtcgaggcctgcgcccgctcggggctgcgccgcgaggcgccgcctgaggacattctccgggtcgatgggccgctgaaaggtctgctcgaagggctcgcgcagatgccggacgtgtccggtaccctggaaaaggaagcggaagacctcgccctcaaggcccgcgagcgcgagaacgaggttcgcggcctcgatgggcaggtgaatgccggccgttcctcggccgcgcgcctgtcctccgacacggaggcgttccgcgaggagctgggccggctcggcatcgaggcggcgccgatctgcgaactcgccgagatcgtcgatccgaaatggggcccggcgctcgaaggcctgctcggccgcgcccgcgaggccctggtggtcgagcccgaccggctggaccgcgccttcgccctgctcgagtcccgaaaaaatcagttcttccgctgtctcctggtgaagaccaccgacacagcgcggcggtccgtgcggcgcttcgatgacgggccgatgggcctgatcgagaccgacagcgaccacgccgaggccttcctcgccgcgcggctcggcggctacgacctcgccccggacgatgcggcgctccggaacatgagccgcgccgtggcgccgagcgggcgctcgacttcgggcatggcctattcggtggtgcgccccgtgccgctgatgatgacccgcggccagcgcgggcccaccgccgagacccgccgccgcctcgacgaggcgcgcgaggaggcgcggaccctgcgggccgaggccacggtgatgcgcgaggccgcccgcatcgccgcgctgctgcgcagccggctggcggaagcgccgatcgatctcgaggccctgcgcgcggaggccgacgccatcgagggccgccgccgcagcctctccaccgagcaggagaccgtcgcccgcgccgatgccggcgtgatcgaggcggaattgaaggagcttcaaaaggagcgctcggcctatctcaccgaactcgtgcaggtgctggagcccaaacgcgacgccgcactcgcggaggaggcggggctgaaggcccgtgtcgcgcaagggagggaggcggcgcgcgccgcgttcctggcctaccgcacggcgctcaagcgctggacctccggcgacaccgtccgcatccgcctcaccggcaccgttcccgccgacgtgccggacacggtggccgggatcgccgcggcacgggcggaccgcgccgcgctcgacaccaaggcgctggcgtcgctggcctcacaggcccgcgcctccgcccgcgaggccggcgacagcgtgcgcaaccagggccgcgccgccgagcgggatcttgccgagtattgcgccgcgtggcgcgtcgagaacccgctcggttcgggcgagcagccagcctcgttcggctatgcctgggcgacccgcgagcgcgacgaggtggcagggcacgaactgcgccgctaccgcgaccagtcgctccgggcggaggccgagatgcgccgcctgatgaccgaggatctgctgacgcggctcgccgacaagttcgagcggatgcgtgcccggctcgatgccctcaacgagcgcctggcgtctcagaccttcaccggccagacctacgccttcgaggcggaggtggaccgccgctacgccgccgtccacgcgctggccacggaagtcgcgcgctcgcccgatgcggcgcaggcggtgctgccaagtcccgacaacggtgctgagggcggaccggataacagcccgctcgcggccgcactcgcggagatcacggcgctgatcgagggcgaggagaacgcggcgcggctggccgattaccgcaactacttcgtctacgagatcggcatgcgcgaccgggcgggcaaccgcaccaccctgtcgagccgggcgctgcgcgggtcgggcggcgaggcgcaggcgccgttctacgtcgcgatcgccgcctccatggcctcggcctattatcccggcgaccgccccggcgacgagacgccgggcctcggcctctgccttctcgacgaagccttctcgaaactcgacgtgcgcaacagccagtcgctggtcgatctcttccgcgcctggggcctgcaactcctcatcgccgcgcccgaggacaagcgcacgacgctgacggaagtgatggatacggtcgtcaccgtgtacaaaagcccggatctcggctcggtgcgaatcgaggccgagcatccgctggaaaccgccaagcgggcgctggctgaaatcaacccggaccggcgcggaatcgacgcgttccgcctgcccagcgccgccgaataa

SEQ ID NO: 42017 - DNA, 1470 bp, Xanthomonas albilineans GPE PC73
atgaaacaccgcgcccgtatcgcccgttatcgtgcgctgcgcgagcagtcgttgtggaagctgctcgcggccgatcaggcaccggaaatcatcggcctgctgcagaccttgctgttggagagcgagcgccgcttgccgacggcggtgctgcacgaacggctgcagcgcatgctggacgatcttaacgccgatcagctggcgcgcgacctgccgcggaccgcgcaggcctatgtcgcgcactggttggcccagggctggctggagcgtcggttgccggagggtgcgcagcaggaagactacgagttgtcgactcaggccttgcaggcgatccgcttcgtcgatggactggaacatgcgcgtggcgccgccaccgagagccgtctggcgttggtgatgcagcagctggcgcaattggcggcgttgaccgaaaccaatccggatgcacgtttgtccgcgctgcgtaacgaacgcgaccggatcgatgcggaaatcgcgcgagtttccgcaggcaaggtcgcctcgctggatggcaagcgcgcgctggagcggacgcgccaggtgatcgccctggccgacgagttgaccgaggatttccgccgcgttcgcgacgatttcgagcaactcaatcgcggcttccgcgaacgcatcatcgacgatgaaggcgaacgcggcgagattttgggcaagctgttcgaaggcgtggacgtgatcggtgacagcgatgccggtcgcagcttccaggcgttctgggcgttgctcaacgatgccgaacagagcgcgcagctggatgcggcactggagacggtgctgtcgcgtggtttcgcgcgcaaactcgatcggcgtgaacgcagcttcctgcgtgggctgaccgccaccatgctcgagcgcggcggtcagatccacgatgtgatgcagcatttcgcgcgcagtctgcgcggcttcgtgcagagccgtggctatctcgaacaacgccggctcaatcagttgctcaagcaggcgcaggccgaagcgctggccctgcgcgatcgcattcccgcgcagcgcagcatcggtcgcgatctgaaattgaccagcagccgcttgcgctcgctggcgcagtggcgcctgcacgatccgcgtcagcaacagatcgacggcagcatccagcgcaacgaagcggcggcgatctccttagacagcgttggcgacttggtggcgcaatcggagatcgatttccgccgtctgcgccgcgatttgttcgagttgcttgccgtgcatcggcagttgtccatcgctcaggtgctggcgcagcgcgaggctaaccagggcttgggtagcgtgatcggctatttgtcgctgggtacgcgccatggcgttgtccttgccgaacagcacgaacgcgcgcactggcgcggcggcgatggccagtggcgcagcgcgcgcattccgctggtgtggttcactcaggagaaacgccatgaattggcatga

SEQ ID NO: 42018 - DNA, 708 bp, Xanthomonas albilineans GPE PC73
atgaattggcatgatcatgccgatgcgcctgatccgacatgcgataccgacaccgcgaccgccgcagataccggtagcggattattcgcaggcgacagtggtggcttgccgctggacgcgcgtcgtgcgctgtgccagttgctcagcggcccgagcgtggacgcgcagcggcacagcaagctatggccggcgttgttgcgcaacgaagcggcgatccgcagcgcgctgtcggagttgttcctggagttggtgctggaccgcgaagccggtatcgcgttcacccgtcaggccgacaccggcgaactggaaacaccggtgctgctgcgctcggcgccgctgaccttcatcgattcggtgttgctgctgcacctgcgccaacaattggccgaagccgatgcgcgcggggtccgcgcggtggtggaggaagcacagttgagcgacgcgttggcggtgtacgaaaagaacctgtcgaccgaccgtgccggtttcctgcgtcgtgtcggcaatgctgtgcaaaaaatgaaggaaaaccacgtcttgacccgcctgcgtggtgaagaagagcgttgcgaagtctcaccagcactcaaattattgttctccgcagaggatgtggccgcattggcccaggtctaccgcgaactacgcgaggcgccggaatccgtggaaaacagtgatgcggccgcagatgtgtctggtgacggctag

SEQ ID NO: 42019 - DNA, 3450 bp, Xanthomonas albilineans GPE PC73
atgaaatcttccgcgtcttccagcttgtttgcctgcgatctgcccgatccgcgtctgcaacagttccgtatgcggcgcctgcaggtctataactggggcacgttttctggcctgaccgaggtgccgatcgccgcgcgcggtttcttgttcgtcggccgttccggttctggtaaatccaccttgctggacgcgatgtcggcattgctgacgccgccgaacatcgtcgatttcaacgccgccgcccgcgaggccgaacgcagcgggcgcgaccgcaatctggtgtcctacgtgcgcggtgcctgggccgaccagcaagacagcgcttccggcgaaatcgccacccaatacctacgcaagggcgccacctggaccgcgctggtgctggaataccgtgacggcgaagagcgcgtggtcagcctggtgcggttgttctggatcgccggtagcggcgctgcggccggcgatgtgcgcaagcactacatggtggccgagcgcgcgttcgatatcgccaccgatctggccggcttcgacctggatctgcgcaagctcaagcagcgcctgtccgacgtgcatcacttcgacagcttcgccggctatgccgagtgtttccgtcaccagcttggcatcggcaacgaaacggcgctgcgcttgctgcacaagacccagtcggcgaagaacctgggcgatctcaatgccttcctgcgcggtttcatgctcgaagagcccaagacctttgatgccgccgaacggctgcttggcgatttcgccgagttggatggcgcgcatcaggcagtggtgaccgcgcgctgccaagtcgaaaccctggccccggcgcgcgactatcatgccgagttgatggtcttgcgccgtcagcgcagcgagctggaggaactcaagctcggcttggatccctatcgcgagcagcgccgcctggccttgctggatgcgcggttgcaagcgctggacacccaggatcgtgggctggccggcgaagaaggccagcggcgtgccgcattggagaaccaccagcgtcgcctcgacgatctggaagcgcagcggcgcgcacaaggtggcgaacgcatcgatgcgctggagcgcgaacacgcccaggtggaggccgagcgcgaccgccgcgcggccaagcggacccacgccgaacaggcctgtggtgtgctggagcaggcgctggccggcagtgcgcatggtttcgccgaacaggccgcgcaggcgcgcgcggcgctggaggatggacagcgtgcggccgccgaactggacgaggcgatcctccaacgcatggcggtcaaggctgaggacgaaaaacgcttcgccgaggtgcgcgccgaaatcgaaacgctcacgcgcaatccctccaacattccagcaccgatgcaggcgctgcgcgcgcggctgagcgccgatacaggcgtgccggaggcggcgctgccgttcgttggcgagttgatccaggtacgtgccgaccaagccgcctggcgcggtgccatcgagcgcgtattgcatggtttcgcgcaatcgttgctggtggacgaacgccactacgcggacgtggccgattgggtcaaccgcacgcacttggggattcgcctggtctattaccgggtacgcgacaacgcgcaggcgctgtcctctgccagcgcgcctgggtcggtgtcgctgctgcacaagctggaactgcgcgaacatgccttcgctggctggctgcgccgggaactgggcaagcgttttgactacgactgtgtggacagcgccaaggcgttgcggcaggccgaacgcggtatgacccgcgaaggccagatcaaacatcctggtgagcgttacgaaaaggacgaccgccatgccatcggtgaccgccggcgctggctgttgggcttcgataaccgcgacaaacgggccttgttcgagcgcgagggccaggaactggccgcgcgcatcgccgcctgcgatgccgacgtggtggcgttgcgcgcccgccgcgaacgcgcgggcatgcagcgtctggcgcagcacaccctggccaatctgggctgggacgagatcgatgtggccgcgcccttgcagcgactggacgacatcgcgcaggcgctgcgccagttgcgcgaaggcgacgccaacctgcgcgccctggccgaggcgatcgaccgcgcacgcgccgacatccaacatgccgaccgcacctatcaagatgtccgcagcgagcgggtggtgctcggcaaggagcgcgcgcgcctggaaaagcagcgcctggaatgtgccgatgccgacgcgcgcgtcctcacgccgctgcaacgccagggcctcggcgagcgcctggaggtgctcggcacgttgagcctggacaacctggccgatctgttccgcaatctggaacgcggtatcgaagcccagctcggcaccagccagcaggaacaccatcggttggagcagttgctgctaggctgctttcgccgctactgccagcagtggccggaagacagtggcgatttcagcgtcagcctctccggcgccgacgacttcctcgcccgcttgcagcgcctggaacgcgatggtctgccgcaacacgaagcgcgcttcttcgatctgttgcagagtcaaagcaaaaacaatttgctggcgttgcaacggcatgccgccgaggcgcgcaagtctatcgctcagcgcctggacgaagtcaacgccagtctcgaacaggtgccgttcaatcgcggcactttgctgaccatcgaattgagcgagcgccgtttgcccgaggtgatcgaattccagcaatgcctgcgcgaggtgctcggtcatcaccagaccgaacagcgcgaactggccgagcagcagttcgccgtgctgcgcgcgctggtacgccggctcggttcgcaggagggcgaagacaagcgctggcgggaactggtgctggacgtgcgcctgcacgtggagttcgtcggcgtggaactggatgccgccacccgccagcaggtggagatttatcgcagcggcgccggcaaatccggcggccagaggcagaagctggccaccacctgcttggccgcggcgttgcgctaccagctcggcggcgaggacggcgaactgccgcgttattgtgcagtggtgctggacgaagcgttcgacaaggccgacaacgaattcaccgcgctggcgatgaatatcttcgcgaacttcggcttccagatggtggtggccacgccgttgaaatcggtgatgacgctggaaccgttcatcggtggtgcctgcttcgtggagatcagtggccgtcatgattcgggtgtgttgctgatcgaatacgacgaggatgccaagcgattgaagctgcccgaacgtgcgcgcactgcagacccgactgcggctgagctggtcgaaatcgctgcgccgacgggcagcacgtcgcgccggcgcgtcaccgctgacgcatcacctaagacctga

SEQ ID NO: 42020 - DNA, 1119 bp, Xanthomonas albilineans GPE PC73
gtggcggttgcaccgtggtgcctgctgatagatgccgccaccccggcgccgatcgcgttacgggtgccgacccaggcgcaggccagtgctgggttcgccgcgttcgggcaatggctgcaggcatggcgcggcacggccttgccggggcgggtggagtggggcgaggtgaaatggtcgcaactgggcctgcaacgtttgccgcaggtttggcatgccgatgccagcgaggccgccagcgcgctcggcgaaggagcgcgttggcagcaggcgcgccagcgctgcgcgttgctggcccaacgctggccgcagacgacgggacttgccgcgcgcgtgcaccggcagttcgatctgctcgccgatgcgccggagggcgatttcgcgcgtttgatcgcggtcgtcgattggctgcatgcacatcccgacaacggcctgttcctgcgccagttgccgattgccggcatcgacagcaaatggatcgagccgcgccgcggagttatcgccgattggctggccgggctgcgtggcattgccgaacagcgcagcttcgacagtctgtccggactgcgccgcgcacccgaccgggtgcgcctgcgcctgctcgatccggcactgcgcgcgcggctcggcggcctggaggacgtgcacgcgccgattgcccaggtcgccgcgttgcaactgccggtacgccaggtgttgatcgtggagaaccgcgagactggcctggcttgcgaggacctgcccggcacgctggtgctgatggcgcgcggttatgccgtggactacgtgcgcgccatcgagtggttgcgaccattgccgctgtactactggggcgacatcgacacgcatggcttggcgatcctgcatcgcctgcgccggcacgcgccgcagacggtcgcgttgctgatggacgaaaccacgttgcgtgatacgccgtccaacctgtggggacacgagcgccgccagcatcgcgcgcagcggctggacgcactgagcgcggctgagcaaaccttgtacaccggcctgcgcagcggtcgcttcggtcccgcgccgcgcctggagcaggagcgcattgcctggaactacgcgtggccccgcatccgtgccgcgctcggtgagtaa

SEQ ID NO: 42021 - DNA, 1509 bp, Tsukamurella paurometabola DSM 20162
atggcgcagtccgccgccgagctgtacgccgcgttcacggacaacgccgacaacgatgtcgcgctgcgcctgctccgctcccccaacgccgtcgcctacctggcgctgatggccgcccggctgggcacgggccccgtcgacgccgaggagctcgccgatgcgctcaccgtcgacctgcagaccctcgcgcagcacttcacggaccgcgcccgaccggtcccggacggctccgacgtcctcgacacgtgggtgaagaacggtttcgtctcccgcaccctcgacgacgaggaccgcgaggtctgccagctcacccgaggagccaccaccgccctcggacaggtgcaggcggtctccctcgaccggaacgtggccaccgaaacggctctggaactggtgacggccaggctcgccgcggtcgcggtcaccgtcagccccgacccggacgatcacctgcgcgctctcgacgaacagatcgcagagctcacccggcgccgggaggcactgcgcgcgggcctgatccccgaatacgaccagggcaaggtcgtcgatgatctgaagatcgtcagctcgctggcggaacggatgccggcggacatcctcggctacggcgagaagctgcgagaacacacccgggccctgctcacgcacggccttgatgcggccgacagctccgaggcggaggcctacgcccgcaccctccagcgcctgttcgacggccatgacgagctggccaacacccccgagggcaaagccttcgacgccttctacacgctgctctccgatcatcggctgcgccgccgtctggaggattcggtggcggcggtggtcgtcggcgtcgaactaccggacgatctgcgcgaatccctgaccggcttcctcgatcggatgtggatgcaggtgcagcgggtcgacgagatccgcgggcaggtgtatcgccggatcaacaccttcgtcaaggacggcgacttcctccagtaccagtcgctgcgggcccggatcaccgaggcacagcgcgccgcggtggaggccttcgacaccgtctccgccggccgcgataccgggctcgcggtgccgatgagcgccgtcgacaccacgtccgtgggcgcactgaaattccacgacggcatcgtcaccctgccgcccgaggtccgtgagacgtcgggtgagttcaccatcgacccggcccggctgatcgggcgcgaagcgatcgactgggactcgctcgcgaacgcggtgaacaccgccgtcgccgccgccgacggtgcctcgctcaccgacgtcctcgacgccatcgacgcgcctcgcgcgggcgatgtggtgggtgtgtggtcgctcggggcgcggtacggcaccgtcgatgccgaccggcccgtgaccgtactcgcgcacaccgcccgcgggccacgtgagctcaccgtcccgcatgtggtgttctccgccgctcttccgcccctgaccccgtcctcggccgcgcccgagccgaccacgctcttcgagcaggaggcctga

SEQ ID NO: 42022 - DNA, 762 bp, Tsukamurella paurometabola DSM 20162
atgaccgacgagtccctggacatcgatgcgggcgcactgcccgagatcgacctggccgacttctccatcgccgacgaggacgcggtgcgttcgctgcgcggcgccgacaccgcgccgcggttcgacggcgacacctcacagctgcccaactcggtgtgctacgccctgcaagagctgatcgcggcgccgcacgtgtccgcgcggtcgaagaactgggcggtgatcgaggcggaggagacgctgctgcggtcccgattgtccgagctgaacctgctgctggagatcaaccgcgagaccaagcacgccttcactcggcaggtcagcgagaacgacccgcgccagcggaacctgctgcgtgcccagagcctgtcgctcgcggcatcggtgctcgccctgttcctgcgtctgaagcacctgtccagtccggacgagactgcggtcgtggaacggcaggagatgatcgaccatctgctctccttccgtcccacccgcgacaccgacgaggccgggttcgtgaagaaggccgatgccgcgatcaaccagttggagacacgccgcctgatccggcgggtgggcacctcggaccggtacgccgtgcacgcggtgatcgcatcgctgctcactccggaacaggtcgatctgtacacggccgcctaccgggatctggcgaacaccgatcacgatctcgccgagaccgccgcacccgacgagggcaccatcgacgaaagcaccgccgataccgagaccgaggagcagaagtga

SEQ ID NO: 42023 - DNA, 3363 bp, Tsukamurella paurometabola DSM 20162
gtgacgcgacgccacctcggccagtaccgcctcacccgcctgcaggtggtgaactggggcaccttcgacggctacaaggacttccccatcgacgagcgcggggtgatcctcacgggcccctcgggttcgggcaagagttcgctgatggacgcgcactcggtggtcctgctccccacctacgaccagtccttcaacgcctcggcggatatgacggcgaagggcgccaaacgtgccgcccgatcgatggccgactacgtgcgcggcgcctggtcggtcaacgatgacgagcaccagcagtccaaggtgcagtatctgcgcggagattcggccacctggtcagcggtcgccgcgacctatgacaacggcgcgggcaccgtgaccaccgcggtggcggtgaagtggttcgccggttccggcaccgacggttcctcactgaagtcctggtaccacctgcactcgggccccttcgatctgctcgacttgcaggactgggcgactgcgggcttcgacacccgcggctggcgatcacgccatgccgacgtcgaatccttcgacacccaggctgcctaccaggaggcgctgcgccggcgcgtgggcatcggtacctcgtcggccgcgctcgccctgctgggcaaggccaaggcgatgaagaacgtcggcgatctcgacgccttcatccgcacctacatgctggaccggccgcagacctacgcccgcgccgagcggctggtggagaacttcacccagctcgacgaggcctaccgtgccgccgcccgcgccgaggcgcaggagaaggtgctgcgccccatgcccgaggcgtacgagaagtaccgcaccgccaccgtcgggacgacgcgcgcggccgatctcctgggcgccccggtgcgctcgtatctgcgtggtcatcggctccggttgctccaggaggagatggaccggatcgaaggcgagcgcgcgggtatggacgcgcagatcgcccgctgggaggacaaggccgaagagcgcaaacagcgctacaacgatctgctgcaccggctgcgccaggagcagggcgaagtgggtgtcctggaggccgaactccagtcccgggaattgcagacccaggcccgccagcgcgcctatgagcggttcgccaccgcagtcgagaagctcggagagcgggcgccggagtccgcggaggaattcgcggccctgcgcgaacaggtcccgggcatccgtgatcgcgccaccgaggccgccgaggcgctcgccggtcgcgtccacagcgcctacaccgacgaatccgacgcccggcgcgccgtcgaatccgtcgacgacgagctggccgtgctggatcggcgcgcatcgctgctgccacccgcgctactcgaccagcgcgacgtgatcgcccgctccaccggtgtccccgccgaggagctcccgtacgcggcggagttgatcgatgtgaagcccgcggagcaggcgacgtgggccgccgccgccgagcgcgtgctgcgcccgctcgccaccacgctgctggtgcccgcgcgccaccagcgcgcggtggccgatcacgtgaacgcccatcgtgtgcagggcgtcctcacctaccaggtcgtcgaggggcccgaccgcactgccgcggtcgagggttcgctggccaccaagctcatcgtcgacgagcgcaccgacgccggacagtggctcgcgggcgcggtggcgcgggcggcccgccacatctgcgtcgactcccccgctgagctcgaggaccacgaccaggcggttacgccggagggcctggtcaagggagcgggcgggcggttccgcaaggacgaccgccgcgccgtcgccgaccggtcgcagtgggtgctgggaacaaataccgggtccaagcgcgaggcgctgcagcgccgccgcgacgaattggcgtcggtgcacgtcaaagccgccgaggcgtcggcgacgctgcgtgatgacctcgccgagtacaaggccgtggccgacggggccacgggggtgctcggctacgcgtcctggtcggagctcgatcactgggcggcgaaagccgaggccgaggacctcgccgaccggatctccgacgcccggtcgggcaatgccgacctgagcgagctggagctgcaggccgacaacgcctacggcgaactcgccgaggcgcagacccggatcggcgcgctcaccgagacgatgaaccgtgccgggagcgaattcgatgatctgctggccgaattcgagaagctcgacggtgagagcgccccgaaactgacggacgaggaccgggagttcctggacaccgcgctgtggcatctgctcacggccgacgaaacccggcggcgccgcctgacactggacacctacggcgagatccgcgcggatctgcgagccgagttggaacgccaacaggccgccgcgaccgccgagcgcgatgcggcggagacccgcatcgtgcgcaccgccgaacaattcctgcgcgagtggccggatgcctccaccgagctccgggccgctgtggcgtcggcaccggacttcgtcgcggtgcacgagaacctgatcgcacacgggctggccgccgcgacggagaagttccggcggctcatcaccaccgacgtcagccactcggtctcgaaccttttcaaagaagtcgatgacacgcaccgggcgatcacccgcggtatcgcggacgtcaacgccggcctgcgccgggtggagttcaatgagggcacctacctgcagatcgcgtacgccgcacggccgacgccggaggccacggagttcgcgactctggtcgacgagatggtgcgcgacgcgccggccgcgaaacgggccgaacccgaggcgatggccgcacagttcaagcggatccgcggcctggtgttgcgcctgaccggcgacgaccccgagtcgcgcaggtggaccgagaacgtattggatgtgcgcaccggctattcgttctacggccgggagaatgcggtcggcgccgaacccgacgcgccggcggtggtgacctaccgcaataccgccaccaattccggtggtgaacaggagaaattggtggccttctgcctggccgcggcgttgagcttcgcactcggcagccatggcatcgacggatcgaacgagccggcgttcgcgccgctcatgctcgacgaggccttcagcaaatccgatgaacggttctcggcgcagtccctgcgcgcgttcgagcagttcggtttccagttgatcatcgccgccccgatccgcatggtgggcatcgtcgaacccttcatcgggcaggtcatcctggtcgacaagcacaccggggcggacggtgcgcgctccgacgcccggtacgccaccttcggtgagctgacgacggcgcgctag

SEQ ID NO: 42024 - DNA, 1743 bp, Bifidobacterium longum subsp. longum JDM301
atgtgcagtaaaagtgacatattggtgctgggcgggagagagcacgcgtggcgcgggcggggtgtggttcgcggctatcggctagtatggtgcggtcacgacagagggaggcatgctgtggccgatgtgatgcgggagctggaacggctgcgaccggtgtatgagacgggcgtcctgcggttgctgttgcgccagaacgcgatgctgtacgtgtcgctgctgcgttccacgttcgacccgctcaccggcgagctgccgcgcgagaccgtggaggagcggttcgcgcaaagtctgaacgctctggccgacgccggcgaatatgctccgcgcgaggaccagaccttcgccgaggccgctcatcagatcctcgccgatctgacccgtgaaggcgaaggcgactacgcctggctcgccaactcgcatgatgcggcctcacaccgattcctctaccgtttgacggcccgtgcccaccgcgccatcgaggcgctgagcaggctcgaagacgaatcacgcgccctgtccggcgcgcaggccaacagcatcatcatggaaatcgagcacgcgcgcatgcaactgaccgccgaccccggcgagcgcatcaaactcctcaaccgtgaaatcaaggaacgcaagcacgagattaaacgcatccaacaaggcaagcagcatgccacgctgagcgaagcccaggtggaggacgtgatcgccgtgatccacaacacgctgcgcggcgtgcccatcgacctgcgcgaactcgtgctcgacgagcgggacaacggcgacgccttgcgccggcgcatgcaggccggcgacatcagcgtggacgagaacctgacccgctaccacgatgaataccgccgctcgttcagcgaatcggacagcggccgccgcttcgaggacgccttccaggtgatcatcaccgacgagggccgccagcaaatcgacgaagccctgcgcgccatcgccaaaaccccgtatctggccggcgaatccggcgtgctgctcggccagatccgcgacgaactggcccgcatctacgacggcatcgaagccgtgcgccgccagatgcgcgtctccgacgaggcgatcagccggctcgtgcgccagcaaaccgacactcgctaccgtacgatgctcacccgcttgaaccgactgtacgcgcgcctcaacgcggatgcgaaaacccatatgggagacgcctcgcgcccgtacgacacggccaccgcggacgcgctgttcgcgccattgccgatgcgcccggccaaatccatgacccgcgccaccgcacccggcctgagcgacctcgccgccgaagccccgcaggcgactccggtggccgatctgcgggatatggtcaacagcggcggcccccgactcctgcgcatggtcagcctcatccggcgcaacccggtgaccgttgacaggtccgatgacaggtccaacgcaaccctcgtggacatcgccgccagcttcaaccggctgcccgaaagcgaacgccgcgaaagcgagatcgtcggcttcctgggcgggctgggagccgcaagcggcagcgccatcgccgacgagccgtccactgacggcgtcggcatcgacagcgacatcgccactgagccggccccggcgcagcgcggcgataccgcgacctggcattgcgtatcgatcgacggcgagccccggaactggatcactagaccggtgctggccgacatggacgagctgaacatcattgtggaggaaggatga

SEQ ID NO: 42025 - DNA, 663 bp, Bifidobacterium longum subsp. longum JDM301
atgaccgtggccgaggaacacgaggaacatatggacaacgccaacccgtacgccctgttcgaaggcgacaccggcgacatgccggccgaggcacgcatggccgccatcgccctcaaacgcgaccgctatatcagcgggcccacctacgacaccgtgctcgacaaccgcgacgccgtcgtacgctccctgaacaacgacctgcttgacttggtgatcaacgaacgctaccgcatcatgtacgccacgcccgtggccggcgacgacgtgaccctgcgctcgctcaaaacccgcgtcagcctcaaacgcgaggaggccgcgctgctcgccttcctgcgcatccgcgtcctcgaatacgagaacgtgcacgccgaccccgccgactggctcgtcagctttgaggagatccgcgccgcgctcgccacaggcgccggctatctggccgcccgcaacgacgaggaaggcgtggcaaagcagatcagcgccatcgtctccgcgatgatcacctacgggtatttggtgcgcctggacgacgaagccatgtaccagatcacgccgctcgtgcccgtggtgctcgaccgcgaactggccgacacctggctcgacgtcgtggaacacggcgacggcgacacggaagatgacgatgacgagaaggaagccaaatga

SEQ ID NO: 42026 - DNA, 3555 bp, Bifidobacterium longum subsp. longum JDM301
atgatgcaggcgacagacgtgcagatgatcgcggaccggtggatgctggaatcccgccgactcatcaactggggctcctatgagggctaccacgaattccgcccctccacggaccacaagctgccggtgaccctgctcgccggcgccagcgaatccggcaaatccacgctggtcgacgcgcagatctccctgctgtacccaaccggcacgccgttcaacaaggcctcgaactccggccgctccgaacgcagcgactacacctacctgcgcggcatggtcggcgtgggcagcaccgaaaccggcgacgagccgctctacctgcgcggccgcgacgagaacggcgcaccgcaacccgtgtggggcgccatcgtggacacctatcgcaaccagaccaccggccaggtgctctcctgcgccaaattcctctacctgatgcccggcgacggccgcggcgacgtgcgccgccagtacgtggtctggggcaagcccgtggaccccaggcgcatggaccaataccgtgacgccccgttcacgccggcccagctcaaagccacctaccccgactgcctcacattccccagcgccgaagcgttccacacacacatctggagcgcaatgggcctgagcgaggccgcctgccgactgctgcacaagatccagtccgccgacgcgccctcccggctcgacgacatcttcaaacaaggcgtgctcggcgtgcccgaagccctgggcctggcccgcaccacggtcgaggactacgaacgttacgacgggaacttccacgccatggacgagaaaacccgccgcatggacacgctgcgcggcatccaacaggcctacggcgaatacgccgccgcacgcggcaaggcccgcgccttcgaaccggtcaagccggccgtcgacggcacggtgccggccgtgctgcgcgactgggcattggcccgcatgcgtggcgaagtcgccatccaactgcccgccgaccgcgccgaacaacagaacagcgaggcggaagccaagctgctgcgccgccgaaccgaagacctgcgcacccgcctcgacatgatccgaggccagatgcagggtctggacggcggcaacctgacccgactcgaactcgaactcgaccaggcccgccgcaccctcgaagacgtgcaagccaaccgaacacgaatcgaacaaacgttcgcatccatcggcgagacgctgcccggcaacgaacaggcctggaacgagcgccgcatcaacgccgtgaacttcaaacgcgaatacaacaaacgagacggcgaatgcgaggaagccctcaccgctgccatcaacgcgcgggccggcgcacgcggcgacctcgaacgactgcaacgcgacttcgaccggcaacgctcccagcgcacccgcatctcccagcagatggacgaaacccgcgccatgctctgccgcgccaccggactcgcccccgccgaactgccgtacgtggccgaactcatggacgtgaacgaacacgaggaagactggcgtctcgccatgaacgtcgcctacgcgcccatcgcccagaccatcctcgtcgacaagcgccacgaacagggcttcgccgccaaagtcagcaccatcgacccgcgcaccatgccccgacgcacctggcagttcgtggacaccgcacgccactacgacgacaccggcgcgcacgcgaacatactcaccggagaacaggacggcgactggctgtccggcaaactgcgctaccgcgacgactcgcccttcgccgactggctgcgctcgcagacccaggccgaacgattcgacgccctatgcgtcaccgccatcgacgacaccgaccgcaccaaccgtcaggtgcaggccgacggtcagatcaaatccggcgcacgcggccagcacggcaccaaagaccgcgcccaggtcatcggattcgtcaacgaaacctacctcaacgcgctcgcagcgcaggtcgacgccgcccgcaacgcgctcagccaagccgacgccgactacacggccgccaaagcacagtccgataacctccaccgcgaactcgaactggccaaccagctcgcctacacgtcctgggaacgcatcgacatcgccggcgcgcaacggaccatcacggacacgcaggacgccatcgcatccatcaaaaacgatcccaaactcgccgaactcgccaaacagcgcgacgaactgaacgccgaactcgaccgtgtggaacgccagcgcatcgaatccgaccaggccgcggcccgcgccggcagcgccgtcgaagcggcgctcatctggctgcgcgaccatgccgacaccggcacgacggacgccgccggtgtcatcgccgacagcggcgatgacgataacgccaccgccggcccactgccggacgaagtcacggcggtgctcaccgaatcctacgacaaccgattcgccggattggcggacgccgccatgcgcgcgcacatgatcatcggcgcgggcgtggccggaacgcgggcgccgggggagagtttccccgaacgcaccatcgccggcatcggcaaggacatgacctcccgcatcaatctgctgaacggccaggccgacgccgcgcgcaccggcgtcgaatcgaaaatgagcacctacatcgcgctctacgcggccgacgacgactcgctgaccgccagcgtggaggactaccggtactatctcgacgaactcgccagcctcacccagctggccgcggttgccgccaccgacgccgaataccggcgctgcctcgaacagctgctcaggagcttcctgaccatcaaacgcgccatcgacacggatgccagcgacatccacgaccagcttgaccgcatcaacgccatgctcaaaggccaacagttcggtcccaagcacggcagcctgtccctgcacgcggacgtgcgccgtcccgagcgcgccttctggacgcagctcatccgcgtcatcggcaccctgaacgattggaaatccgccgacgtcaacgattccgaagcctcgcgcaaggccttcgcggcctgtgcgccgatggtcgggctgctgcgcgccgaactcgcgcaggtcaaggacgcgaacggcgtgaaaagctacggcgcccgcaatctcgacccgcgctgccgctcgtccttctacgccatcgtgcatcatgccgacggtccggacgaacgcatcacctccaccggtggtcgctcgggcggcgccttgcaggagctcacctcattcgtatacggcgcggcgctcatctacctgcttggcggcggcctgaccagcgagccctcgtacaccacgctgttcctcgacgaggcgctcatcaaggccgacggccgttacacgcagcgcgccctcacggtgctgccgcgcctcggattccaggtcatcgtctccgccccggaaagcaagaccggtgaaatcctcgaggtctccaccaaggcctacgtgacctacaaggaccccgacaccggcctcacctccctgtgcgaggccgtgctgcatcagaatgacatggacgatgaatcatcgtcggatatattgaaggatgacggggttgccgaatga

SEQ ID NO: 42027 - DNA, 1575 bp, Bifidobacterium animalis subsp. lactis V9; identical to SEQ ID NO: 41902

SEQ ID NO: 42028 - DNA, 810 bp, Bifidobacterium animalis subsp. lactis V9; identical to SEQ ID NO: 41925

SEQ ID NO: 42029 - DNA, 3498 bp, Bifidobacterium animalis subsp. lactis V9; identical to SEQ ID NO: 41904

SEQ ID NO: 42030 - DNA, 1221 bp, Bifidobacterium animalis subsp. lactis V9; identical to SEQ ID NO: 41905

SEQ ID NO: 42031 - DNA, 1473 bp, Cellulomonas flavigena DSM 20109
atgatcactcgagtcgaaggggcgtacctgggcgcggtccgggcgttccgcaaccccatgctcgacctgctgcacaagcggcacgccccgctcgtggtcgcgctgctgtcgctcgtgttcacgtccgagcgacccaccgtgccggtcgcggacgcgcacacggaggtcggcgacgcgctcgagcagctccgcgccgcaggtcacggggacgatctgcccgtcggcggcccgcgtgacctgtgccggcagtgggcggacgccgggtggctcgtgcgccaggtcgtcgaggacgacgtcgaggtgtaccgcctgtcggcgcacgccgtcggcgcgctcgaggtcgccggacgcgccggcggcgcgcgcgcccgggtgtcgcagtcgcgcgtgcgcacgctgctggaggccgtcgagcggctcgcgctcgacgccgaccccgacgtcatggtgcgcatcgcacgcctcgacaccgaggtgaagcggctgcaggcggagatcgcgcggctcgagcgcaccggggtggtcgaggaggtcgacgacgaggagctgctcgaggaggcggagaacgtcctgcacctcgtgcgcgagctgcccgccgacttcgcacgcgtcgccgagtcgatcaaggccatgcagcgcgacgtggtcacggcgctgcggcaggaccagcggccgaccggggacgtgctgcgcgagtacctgcgccgtggcgagcaggtcatggacgccacgccggagggccgcgcgttcgccggtgcgctgcgtctgctgggcgacccccagcgcctcgacgagctcgccacccagctcgacaccgtgctgcggcaccgcttctccgctcgcctgcccgccgcgcagcgcaccgagctgcgcgaggtcgtccggcgcatcgagcaggggctcgaccaggtgttcgccgcgcagcgcgaggcgtcgtacgtgatcacgggccaggtccggcaccacgacccgctgcgcgaccggcaggtggacgacctgctgcgcgacgtcatgaccggcctgcagacgtggctgccggactcgcggcgcggccaggcggtcgcaccgttgcggcggctgcccgtcgcgggcgtcgagcacctgcgccagacaccgggtgacctgcgcccgccgcgcgcgccggacgcactcgtggagtgggacgacgacgcggacgtcaccgacggcgacgcgcgcgcctggggcggcccgcactacgcggacctggagatgcacctgcgggagctgggggcggactcccccgcggtcgacctggccgcggcgttccgcagcgcgccggagcacctgcgccgccccgtggacctgctgggcctgctggagatcgcgcaccagcgcggcatgacggagagcgacgagctggcgttcgtcgacgcggtccggcccgacggttcccgccgccggttcgcgttcggcgcggcgaccacgaggacgaaggacggatcggatgactga

SEQ ID NO: 42032 - DNA, 819 bp, Cellulomonas flavigena DSM 20109
atgactgagaccgacgtcgtgacggacgtcgtcaccggcaccgacgacgcgacgagcccgggagacgcgcgcgcggacgccttcatcgcgcccgtcgcgatggaggacgacccggccgagctgttcgccggcgacaccggcacgctcgacgccgacgtgcgccgtgtgctggtgcggctgctgcagcgccgcttcctgctggccgagcggcaccccgcgcagtggcgcaccctgctggcgcaccagcagctggtcgagtcgcgcctgcacgacctgttcgtgcacctcgtcgtcgaccacgagcgtggcatcgcctacaagcggcaggtgcgctcggcggagctcgacgtgcccgtgctcctgcgcgacgagccgtacacgcgcgcggagacgctcgtgctggtgcacctgcgcacggtgttccagcgcgagcgcggcgccggggagacctccgcgcgcgtcgacgtcgaggagctcgaggccaccgccctgacgtacttcgacgccgacgacacgaacgtcgcggcgcaccagcgggagatccgcaccgcgatcgcgcgtctcgccaaggagggtgtgatcgaggaggagtccgagggccggtaccgcgtgacgccgctggtggaggtggtgctgagcaacgagcggctcgtcgagctgcgcgagtggctgcgcacccggcacgaggcgccggcgcccgcgggcgcgggtgacgacggcaccacggacgcggacgccccgtccgacgacgaggacgacgagacgcaggacgacgacgcgcaggacggcgcggacgacgacgaggagacggcaccatga

SEQ ID NO: 42033 - DNA, 3378 bp, Cellulomonas flavigena DSM 20109
atgacgatggtcgactcgctgttcgggctcatcccggcggcgtcgacgggccagcagtgggtggccctcgacctgcagctcgtcaactggggcggctacgacgggcaccatcgcgtgcgcctggcgtcgaccgcgacgctgctgtcgggcgggtcgggctccggcaagtccacgctcatggacgcgtacatcgccctgctcatgccgcacacgacgccgttcaacggcgcgtccaacggtggcgtggtcgggcgcccgcgtggcaaggaccagcgcaacatcctgtcgtacgcgcgcggcaagctcgacgagtcgcgcaccgaggagggcacgcgccagcgcgtgctgcgcggcgacggcaaggacacgtggtcggcgatcgcgatgacgtgggcggaccagtcgggcacgcgcttcaccgcggtgcgcgcctggtacgtgccgtcggccgcgcggacgctggaggacgtcacggcggtgcgcgcgacgtgcgacgggccgttcgacctgcgggacctcgaacccgccgccggccagcgcctcgccagacccgccgtcacggccgccgggctgggctgcttcgacaccgaccgcgagttcaccgcgcggttgcactcgacgctcggcatcggcgccgccggcgacggcggcaaggccgtcgcgctgctgggccggatccaggccgggcagcagatcacgaccgtcgacgcgctgtacaaggcgatggtgctcgaggagccggacacgctcaccacggcggacgcggtggtggagcagttcgacaagctctcgggcacgcgcgagcagatgatcaccgcgcgccagcaggtcaaggcgctcgagccgatccgcgagcaccgcgccgcgatcgagcaggccgcggcccggctgcgcgtcgtcgacgccgtcggcgggttcgacgacggcacgtcgccggccgcgctgtggcgccacgagcgccggctcggcctgctgcgggcggtcgagtccgacctgcggacgcgccaccgcgaggcgcagcgcgtcgcggcggagacgtccgcccgtgcggctgcggcccgggccgagcgtgacggcgtcaagcagacgctgtgggcctccggcggcgaccgcctcgcgaccgcgcagcgcgagctgcacggcgtggctgcgcgcgtcgaggaggtcgcccgcgcgcgggcccggctcgacgaggtgctgacctccacgctcggcacgtccgtgacgtcgctcgacgagttcacggacctcgtcggccgcgcgcgccacgccttggcggacagcgacgcgaagggcgccgcgcgccaggcgctgttcgacgcgatgtcggagcgcaaggaggccgccgcggacctcgcggtgctgcgccgcgaccacgcggacgccaagcaccggcacgacaacatcccgggcgacctgcacgccacgcgcgccgcactggccgaggccgctggcctgacgccccaggacctgccgttcgtggccgagctcgtcgaggtccgcaccgagcacgagccgtggcgcgaggcgttcaacctcgcgctcggcggcttcgcgaccctaatgctcatcgacgtggcgcacctccaggcgttccgccgggcgatcgacagcgtgcgcacgggccggcgcatccggttcgagggcgtgccggccggcctgcgcgacgacatcggcctggacgggcgcacgctcccggggcggctggactaccggcagtcgccgttcaccggctggttgaagatcgagctgtcgacgcggttcgcgtacgtctgcgtcgacacgcccggtgagctcgcgcagcacgagaaggcgctgacccgcggtggtcagctctccgagggccggcgcggcgcgcacggcgggcagggcgcgcgcaacgtcctgggcttcaccaacacgcgtcggctgaccgacctcaaccgccggctcgaggccgccgaggagcggctgcgggacgccgaggcgcgcgtcggcgaggccgaggccgcatgggaccggcacgacgcgacgctgcgcgcgtacgccacggtcgtcgagctcacgtgggaccaggtcgacgtcgcgggcgtcgaggccgagcgcgaccgctggcggcgcgtcgtcgacgaggtgacgtccgggaaccccgacgtcgtgcgcctgcaggagcgggccgtcgagctcgacgtgctcatccaggacctcaccgagcagctgggccgcaccaagggcgcggccacggagctgggcgagcagtggtcgcaggtcaccgaccaggtcgacgtcgcgcagggcgctctcgacgccgcgcaggacgcgggcacggtgctggacgacgagcagcgggcctacctcgagcgcgtgctcggcggcacggacgaggatctgccacgtgtcgacgaccgcaccgacccggccgccgcgctcgcggcgttcgacggtgtcgtcgcgcgcgccgcggacctcctgaacgccgaccgcaccgccgcgcagcagaccgtcggtgcgtcgcgcgaggcgctgcggcgcgcgttcgagacgttcgtcgagcgctggcccgacccgaacctcggcaccgaccccgacgcctcgtacggcgactacgagcggatcctcaccgagctcgagacgcagggtctgcacgagctcgaggccgagtggcgcgcgagcctgctgcgcctgtcgggcaacgacctggcggacctgcacagcgccctgtcgcggtcggtccgcgagatcaaggagcgcatccggccggtcaacgacatcctcgcggacctgccgttcgcggacgacgaccaccgcctgcgcatcgacgcccgcgacacccagtcgacggtcgtggcacggttccgcaaggagctgcgcgacctgcgcgaggtgctgtccaccgaggccacggacgccgagcgcgagcgccggtaccaccgcatggcgaaggtcatcgaccggatccggcgcaccgctccggacttcgcggacctcgtcgacgtgcgccgtcacgtgcggctgtccgccgagaaggtcgacctcgagggcaaccacgtcgcgctgtacgaccacatcggcgagaagtcgggcggtgagtcgcaggagctcgtcgcgttcatcgtgggcgccgcgctgcgctaccagctgggcgacgccggggcatcacggccgcggtacgcgccggtgttcctcgacgaggcgctcatcaaggccgacgcgcggttcaccgggcgggccatcggggcgtggcgcggtctgggcttccagctcgtcatcggtgcgccgaacgacaagttcagcgcgctggagccgcacgtggacctcaagtacgtggtgctcaaggacacggcgggccggtcgcggacgaaggcggtcgcgggagtggcggcggacgccggagcgtag

SEQ ID NO: 42034 - DNA, 1551 bp, Kyrpidia tusciae DSM 2912
atgcgggatctgtttgaggtcgtgccggagaacctattctcccttttggcggcgcgccatcgcgccgtttattttcgcgcgttgatggtgctgcgggagtgctatcaaagggagctgacgtttagccggggggatttggtgacttatctgatcagccggatggagcgggatctcgtcgattggtcggaggaagaggaggcggccgacgacgccaccgagggccggcgggagagctcttctgccgagcagcggacaccagcggcagtgggggccgaaggtccgctcaccttggacctgctcctcgtccgggaagatgaaccggaacccgggtctttgtccgggcgggcccacgcccttgtgcgccgcctcatcgagacaggttggttgtacgccatcaccgacagcgatgggtttggggagacattggtggtgccgcggtacgcgagcatcctgctggatgccctgcacgccgtggtggagccggcccagcagcgccacaacgccctggtgtattcgatttattccaacctgcgcaccgccaacgacgagcgggatgagttcatgttgcaggcgttgcaatcggcccatgatgcgaccatcgccttgcgtgagaacctgaggacccttcttcacaatattcacacctactaccaaaatctccatctgcgggaggacgttcgggaactgttggccgagcacttcgatagctatcagttgtccgtggccatcgccgcctatcaccccttgaaaacttttgacagcgtgtaccgctttcgtccccggatcttgcaaatcctgcgggactggctggggttgccgagtctcctgcaacagatggcagccgccctcaagcaacagcgggacgatctggacgataccgcggcccggggggaagtcgtgcgtctcatccattttatcagcgatacgttcgaatcgatggacgatctgttgcgggagatcgaccaccgcaacacggcgtacaaccgggcgtcggtggaacggttgcagtatcttctcaacagcgacagagacatcaagggcaagttggtgcaactgttgcgctctcttcccccgtggcacagtcaggtcggttccgcgcagttggaggcgatgcgggaacttcccctttacgaggtccactacctggatcccgaagccctgtactcggaacccgtgcggcgggagcgcggccaaccccaacctttgcgccggccgagtggcgcggaggacgcggcgtttgagcaggaggcccgggagctgatggaacgggcgaatgccctgttttcccagcagcggatcgcggagtttattctctcccagatggacgaacgggggaggttgcccaccccggtcatgcggttggacgagtgggatgatttcatccgaacgatcgtcgccgtggtgcggggggacgagccggagatgccgtatgtgatcgaatgggatgaagcctcgcggtcggtggtggtggggccgtaccggatcccgcttctcaccttcctgcggaaggagggagccgagtggattggccgaaccaatacctcgccctga

SEQ ID NO: 42035 - DNA, 771 bp, Kyrpidia tusciae DSM 2912
gtggattggccgaaccaatacctcgccctgacggacgccgagaaagaggaattcgcccgggtgatcagcctcttgtttgaacgcacctttctcgttcgggaggagtgggacgggaaacagcgccggctggtgggcaatcgagattatcgctttgtggagcgccacctggaattgttccatgagtatttgaaagccggcggttttgagttacagctcgacgggcgcctcggggtcatggccctgcacaaccgtttcgggcgcaatcgcatcaaggtggacaaatacaccacctatctgttgtacacgctgcgcttgctgtacgaagaaaatatggaaagggtatccacgcgccgggaagtggtggtgtccctgcaggagattctcgccaaatggttcgctttaggtctcatggaccggcggccaccctcccagcacatcggacaagctttaagtcggttgcggcggctccatgtgttggcccgggtggagggttccccccaggacttggatagcaggtggatgatttatccaagtattgtgcgcgccgtccccgatgaacgcatcaaccatttgtacgaacagatgcaaaaggcggagctgtggccggcttctggggattcgggcgccggggagaacggtggcgccgcgaagccggttcaccgtgagccccccggggaagaagaggtgggggacggggacggagacgcttgggacagcgaagccggggaggaatcctgggacgacgcctcggagggggagggtgacgcgtga

SEQ ID NO: 42036 - DNA, 3468 bp, Kyrpidia tusciae DSM 2912
gtgaaactgttgcggcggatgcttttggtgaactggcattattttgttcacgagatgatcgagtttgctccggtgacttttcttaccgggaaaaacgccgcgggcaaatccaccatcctcgatgctttgcaactggtggtgctgggggacaccagcggtcattattttaacaaagcggccaacgacaacgccaagaggaccctgcgggggtatctgtggggggagatcgccgaggagaacgagcgggtggtggcgctccggtccggacaattttcctcctatatcgtgttggagtttaccgaggaacggggccgccgcccgatctgtttcggggtggtcttcgattgtgcgccggatggcagctatgagtggcggtttttctccttggccgattccctgccggatttccacttcatccgggacggtgtgcctctcgacatcaggggactccgggcctggggacagcagcaaaagcagcgctttgaggtgtacgagagcaacaagcggtatcaagaggtctttcgcgcccgcatggggaacttgaaggacacattcttccggttgtttcgcaaagcggtgccctttcaaccgatcatgaatatcgccgaatttatttcggagtttgtgtgcgatgtgaaacacgagttggacatcgccgacatgcgggaaaatattcgccattatcgccgcatggaggatgagctgcgcctggttcaggcccgggtggaggccctggaggagatgcgggagacctttcgggggatcgatgccacccggcaaaagatccgcacatacgaatatctgctcgaccgagcccagtgggccgaggccgaaggatcactggagaggttgcggacggcgcgggaggagcgggagcgagagctcaaggacgtggatgcaaagcttcaagaggaaacggcggcccggaaccgcgcccagacccggcgggatgaactgatcgaggagaaggcgaattccgatgtgtatcaacgccagcaacttctccagcagcggaagaagagtttggaagtgcagtttgagtcgattcgcggggacggcgagcgccaggaccggatgctgggcgatcacggagcccggtggcgggcggtggcccagggattgtcagaggcggaggggtggttcgaagaggtgcggccggtggacggggagagcccctggccgccaaggggcggtggtggagccgaaggggaggaaccggagcggcgcctgtgggggagtgcccccttttatgggcaggcccgccgggccctgggggcggccctcggccgctggcccgccccctctggctggcgggggcacggactcttggatgatccccttccttccgtcgatgcggaggccgctgcagaagcggcggaacattttcaagaggcctcccgacttttgcaacaagcccgaggagtgatgcaggagtctgttcaggggtggggcgaggaggcgcagaccctccagcgggcgatccgggaactggaacagggaatcaaacagtacgaccccaaggtcctccagctgaagcagcttctcgccgaggggttggagaaagaaggacttccggctgacgtgcacattttcgccgacctgctcgaggtgcgggacccgagctggcaagtggccatcgagggatatctgtacacccagcgcttttacctgatcgtggcccccgaagcttttactccggcgctgcggctgtacgaccggctgaagggcgaacgccgtctctttggcgtggggctcgtggacattgagaaggtgatgcgggaagccccggagcgtagaccgggatctttggccgaagaaattgaaacggatcacccgctcgcccgggcatatgccgattttctgttgggccgggtgatgaagtgcgatcatgtggatgagctgcgccagcaccggaccgccatcacccgggatgggatgctctatcagaactacgtcgctcgccagcttgatcccagccgctgggcgacgctgtacatcggcaagagggccattcagcaacagttggagcaaaagcgccagcgctttagccgggtggagacgtggctcggcgcgttccggctccggttggcgaaggtggagcagtgggcggtcgaaccggtgcccacacgttcggagctggaggggctcgcggagtttgagaggcggttgccggagctcccgcagcttcgggaggattaccgccgggtgctggacgaatttggggggcttgacctgttggttctcgcgcgtatcgaagaggccatcgcccggtgtgaagacgagctcaaacgccgggaacaagagttggagcggctgcgggatcgccggggccggctgtcggaacagcgggaacggctgctgaacgaagagatcccccgggcggagaaagatttggaggagcggcgacaatgggtgttgtctcagtacgatccggattttcgcaatgaagttggagagccgcgttttcagcaggagtggaaacgactgggctcggccgagacgatccgggcgaacttcgggcggcaactcaatgtggagaaaaatcgcgccgaggaagcccgccaggtgctgttgcgccagcgggaggcctacaatcgacagtacggcgccggtttcgacattcagcggccggacaatgaggcttacgacaaggaactgacttggctcaaggccacccagctcaccgaatacgcgcagcagatccaggaggccaaggaacgggcgcaaatccagttccaggaggattttatcaataaactccggagcaacatcgagacggtggagcagcagatccgggatttgaaccacgccctgcgggacatctccttcggcggtcgggagcgatatcagtttcgaatctcccccaaccctgagtacgagagattttaccggatgatcatggacgaattgctcatggaagggaggagtctgttcactcaagccttcctcgataaacacggggacactctcgaggagttgttcaggcaaatcgtcgatgtggatgaacgcgaccccggggttcaggccgagttggagaagcacctgaagacgttcaccgactatcgcacgtatctcgactttgacctgatcgttcgggatgaagaaggccgggagtcgcggctctctcgggtcatcgccaaaaagtccggcggtgagacccaaactccgttttacatcgcggtgctggcgtcctttgcccaaatgtaccgggtataccaacccgggttcgataacaccctccgcctcatggcctttgacgaggcgtacagcaaaatggaccaccagcggattcgggacagtattcggctggttcgggatctcaatctccaggtggttctggcggcgccgacggagaaaatcgcggatatcgtgccctgggtcgatcggaccatcgtcgtgcagcgcatcaaatccgaaactcgggtggtgctgtttgaacccgtggcggaggagggcatgcgggcatga

SEQ ID NO: 42037 - DNA, 1365 bp, Kyrpidia tusciae DSM 2912
atgaacctgggaagggagggggcggccccctggatgccccgggaagagtccacggtgaagattttggatgcgcttcttaaaaaatatgagagcagtcaggccctggtgaaaggctcgtcccgccggcggccccaggtcagcccctccgagagcgtggtgccggggtatgtgagcggagggatggatcccgaagtccggaagcggtttcacggggagttggcccggctggaacaagagggcgttgtcagcctgcgctgggtgcgctttgaagagggcaacgtgcttgatcgggtgtatttggagtgggagggggtggaccgggcgtacgcctgcttgggccgcgcgcctgtcagggaggagtcggcggccttggccgaagagatggaggattggctggacgggctggctccgacgggagcatgggcttgggtggagcgctgggtggaggatgtggtggatgccgcccggggtcggggaagggtgggaccgcggctggtgcccggggaccccgaggaacgccggcgtctgctgaacgccatcgagggtttgatccgggagggcggggagtccctaccggtgcggctcttctccaaacgctatctcgggaacagcaaagttttcgaacagcaggttcaaggccgcctgatcggactcttgcaacgttatgccgtcccgtcctggggggcggacccggacatgtacagcgaaccggccgatctgttgcgggaagtggggattgaagtgacccacgattgggtggctttctgcggtcccatccggtttcggtttcggcaggcagtggcgacgcaggacaagtggggagggccgggcggtcaggggggcgcctgggtcgatgccggagctttgccccacggtttggccatcgacgcggcggacgtggacaggttggagttcgaaagggcatcctgtacccgcattgtttccatcgagaataaggccaattaccgcgcttatctgcggtcggaacggcgggagggggagctggtcctgtacctcggcggctttgccagtccgggccagcgccggtttttgcgccggcttcgggcgtggtgggagggccgaggggagtctccaccccccttcgaccactggggagatctggattatggtggcattttgattcttcagcatttgcgggagacctgctggcccgaggcggcgccctggaggatggacccggagatcttgtgccaatatgcggatcgcctggaaccctatgattccacttacagggcgaagctggaaaggttgctggagcaagagcggtatcggtgggcctggcccttggtccgagtcttgctggagaaggggggcactttggagcaggaggcgaccctggtgtga

SEQ ID NO: 42038 - DNA, 1416 bp, Thermincola potens JR
atgcagttgtttaagattattcgcaatcctcattttttttccctgctggcctctcccaacagggagatatacgtggaggccctgtttgtcgtttacaggtgttataagcaggaatttatgatcaaaaaagaagagctggtcaacatgcttattgccactctggaaaaccgcatgtttgaactggctgcggaggaaggcgaagagctggatgattactccctgtccggccgggcccactggcttgtccgccggctcctggccaccggctggatagagctggacccgctggttcattctgttgatgaatatatagcggtgcccgactacagcgtgaaaatcctgcaggtactttatgaaatcagcgaggacaggcccaaagaatacaattccctggtatattccacctattccaatctgagcaaagcccaggaggaaagaggagactacgtggcggaggcgctgatggccgcctacagcttaaccgaccgcctggtggacagcctgaaaagcctgctcaacaacatgcgcagctattaccttgctctccaggaacaggatgaggtaagagaggtattgcgggagcactttgaccgttaccaggtgttaatttccgacaagatatatcacccgctcaaaacctttgacagcgtgccccggttccgcacccggatcctctcgattttacgcgagtggctggttgacggggagcttattgaaaaaattactgcacaactggtccgcaaggggcggtttgccgatgcgccggctgcccgtgatgaaaccgtcaggatgataacatttatcattgaccagtacgaaaaaatggaccggctcctcaaagaaatagaccgcaaaaatgccagttataccagagcctcggtagaacgtacccagtatctgttaaataccaaccgggataccaaaggacagcttattgaaattatcaaggccctgcccaaaatcaaccgtgaagtgcctgatgatatcctgaatgatttgtggttgtcggtgaacttgtttgaacaacactgggtagacagtaattctctttaccgtgagcccaaaaaacgggtgtttacacgaccggaacctctggagaggggtaaccgctcggaccccggggaatttgaggccgagtttgaccagatcaaaaaacgggttcgggacagcttgacccacaaaaaagttatggattttatgaaaagtctcctgaacggacaggaccgggtaagggcccatcaattggaactggaggtcaccgaggactttatcaagctgattctgggggttatcaaggcagacgaaaagggggtaccttaccggataacctttgaggaagggtacctggtggttaacgggttccggatcccggacctgaccattgagaaaaaaggtggagaaaagcatgtggattga

SEQ ID NO: 42039 - DNA, 654 bp, Thermincola potens JR
atgtggattgacgactaccaaagactaaatgacagggataaggagcagtttacgcgcctggtcaaccttctcctggcccggaccttcctgctccgggagcgggttgacccaagggagaaagccgtggttatagaccgggacttcaggtttcttgaacggtattattccatttttaagggatatctggacctggcgggatgggacctgaccctggatccccaactgggtgtggcggctctttgcaaccgctatgggaccaaccgatacaggctgaataaatacgagacctattttctgttagtgttgcgccttatctacctggaggaaagcgagaaactgaccctgcgccgtgatgtggtgaccactgtacgcaacctgctggaaaaaatggcgctgtttaacctgctggaaaagaaactccccgacaaaagcctcactgaaggcctgtccactctaaaggagtttaatatcatagaccgggtgggcggggaatggaaagagccggagacccggattgtaatttacccgtcaatactttttgctgtaagtgacgaacaggtcaaacacctctatgaaaagtccagggaatgggggaacccccgggaggaggtaattggtttcgatgaaactgcttcagaagatgctgctgattaa

SEQ ID NO: 42040 - DNA, 3300 bp, Thermincola potens JR
atgaaactgcttcagaagatgctgctgattaactggcactatattgtccaccagactattgaatttaaaaggctgaactttctcaccggaaagacagggtcaggcaagtccaccattattgacgccctgcaggtgctcatcctgggcgatactactgggagcttctttaacaaggcggccaatgaccagtcccgccggaccctgaaaagttacctcctgggggaaatagccgaaaatgaggcggaaggtgtggtctacctccgccaggggaaggatttttccagttacatcgttggggaattttttgacgcaaaggaaaaaaagagcttttgcctgggggttgtttttgacagttatgccgacggcggcaaagaagaacaccgtttcttttatctgaacggggaactgcccgccaatcatttcattgtcaataatataccgatggacataaaaaccctgcgggagtgggcctacagcaaggtgggcaaaaacaatttccggtattttgattccaacgccacctaccgggagcatttccggcacctgatgggcggcctgggggaaaagttcttttccctgttccgcaaggcggtacctttttcgccgattatggatataaaggattttattgccaattttgtttgtaatgttcccagtaaagtggaaattgacgacatgcgggaaaacattcgttattataaacagcttgaaggtgagttggaacttgtcaagcgccgcatagccgctttggaagccattgaaaaacaatacagaagtttttgcgaagaggacaagcgcctgcttatgcaccggttcctggttgaccgggcggaccaggaaaaggttgcggtgagccttgcaagttcaagggaacgttataaggcctggcaggatgacctggccggcctggtagttcagatgcaggaaatggaaaaacgtcaaaaggatctggagtcattataccaggaagccgtaaatgagaaggccaggtgtgaagcccagaggcaaaaagaatatttggaggggcagctcaaacaactgcgggaaaaactggactttttgcataccaaccagaccaggctgggcagcctgttaaaacaatactctgcagcatgcgcggaattggagtgtatatcggaacgcctgggcgcttacagccacaggctgaaccctgaaactgtggagacgctgaccggggacttctggcgggattttcagcgcgagtttcaggaggctttgggtcaggtcagagaagaacacttcaggctgagggaaggcttagagcagggcaggaaacgtgccgaagagctccgtgccgagatataccggttaaagcagggaataaaaccttatgacaggagccttgtggcattgatggaagcaattacatcggaattatcgggcgccggtaaagcagtccggccccgggtttttgcagacctgctggaaataaggaaccccaaatggcgggatgccattgaaggctacctgcatacccagaagttttatttacttattgaaccgcagtattttatcagggcgttgcaggtttatgaccggctgaaatttgagcggaagttttatgaccttggtctggttgacgtagagaagttaatggccagggccaggccgccccggccgggaagcctggcggaagaaatagtgactgacgacccatacgccagagcttatgccaattatctgctgggtggtgtcatgaaggtggagcgggtggaagacctcaggcgtttccctaccgccatcacgcctacctgtatgctgtacaggaactatgtggcccgccagattaaccctgaacgctatgcagtaccttatatcgggaagaagtccattgaggaccagatccgcatcaaagaaaaggccttacaggaacaagaggaagaaatagccaacctttcctcccggcttgacttgtatggccgactggtgaggatacccgagctgcgcgatgatgacctggaaaggattgagcagtatatttctgaaaagggagccatgcccggcatcaaaaagcaaatagatgaattgacaacggaacttgggcgtctggacctgagcaaggtttatgaactggaagaaagaatccgccaattggaaaaggaaaaggaaagttgtgccaaaaaactgcaacaaatcagtgggcaatatgcagtaaaagagggagacctcaaacgtctgggtcaggaaaccattccccaactggaggaaaggcttatggatcaccgggccaggctggaagaagattatccggaagaatggcggcgccagaccggcgaaccccggtttcaggcggagttgtcgcgtctggggcacccggacagggtatacgccaatttttccagccaactggcccgtaccgaaagccagcgggaggaaaaatggaacgcgctcttaaaacagcgcagcgattttaaccgcgatttccggggaacttttgaggttaccgccgccaccaatgaagcctgggcgggcgaactgcagcggttggtcgaaacctgtctccctgaatatgaggaaaaaatccggggcgccaaggaaaaggctcagcgggaattccaggaggattttatcagtaaactgcggcagaatatcgaaacggtgaaggagcagatagatgaactgaacaaggcattgaaggatgtgcctttcggccgcagcaagtaccggttcaaagtaacggccaacagcacctataaagaatactatgacatgattatggatgagctgctggtggaaggatacactcttttttccaacgaatttcaggcccgttatcaaccggtggtggaacagttgttcaaccggattgtggccactgccgaagccgaactgtctcctgagcagcgcgaggaactggaaaagaatctccgaaaatttactgattaccggacctacctggactttgatttactggatattgatgaagaaggacgggagtcccgtctttccagaaccatcagcaaaaaatccgggggagagacccagacaccgttttatatagctgtcctggcctcattcctgcagacttaccgggtgaaccagccgaatcacaacaataccttccgcctgctggtttttgatgaagctttcagtaaaatggaccaccagcgtatccaggaaagtatcaggctgcttaaagacgtgggcctgcaggtaataattgccgcgcctaccgataacattgccgatattgcgcctctggtggacaggaacctgtgtgtgaccagggtgcggcaggagacggtggttaagtcctttgacccgagggattttgaataa

SEQ ID NO: 42041 - DNA, 1233 bp, Thermincola potens JR
atgaagcaggatatccttgaaaaactgctggataaatatgaaaagagcaagcatgctaccggtgaagccagggtccggcgcagggtgaccttaaagacggatgaactgaccgggtatttcagccatgacctggaataccgtaagtcactgcaccgggcagcactggacctggagaaccggggattgattaagattgaatgggtgccttttgaaaagggtaacctgataaaagccctgcatttggttcttgacagggtagaagaagcctatatggaggcggggcataaatccagacttgatgttctgggggacctggaaaacaggctggccggtctgaatctgagtataccgtgggcaagcgcttttgtgcaggattgcctggatgagatgggcggcaagttgaaatatccatcccgattaccccgtgaacccaagaaactggaactgctgctgaatactctgaaagggattcaaaataagggccaggaggagatgttggagcgggttttcagcaaacgctacctgggcagcagcaaggcatttgaacagcatgtgcgccgcaggcttgtagggattttaaggacttacctcggcggggcgggaatggaagaagaggacctgctggccgaagttggactggtcagggcagccagtgaggtacttgtgtgcggcccgctgaaaatacgtttaaaggacagaacggcggacctggctcctttttgttacgggaccggtctgggcacagaaaccattgaagccatagaaatcgtggactgtaactgccggagggtaatttctgttgaaaacaaggctgtttttcgtgatttggtccgtgccggaacagatgaccaaaccctgctggtatgcctgggagggtttgccgggccggtaaagcgtgggtttctgaccaaactgtacgggtttttgggaaacaccgtagaatattaccactggggagatattgattacggaggcatgcagatattctgccacctgcggcgcgcctgcattcccggtttgcagccgctgctcatggatgcagcgacatatgaggccttcgtacatctgggtgaaaaatttgaggcggtataccgcaataggcttgagggcttactgaagcaagaagattttgcctgctttcatgatgttataaatataatgctggaacacggctgtacactggagcaggaagcggtgccggttgctgaatgcatggacatccttagaaagtaa

SEQ ID NO: 42042 - DNA, 1515 bp, Gordonia sp. KTR9
atggagttctcagccttcccggctccggtcgaggcccccggcgcgtcgagcgcccccgagtccgcgcagctcacgctggccgacgcgtgggaatcgaaccgctcgatccagaagtcggcggtgggtcggctcttcgcggccaccaactcggccctctacgtcaccttgatggaacgccacctcgactacggcaccaaactgtcggagaccgagctgtcggtgcgcctcgatcgcgacctcgccgacctcgaactcaccgaccaggccaacggcctcgaactcgtcaagatgtgggctcggcagggctggctgcaccgcgtcaccgacaccaccgacccgaacgcccccaacctgtgccatctgaccagcgaggcgcggtcggtcctggacttcatgcgccggcagcgtcgtgaggattcgattgccaccggcggctccatcaccgggatcgccgccgagctccgacgcgtcgccggccaggtcagcaacgatcccgaccagatccgctcggagatcgaggcgcagatgtccgacctcgacgccgagctcgccgacctcgacgccggccgacgcccgcccgtcgacctgcgcgtggccgaggacgcggcgcgcaccatcggctaccagatggagcagatcatctccgacatcggccagtacggcacgatgctcgaccgcatcaccaccgccctgctcgacgacccgggcgactccgacctcgcctaccgcgaccgtcagcgccagctcttcgacgactacgaggcgcttctagactcgccacagtccgcgtcgtaccaggcgttctcgcagatgattcaggacccggagcgtcgggcccgcctcaagcacgacatcgagacgatcgtcgacaacttcccggccatggacgccggcctgcggtcggtaatggacaacttcttcggcctcgtcactcagcagatggccgaggtcggacgcactcggcagaggtgtgcgcgccgtattcgacgcttcgtcgcgtccgggaccctcgagcagagccgcggcctggcccgtcagctcaacgacgccctcgccacggccaacgaactgctgaagacgtccctggccgaccgtcggatcgggtacgagcttcccctcgccacgccgacggtgaactccatcggccggctcgccttcgagatccgcgaacacgtaccgcccgcaccggcgctcccggccgccgtcgacgccgatctcacgtcgttcgcgtcactgtccggccaggtcgacaccaccgaactcaccgacaccgtgaacgccgcggtcgccgccggacccgtcgccctcgccgacgtcatcggtggactcgaggagccgtacctcgcgcacgtcatcgtgctgtggtcctgggcgtccaaacagcaagcggcgggggagaaggtgccgatgaccaccgtgcgattccggtccctcatcggagacgaccacgccatcgaagtgcccgacctgaccttcaccgaaccgattccgactgcggaggtcgacgccgaatga

SEQ ID NO: 42043 - DNA, 924 bp, Gordonia sp. KTR9
atgacatctttgccccctgaggtggacgccgactcttcgctccctgaggtgccaggggacgaccctctgctccctgaggtgcgagcgaagcgagcctcgaagggtcccgacaccgaccctctgccccctgaggtgcgagcgcagcgagccacgaagggcgccccagagaccgacgaattcgccggcttcgacgacctgcccaccgtcgcgaaccgcgcggcgtcgcacacgccggacgcaccgcgcttcgacggcgacgtcagcgagctgcccgaccgcgcgtgctgggcgctgcagaacctgttgacccgccgctacatcagcggtgaccggcaaccgcagctgtggtcgtgggtctccgagtaccaggacgccctgcgcggccgcctctccgaactcgacctccggctgcggatcgtcgacgagctgcaggtcgccttcgtcgagcaggccggttacgactcccgctggggccgaaagatcctcaagcgcgagacgattcacacctacgacgcgatcttggcgctgcacctggccaagtacgtgcgcgccgcccgcgatgagtccgtcctgatcacccgcgaggagattcacgagctgttcgccggcgtcaccaacaccatcgaccgcgacctcgcgctcttcgacaagcgcatcgaacgcgcgctcgacaagatggaggagctcgagttcctgcgcaagcagcgcgacgatgccgacaccttcatcgtcagcccggtgatctccgcggtgatgacggcgtcggtgatcaccgacctacagcggcaattcgagcagttcatcggatccggtgacaccggggaagtgccgccggaggacctcgccgacgagccggccgagcgcgacgacgacgcggccgatctcgacaacgcctacggagacgacgaaggagacgactggtga

SEQ ID NO: 42044 - DNA, 3345 bp, Gordonia sp. KTR9
gtgagcgggcaggtcgaccagtaccacctgtcccggttgcagctgatcaactggggcgtgttcgacggatatcactcgatcccgttcagtcccaacggttctctgatcaccggctcgtcgggtagcggcaagtcgtcgttgctcgacgccatctcgctggcgttcctgccggatcatcggcgcaacttcaacgcctcgggtgatgcgacggcggccggatcctccagcggcaagcgcacggtgggcaagtacgtgcgcggcgcgtggggcgagcggcgcgacggcaccaacgcccaccgcgagatcatgtacctgcgcggtaccggcccggcgtgggcggccatctcggtcacctatacctccagctccggcgaggccatcaccggcctcgtcttgaaatggcttgccgcgggcaagatgacagatgcccacagttcgtatttcatctacgacggcgacgccgacatcgtcgaggcctgcaacgagtgggccgccaacaactacaactcggccaagttccgcgaccgcggctggcgcggcggacccggcgagggcaagtacctctcgacgctgtactcgctcatcggcatccgcggctccgacgccgcacagcagctcctcggaaaagccaagtcgctcaagagcgtcggcggtctcgcgcagttcgtgcgggagttcatgctcgacgccccgaccagcatcgtcgggatcgccgacgccctcgaccagatcgacccgctcgtcgaagcgcgtgaactgctcgacgtcgcgcgccgcaagcgcaccatcctcggcaacatcgaggaggtgcacgagcggtacgcgggggaggcggccacgttctccgtcctcgacaccatcgacaacaccaccattcgcagctacgtcaacaacctgcggatccgcaacgcggagcccgaggttgccgacctcgacgaccagatcacccgcctcgacggtgatctcgccgcgctgaccacccagcacgaccagctccgccaggaccacagcctgctgctgtcccggatcgccacctccaccggcgatctcgctccgctgcgcgaacagctcggtggcgcacagaaactcagcaccgaggtcaccgcccgacgtaacgcgtacgaggacaaggtctccgctctcggcttcaccccgcccacgcgggccgagggattctggctgctccgcgaggaacttcaggaggaggccaccaagatcgacggccagctcgacgccggtcgcgctcactatgccgaggcgctggccagcgaggtcgctgctcgtacccgccgcgacgccgcgatggaggaactcggccgcgtcgagaacgccggctccgcgctcccgcgcaccgagcacgagatgcgccgcgtcatcgcccacggcctgcagatcgacgagtccgagctgaagtacgtcgccgagctcgtcgaactcgatcccgacgaggagcgctggcgtctggccgttgagaaggtgttgcgcaacgtcggccttcgtctattggtgcccgacaagcacttccgcgccgccctgcgcttcgtgaactcgcacgacatgcgcggccggatccagctgcaccaggccgattctcgcccaatgccggtcctcgagccagggactctggcctcgaagctccgtcccgtcgatgcctcgcacccgggtgcggccgaggcgatgaccgtcctgtcgaagctgggcagccacatgtgtgtggacagtcctggcgagttttcccagtacgctaaggccgtcaccgaccaggggttgcgtaaggattcggcaaagctcgcggtgaaggacgaccgccagcagttgcgccggtcgcagtacatcttcgtcggcgacgtcgcgtcgaagatcgccgcgcttcgcgacgaactcgactacgaggagcgggcgttcgaggatgcccgtcaggattgcgccgagctcgatcgggagcgcagcgcaaaggagaagcgtcgcgacgcgtatcgccgtgtgtgcgagcaattcacgcagtggaacgagatcgacgtcgactccgtcgatgaccgcgtcgaccagctcaccgatcagtacgacctgctgatcgaggaaaaccccgacgttgaggcgttgcagcgcaaggctgaagacctgtgggagcaggtgcgcaacgcgatttcgcaggcagcgctggtcaaggacaagatcgctcgccaggactcccgccgcacccagctcctggacctcatcgaccggttgaagcccgaagacgtccccgcccaggcggagaagaccctcgacgggttccgcgaggacctttcggcgactctcgacgtgctcaacccggagccgtaccgccaggagatcgtcaaggccgcgagccgtgagcgcgaccgcatgcgttcggatgctcgacgctcccgcgacgagctggcccgcatcctcgacacctacgacgaggagttcccggacgccatccccaacgacagcgacgacttcgacgaacgccttcacgactacgtcgccgtctgccgccgaatcgacgaacgcgagctgcccgccgcctacgagcggatgcgccgtctcatcaccgagcaggcgccgggcgcgatcctgggcctgcacatggccgccgacgccgaggaacgacgcatcgtcgagcagatcgagcgcgtcaacaccggcctcggtgcggtggcgttcaaccgcggcacccgtctgcggctgcgacccggtcgcaagaagctcgccgcggtcgaggagctgaccgagaaggcccgccagatctcgaaccgcgcgacggcggtgagcttcggcgatgagcaggcaatcctcgagcagtactccgacatcctgctgctgcgcgaacgtctcgccggcaataccccggaggaccgccagtggacgcgcgacgccctggacgtgcgcaaccgcttcgacttctactgcgaggaacacgacgccgagtcgggggagaccatccgcacctactccaacgccggcgacaactccggtggcgagcaggagaagctgatggccttctgtctcgccggtgcgctgagcttcaacctggccagcccgcacggcaacgacaaccggcccatcttcgcccagctgatgctcgacgaggcgttctccaagtccgacccacagttcgcacagcaggcgctgtcggcgttccgcaagttcggcttccagctgatcatcgtcgccacggtccagaacaccagcacgatccagccgtacgtcgacaacgtcgtgatggtgtcgaagaccgaggctgggcctgagctgcggccaattgctaccgctacttcgacggggattaaggcgttctcggagttgaggcggtcggggagtcagttgcccgtctag

SEQ ID NO: 42045 - DNA, 1362 bp, Clostridium saccharolyticum WM1
atgatactgatgaatgaaataccggaccggttttggggattgttccgttccatcaaccggtccacctacatagaggctttgttaaaaatcaatgaggaatatgaatacagcaactactttttaagccgtgaggtgtgcattcaggttctggaggaatattttaccgccaagcggctggtaatctggcaggatgaactggaagatgaggcggatgtctcagagccgactgcagtcagagtcttaaactggctgttaagggccggctggcttcggaaagtggatgattatgcctccatgacggtgaatatcgtaatcccagattatgccgctgtcatgatcggggccttttttaagcttgccagggatgaagaggatgagacccagatttatattcagaatgtatacgccatccttttttcattaaaacataatccaagggccggtataagcctgttaaacacggcttatatcaatacaaagcggcttaacaagaccctgcaggacatgcttcataacatggacaaattttttgaaagtcttttggaaaaaaaggcgtatggggagctgttaaaagaacatctggaaggatatgtggaggaaattgtaaaaaagaaataccacatgctcaaaacctcggataatttctatctttacaaaaatgatatcaagcgttggatcagttccatgagggatgatgtggaatggatggaacagatgagccgccgcagcgggcagaaggtgacggccggggatataggagaaaagctggatcagatcgaaagaggctttgacgatattgaacaccgaattgccaatatggacagggagcattcccggtatatccgggcaacggttaccagactgaactatctgctgaaccaggaggataacatgaaggggcttgtgatcaggcttttaaatcatctgtccgagacagcggaccaggatgaagctgtaaaggaagtgggcagccgcatgaacttatcccagacatccatcctctctgaaaggtctctctataaaaaaagaaagaccaggtccggttttaaggagaacctgttgccagaggaagcgtctgttgagcttaccatggaggagatcctggaattaaaccgtttaaaaagccgctacagccggaaggaaatcgaaagctatattgaatcccatctggaaaacggccgtatggaagtgagggaagataccgtggattccccggaggagtttgaaaagctgatcctggcctatgattactctaccagaagaaaaagcctgtatcaggtggaggatccggagacagagcttattgacaacggcagataccgttatcccaagctggtatttgtaaggaggaaagaatcatga

SEQ ID NO: 42046 - DNA, 651 bp, Clostridium saccharolyticum WM1
atgacctatgaagaaagtgctggcattatcagccatatcccatattatgatgccctgggacagggggaaaaggaagaggtaagggcagctttaaggcttcttctccagcagacctttgttctggagcataagtatgataagcgggacaaccggtttgtctttaatccggaatttaaaatctgcaacaagcatctggaatttatccgggcctaccttgccgtcagcggagtgactgttcaggaaaacagccagctgggccttatttatatccagggggagaatacggtaggagataagcttccaaagctggccaccctttatcttctgatcttaaagctgatctatgatgagcagatggcggcagtttccaccagcgttaacatctacaccacattaagcgagattcatgagaagctgggaaattaccgtttatttaagaaacagccatcccccacagagatccgccgggcaatcactttgttaaaaaaatatcagatattggaacctctggatattatggaggacttagacggagacagccgaatgattatttatccctgcatcaatgtggtactctttggtgatgatgtgcgggccttattagaagcatttggagaaggagacgatgacgatgacgaaccggaaatttga

SEQ ID NO: 42047 - DNA, 3384 bp, Clostridium saccharolyticum WM1
atgacgaaccggaaatttgaggccctgtccaggatactcttaaacaactggcattatatcacccggaaaaccttatcctttcatcaggagatcaatttctttaccggccattccggaagcggaaagtccacagtcattgatgccatgcagattctcctttatgccaataccgacggacggggattttttaacaaggctgcagccgatgattcggaccggagcctgatcgagtatctgcggggcatggtgaacatcggggagaacaacgaattcgcttatttaaggaaccagaatttttcctccacgattgtaatggaattaaaacggacggatactggggaatgccagtgcattggaatcgtttttgacgtggaaaccaataccaatgaaatatccagaaagttcttttggcacaaaggaccgctctgggataacggttatcgtaccggttccaggaccatgaccactcacgaggtgtctggttatctgcagaccctatatgaaaaagaggactattttgccacttctcataatgaacggttccgaaggcagctgtatgacgtatatttagggggtctggattcagaaaaatttcctcttttgtttaaacgggccattcccttccgcatgaacatcaagctggaggactttgtaaaggaatacatctgcatggaacaggacatccacattgaggacatgcaggaaagcgtcatgcagtacggtcggatgcgaaagaagatcgaagatactggcgtggagatcgcttatttaaaggaaatgggggaaaagttctcagctgtccgggaaaaagaagaggagataagtgaaaatacgtatttcttccgcaagatggagattctggattatcaggcaaggattcaggcactgacggacaagaccggtcttgcaagggaagatctaagccgccaggaagaacaaaagtcggccctggaaaggcagatggaagatttgacccttcagggaaatgaactgctccgccggatttcttccaccggttatgaggatttgaaaaaccagctggactctggtaaggagctgttaagccatttaagcaaaagctctgccaggtgggcacagacaggagagcggcttaaggaatggatcaacgaagaggccacctccaaccagaccatatgggacatcgaagagttcgaaaaaaataccattgatgaggaaaagctggaccgcttaaaacggtccattgcagaaatgcgtaaggaaacggaagaaacccagaaagaggcggaagggatccttcgggacatccgaaaaaaggagcgccagacaagggaagagctggcccagctaaaggccggaaacaaggcgtatccaaagtatctggaacgggccagatctctgatccagcagcggcttttagaggaaaccggtaaggcggtggaggtccatgtgcttgcggatcttctggatatcagggatgagacctggagaaatgcggtggaaggctatcttggaaataacaagctgtccctggtagttgccccggcctgttcggaaacagccttggctgtttatggagagctggataaggcggaatattttaatgtggccgtcctggacacggaacgagtgggccggaattcctatgaagtggtaaaaggaggccttgcagaagagatcattgtgagggaggcttatttacagccgtacattgacttacttttgggcaaggtcgttaagtgcaggagcctggaagaactgcgccgctgccgaatcggggtgacccctgactgcatgctgtaccataccttccggctgcagcatatgaatcctgataattacacgaaatttgcctacatcggcaaggacagcgtcaggagaaggatccggcttctggaaaagaacctggtatccctggaggaggagaagaaacctcaggaacaggtcctaaaggaatgccgccggattttatccatggagggcttaagcgaggatgtgggtgtttacttagagtggcagcaggatatggcggcctttaaggaaaaggaaaaagagatcaggcggctggaacagaagctggaaaagctgaaggcccaggatgtagaggaatgggtgaaggaaagagaatccatcttgcagctatgcgataggaaacgggaagagcagagaacggttgataaactgatctttggcatcaacagcgagctagaacggtttcgcagggaatccttgcagcttcaggaggagctggttttaaaagaacgggaactggaaccggatgaagaactggagaataaagtaaaggaatttctagaaagcagggaaactcaccggtacgaccagttgaagaataaattctggggaaaatgcagggaggcggaagaaggccgcggccaggcatttcaggccctggtaggtgccagaggcgattacgccagaaaatatcccaaccggaatttttccctgacagcaaaggataatgatgaatatgaccgtcttcttaagatcttggagtgcggcagtctggaagaatataaaaagatggctgctgagcaggcaaagtccgctgttcttcattttaaggatgacttcatgttcaagatccgaagcgccataagggatgcacttttgagaaaggatgagctgaatcggatcatcagcaaactggatttcggcaaggataagtaccagttcgtcattggaaggaataagggagcggacggaagatattatgatatgttcatggatgattccctggaagtaaatccggcccatcttacggattccctggataaccagatgaacttttttaccatggagcacgaaagccagtacggggaagtcatcaatgacttgataaatatcttcatcccgccggaaaatgctacggcagagcaaatggaggaggctaagcggaacatggataagtatgcggattaccggacgtatttatcctttgatatgcagcagatcatccagaacgaggatgaggtcattaagatccggctaagcaaaatgatcaagaagaattccggaggcgaggggcagaaccccctgtacgtggccttactggcaagttttgcccaggcttaccggatcagcctgtccccaaagatacagaggaatccgacccttcgtctggtggtgcttgatgaggcattttccaaaatggatgcggagaaggtggcaagctgcattgagctgatccggggtctgggcttccaggccattatcagtgcaaccaatgacaagatccagaattatgtggagaatgtggacaagacctttgtgtacgccaatccaaataaaaagtccatatccattcaggaatttgagcgggaaagctttccggagctgatgcgggagcttgatgaagatgaggcatatggagataccgtttcatag

SEQ ID NO: 42048 - DNA, 1407 bp, Butyrivibrio proteoclasticus B316
atggcgccgaatgtatttaaccgaataccgccaggattttttaatctgttatcgagtggtagcgattataagaataatgccagttgtcttctcgagatatattcgcaatacgacatggaggtttcttaccgaattagccgtaagcagcttcgagatgctttgtcaagttatatttttgaaaataatctgagcttttcggaagaaaactctgatgagaaaatcaccgatgttgcaaacagcataattcgaaaatttactgatgaggactgcgggtggctaatagaagaaactgatgatagtacatatgaaaaatatattgtgatgacagaagcagggattgcgctcgctgaatttttaattactctggaacagcctgaaaaagttgagtactcttcttacatttacaatatttataacacattgatgaatcctgaacagtggagagctgacccatatgtaaatgctataaaatccgtttataacaattccaaagcattatctaaatcattaaaaagactatctacatttatccgtaaaaagatagaagaactgacacgggaggcatcgcttgaaacgctaacaaaccaccttcttgaatactgcgacggtgaatttattagagaatacgctcgtcttaccaaacaacagaatatccatatgtaccgcagctatatacgcgcaaaattaaatgaaatgataaatgatcctgaaatacatgaacttttaatctatggctgtgctatcgaggaaaacataactgaagatgaagctgaaacaatgattattgatatggtagataacactaagaaatttcttaatgaagattatgatcgcattatgcgcgatatcaagcacaagatcaatacacatattcatattgcaattggaagaatccgtttcatatgcaatagcggtaaagatgctcaagggaatgttgaacaggtgctaaaaatgctcagggtaagtattgacgagggagaccttcttgatgttcttccagatgagatgataaatctgtacaggtttgataagaatgagtatatagatacagcgtcactatatcccttccgaaagagcagagctattaaaaagcctattactacagatatagaggtgcttactgaacaggataaggaagaagcaatttctgaactcaaaaaacaagcttataaccagttttccaagagacgcatgaagctatatctggatgaacaaatgaaagggaaaagcgagcttgatagttcgcagcttccgctttcctgcaaaaaagaacttcttgccaatattgctgcagtaacctattgcgaggaaaatggatacgaaataaccgtagaagatggatatacagaagcaaatggcatggttttacaccgattcaaaataaggagaaaaaaagatggggtttga

SEQ ID NO: 42049 - DNA, 675 bp, Butyrivibrio proteoclasticus B316
atggggtttgaaacggaatgggatatttacacatcaaacgaaaaggaaatttttaagcgtgtgtgccgaaaactgttaaagagcacttttatagttaaagaaaaagatgatgaaaacaaaaagctatatgcttttgctgtcaaaaatgaagaattcttaagtttatatctaggatatatgggctttgatataaaagtagatagggacaatggcgttgccatggtagttaaccttgggaactcagatgattcgagcaaaatacaagccaacagattaaaacttcgtaaagcagatacagtggttttatgttgtctttggacagtataccttgaccgtatacgcaggggtaatctttctaaaggaattgtagtttcagtcatagacctaaagcaggaattagaaaagtatggatttagggatgattttgatgggaaaacactgatggcaaagatcctagatctttttaaagcatataatttaatcgatgtatcaggaaaactcggagatcctgattgtaatataaagatttatccatctatacagtttgcactcgatagcgtagagtttcagaatttggtcgaggaaaatgacaggaggataaagtctataaaacttgctgcaaatgaagaagatgaggaagatgaaacaatgggggagtcagaatatgacgagtaa

SEQ ID NO: 42050 - DNA, 3267 bp, Butyrivibrio proteoclasticus B316
atgacgagtaatcgcaaaagcgccaaaggaataaaacttattaactgggcacagttttttaatcctgggacaatgaaaatagagggttctgcactaattaccgggcgaaatggaactggaaaatcaactacccttgatgcgataacctacctattaacaggaaatacgcagtttaatatagcggctaaagacaaagacagaagcgttgtaggatatgtgcgcggtgatacccgtagcgaaggcgccgacagatatttgcgcggcgatatggatgtagtgagttatatagctatggaatttgattctccaatggataattcgaacatggttgcatttgtatctatcgagcttaagaaggatgagtcgaaaacgaattcttactggtatgtcgcaaaagacacgactctttcagacattgtatttgctgaagaaaagggcggcaaactattagtctatcctaaaaaccaaattactataaaaggaaagcatatcagcagtaaagaattcatggggaaagagaagggaactagacaggttcttcaagccatgggacttagatgcgatgtctcgaaatacagatctaaattagttaagatgatgtcatttgatcccgagaagaatgtggataaatttatccaggaatgcgttcttgaagagggaaaagtgtcttctttggatgaactcaaagagcaaagagctaattacgaagaaattcgacagacatatgaggatatgcttgaaagcaaaaagaccttggagcacattgaagaacgtacaagggaatatgaacagaaatatttggattataataagcgccgactggtattaggataccaaaaatggaaaggtgcagtacaagcaatagaaaaattaaaaaatacaaaaggccaagaggaagcagagcttgcctttttgatggaaaggaaagacaaaaaagataaggaactagatgcggccaggcaaaaacttgagggattaagcaatagcagagattatcaagatatcaatactactcttaaaaggtttgaaagccagatcgaaacgcttacaaaagaacaagacattcactctaactcggttaaaaaagtcgaggctcttcaaagatgggttgatgagctgatgcaggaatattctgaagaattaaagctagatcttgaagtgaaagacgagcttacaagtatttcgtcaaaaggtgatgctacaaagaaaattgctgctttttatacgttatctagcgaaattagccatatctgcgaaaataaaaaactagcccagcttaagaataaagttcaaattgaaaaagataatgaagcacttgctcagaaacacaatgagaaaaaacagctggagggaaataaacttgtttttgatcctggatatgagaaagctagaaaacttatctcggatgagcttaaaaaacagaatattgatactgatgtgaagttttttgttgagcttattacaaatgtcaaagataaaaaatggagacgtgctatcgaaacattccttggcggaaagcgttttaatataatagtcgagccaaagtatacagaacaggcattaaggattataaacgacaaccccgcaactaaaggaaaagttattatcgcagacaggcttgaacctacagagatagtaatcggttctgcggctgaacagctggagatcatcaaccccactgcacgtatgtatgctaattatttgcttaatgggatccatttatgcgaaacagtagaagaactccatgattatcccaaaggagctattatgtcaaatggaatgctcgcaaagggttatgcagttggaaagatgcagatcaatagtacaaaattgtttattggtcaggatgctattaagcttcaaatagaagatctgacaaaagagatctgtatgcttgaagaaaatgttgaaagccttacttcgttcaatgaatcgctaaatgcagaggtggatagtctgcaaaaatattcattaaatcaggatgattatgatttcgaagctgttaatgaacttgctactgtaaaggaaagtttaagagcagtaatgagagataaagagaattatgagaaagacccaagcctgaccgcaatgttagaagcgcttagcaaagctaaaaaagagtttaaccgcttagaagaagaaaaaggcgctctatacaggaacataggtggtgtcgaaaaggaaattgagagaattcagcgggaaatatcatcaaaagaacagttgcaggatttggttaaaaaagaatttgaagatgagtgcaagaaaatgccagggctcaagcagccggctatcgatatgtatgaacaacagattcataaaaaggaaactgcaatcaccgaaaaaactgtgcgtaataaagaaattgagctgaataatgccattaaagacctggagaatgctcatttacagtattgcaaaataaatgacacggatattcagatgcgaggagtgtcatttattggctattatagagagcagtatcgtagtcttgcgaatgttcagattgaggaagcaaaacaaaaactggagaaacaaggaaagagactccagagcgcttttgtaggagattttgtagcagaaataaatgaagcaataaataacgcaaaagaggaaattaacagaataaatgacgaattaaaaaaacgaccttttggaaatgatgtatataagtttgaagtagatgataggcttgattcagaagggaaggctctgttttttaagatatgcaagcagatgcaagattatatcaataattcagaatattatttgaattccatcaaggacgatgagagcagtgagaacgatattaaggaatttattgatatagtacttaatgaagaagatgaaacagaatataccgattatcgaaaatatcttacttacaatatggaaattaagagtaagaagggagatgaagaagttaaatcttatttgtcgaaaaaacaaggctctgcaagtaatggggagaaacagaccccatactttattattttggcagcaagtcttcttcagctatatcctaaggatcgtagcagtgcccgcctagcatttatagatgaggcgttttctgcactttcccaggaacgtattgagcagatggtagactattttgaggctaatgattttcaggtaatttatgctgcgcctccggaaaagataagcagtataggttctcgggtgcagtcaactatcacattaacatctaaagggcgtcagagctttgcagtagaagggcttgtcctagatgatgaagaggatttctga

SEQ ID NO: 42051 - DNA, 1236 bp, Butyrivibrio proteoclasticus B316
atggcagataaacaagtgaagttaaataaacgtcagaaggatgtattaaaggcgctccttgataagctggaaaagagcaagacatatcgtggagaaaatactgtgtctcagaatttcagagttaacccggcagatttttttaaagaatatgactctgattttgctaatcttgatgaccaggatgactttgagagggaacttgacactcttgaaaaagcgggactggtcacgctttttatcgaaagcggtgttataaagtctatcgacatggttctgtcagctcaggataaatactatagcctgcttgaaagaatagaactaaaacagctagaagaaatgcagatatctatgtataaggcctttcttggtagaaataagttgatagatctattttgcaatgaacaaatcgctcgacttcaaggtaggaaaaaggcagaatatgatatacctatagctaaagaagtaataggtatcattgaatatatcagccagaataaagaagaaattctcgaaagagaattatctatcgagttatttggggattctaagaaatttgaaaaagaataccgcaataaggttattacagtgctaaaaaagtatggagaatttagtgatttagtcgaaaacattcctgatgatacagaattggggcatgctatattggcagagtataacgtatttaaaaacccgacatatgtaaattttaaagggaaaggaaccatttgggtaaaagacggagaaaaactcgaattaaatacttctatgccagttgcaatagattctagtacactggaacgtattgatagcgttatgataaaagcgcagaggatagtaactgttgaaaaccttacgagttttaaccgcttacaggataagaatactttctttatttatctggcaggataccataacacagataagcagaattttattcgcaagatagcagagactaatcttttcaagacatggtatcatttcggagatatagatccggatggattttatattcttgaacatttaaagaaaaagaccggcatcgctttttctccgcttggtatgggtattgaagaactgacaaagtacaaagaatattgcaagcctcttgaaagcaatgatctcaagaaggcaaagtcccttgttgataaaggattatacgaggatatagtgcagtatatgctagaaaataatgtaaaacttgagcaggaggttataagttggaaacagctcagcatctga

SEQ ID NO: 42052 - DNA, 1461 bp, Gallionella capsiferriformans ES-2
atgaaagcagataagaccatcgcaacctaccgccgcatgcggacgcagccgctatggcgattgattgcctcgaataatgggccgaccgtgattggtctactccaatcacatctgtacgaaagtgaccggagccttcccgcctcaatattccacgaacggatcgggcgcgatctggaagaacttcgtgcccaaggcgaagatttcccgcaaacagcgcaggcgtatgtggccagttggttagccgagggatatctggagcggcggtttcttcctggcgcaaaagaagaggaatatgaactttccaccgccgctgtcgaggccattcgatatgtatccggtctggccaaaccccactcggccgcaaccgaaagccgattaacactggtgatcgatgccttggcacgacttgctgaggataccgataccgacaaattccgccggatcgaccgactgatggccgagcaggcgcgcatcgacaaggaaatagatgctatccaaaaaggtcagatgcgagtgcttccccatacgaaggcattggagcgcacacgggaaatcatctccttggcagatgatctggcgggtgattttcgccgcgtccgcgatcagttcgaccaactgaaccgggatttgagagagcggatcatggacaacgacggcagtcggggcgacgtgctggattcgctctttgccgggatcgatctcattacggaaagcgaggcaggaaggacgttctcggcgttctggcgtttgctgaccgatcccgagcaggctgccaccctggatcaagcactggacagagtcatgtcacgcgagtttgtggcgcaactggatgccaaagacaggcgttttctcctccgactgacacgaacactgctggaacagggcgggatggttcacgaggtgttgcagtcgtttgcgcgtagcctcaagcattttgttcagagccgcgaataccttgagcaacggcggctcaaccaactcctcaaagatgcacaacgcgcggcactcgttctgaaggatgaagttagggcaacagaagctctccaatacacgctggagctcactagcagtcgcctacagtcgctatctcaatgggtattgcacgatccatcgcttcaggcgttgccaagccagatgacagatggagatgcggcaccgattgacctggaatcggtcggtgaattggtcgcacagtcggaaattgacttccgcaacttgaaagccaacgttcgcgccatacttgaacaacgatcacaagcatctattgccgatgtgctggatttgttccccgccaaacaggggctgggcagtgttataggactactggcattgggcagtcggcacggcttaaaggttgacctcaatgagacagttgcatgggttggcgacgacgatcagcgacgcagtgcgaaaattccgaaaatctttttcttgagggagcgagccaatgagctggtctga

SEQ ID NO: 42053 - DNA, 720 bp, Gallionella capsiferriformans ES-2
atgagctggtctgaaaacgcatcgggacaggagatggccgcctcgccaaccgaagttgagctgcctgtcacagcagagattcctacaaatacactgttcattggagatagtggcgagttgcagctggacactcgccgtgccttggttcaacttctccagggaccatctctggatggtcgacgccaccccaaactatggccgatgctgatacgcgacgaaggaataatacgtcgtcgcttggccgagttatttcttgaattggtgatcgatctggatgtgcaggtcgccttcacccgtcaggcagaaaccggggacctggaagtcccattgctgttgcgtcgtgctcaactgacttttatcgactcgattctgctgctccatcttcgccaacgattaacccaagccgatacgcaaggagagcgtgccgtcgtgtccatcgaagagattgtggaataccttattccctatgaacgcacagcaaacaccgatcggtctggtttcaccaaacgcgttcatgcatcaattgagaaaatcaaaaaacacagcatccttcagaagatacgatccagcgacgaccggctcgaaatttcgcccacattaaaactacttttctcggcagaggagatacaagcgctcacccatctatatcagcgtatggcagccggtgagacgcctgcaccggcaatccagtccgagcatgatgaagaggcagaacaatga

SEQ ID NO: 42054 - DNA, 3375 bp, Gallionella capsiferriformans ES-2
atgaattcagaatctcaaaccggtttgctattcgcccgagaacaatttcgaatgtctcggttacaggtgtttaactggggaacgttctcagatctgcatgacgtcccgatttcagaacgcggcttcctatttgtcggccgatctggcgctggaaagtcaacgttgttggatgcattctcggcattattggtgccaccacgctgggtagatttcaatgcggccgcacgcgaagcggatcgcagtggtcgcgaccgaaatgttgtgagctacatacgcggggcatgggcggaacagaaagatggcgaatcgggcgaaatcgcgacacgctatttgcgtccaggaacgacttggtcggcgctgtcattgagttatcagaactccattggggtgcatgtcactcttgtccaggtattctggatacggggtaatgcaaacggcaatacggacgtcaaacggcactacctgatctttgaacgagcatttgatctgcgcgaacttgaggattttggtcaatccaattttgatattcggaagctcaagctgtccttccccgaggcctttagccgcgatgaattcagaccgtactgcgagcgatttagtcgcttgctcggcattgaaagtgagatggcgctccgtctattgcacaagactcagtcagcaaaaaacttgggggatctgaatacctttctccgagatttcatgctcgacaagccagaaacattcgatgtcgcggatcggctggttagtgaatttggcgagctcaatgccgcacataaagcggttgtcacagcacgtgaacaagttcagaccctagttccggcacgtgagcaacaccaacatatgcaatctctgcaacgcaaacgaaacgaactccaagagctgcagatgggagttaatagttaccgtgatacccgtcgcattgcattacttaagcaaaatatctttgacctcgatatttcggctagtggagctgcaggtgagatagtcaaaaagaaaggaattcgagaaaatcatgctgccacgttgcgcgatctggaaggacaacaccgcgaaatgggtggcgatcagatcgagcaatgggaagccgaaaagaaaggtctggagacccaacgtgatgagcgcctgcgcaaacgctcccaagcagaggatgcctgcaaaaaactgggctgggcactatctgactcacctcaaggttttgcggaactggtcggaagcgccagacaggaagtcgagaactgtgagcagcgtaataacgagacgcgcgaaaatcagttcaagttatccaacaagaaaaacacaactgagagcgaattttctcaagcagtgagggaggtacaggcgctccagcgtcagccatcgaatatccctgcgaatatgctcgaacttcgccgaaacatagccgacgcaattgggatatccgaagaggcgttaccatttgttggtgagctagtagaagtgaagtccgatgagactgaatggcaaggccctatcgagcgcgtcttgcatggctttgcgctatcactgttggtggatgagcgccactatgcggcactggccaatcacatcaacggcaccaatttgggacggcgtctggtgtattaccgaaccggtcgagccgaatcctcacaggctaagcccatcggtgccaattccctcgtccttaaactgaatgttaaacagtgcaatcacgctgattggctacaggctgaattacggcaacgattcgattatgcctgcgtcgactctattcaaactctcaggagcacagatcgtgcgcttactagagaggggcaggtcaaacacaacaagaatcgccacgaaaaagatgatcgtagtcgtgtcgatgatcggcggaattgggtgctaggcttcgacaaccgcgaaaaacttgcgattttcgagaagcaggcacaagacctggcagaagcaatttctcttctcacagaagagttaaagacacttttagatcaggacaacaagcgagcttccagagctatccaatgccagacgctgatcaaccttcagtggcaagaaatcgatgtcacccccttgctggtacgcatttccaatatcgaacggcaacttaaaaaagttcgggaaggaaatacggcattactacagattagtgaacgtattgaacatcagacagttcaggttaaggaggcagacgaagcgcttcgaaaagctgagatcaggcacgacaaaattctcgatcacattcaagaaagcaatcaaaaactcgagtctctcctacaaaacctgacgattattcctctgacgccatatcagactcaagaacttgatgaacgctttgccaagctgccagatgccgttcatcttgaaaatattgatcgcctcaccacctctgtcgtgcaggcattgagcaaagaaatcgaggaacataaccaggggataagcggctgcgagaaaattattgaaaatcgattcgccgacttcaagcggcaatggccaatggatgcgggcgatatggacagcagcctgtccagcgcatcagatttctttgccaagctggttcgtttggaggcggatggactgccagcttacgagcagcgattctttgatcttctccagaatcaaagccaccagaatcttgctgcactatcaacctatctgaacgatgccagaaaggcgattctggaacggatggagctggtcaatgacagtttaggccaggttccattcaatcagagtgcaaaccaacaaacttatctccacatagatgccaccgaccggcaattgcctgaggtcaaagagttcaagcaggatattcaacaggcgctcagccatgcctggagtgaggaccgcgaattcgccgagtcacgttttattgcactgcgtcgactcgtcgaacgactatcaagccaagacccggaactgaaacgctggcgcgactcagtgctggatgtgcgccagcatgttgaattcatcggctgcgagattgatgagagtggcgtggaagtagagatttatcggagtggcgcaggcaagtcgggaggtcaacggcaaaaattggcaacaacctgccttgctgcagccctgcggtatcagttgggtggtaatgaacatggcgtcccgatgtacgcgccagttgtgcttgatgaggctttcgacaaagctgacaacgaattcactacccttgccatgaacatctttaccaactttggtttccagatgattgttgccaccccactgaaatctgtgatgaccctagagcctttcatcggcggagcttgtttcgtcgatatcagtgatcgtcgcgtttcaggtgtcttgctcattgagtatgaccatgatcgacaaaggctaaaacttccagagcatgcgcacgaggggtcaacaattgaagcttcctga

SEQ ID NO: 42055 - DNA, 1164 bp, Gallionella capsiferriformans ES-2
ttgaagcttcctgacgaggtccgacaggagcttattcgccgcttccaaaacaagcaccgcgaatggctggttcccggtccctccaatgaaaccgagaacacacgttggccattggaaatcaatctcggtattccaactgaggtggctgcccttaagcaacctgaaggcgtgcgcgcttgggtcactacatggcaaaactggcgaggtgtcggcacgctcatttggaatgatcggcgttggcgttcactgggcgcccaacgtctgcccgataagctagtgttgcagggacctgccgacgtagcctcgtggactggtgagaccgcgcgctgggagtgcgcctgcattcgacacgctgaaatcacgacacgctggccatcactggcgttaggtataactcgatattttgatgtccttgccgactatagcgatgctgattacaagcggatctacgcaatgctggactgggttattgccaatccgaattccaatctctacccacgccaattacccatcgccggccttgacagcaaatggcttgagggacgcaaggggctattgtctgacctcgtcgccacgatcaagggatacaccagtgaacgagatttcttccagctctgcggactgaaacctctgccatatccaatacgaatgagggttctagatcaggaaatcagaaataaaattggtggcctcggtgacctctctgccccattggatgaacttgccgccttaaatctttcggtatccagagttttcattgtcgagaaccttcaaaccggattggcctttcctgacatgctcggcacggtcgtcattatgcgactgggttacaacgtcgatgttctcgctcgattgccatggattgctaaagcaaggtgcatctactggggagatttggatacacacggattcgcaattttgaatcgcgctaggtcctacttgccgaatcttcaatccgtactcatggacgaggaaacattactcagtcacagaacattgtgggtcaaagaaaaacaacaacatgctgcagaagcgcatccgctcctgaccgatgccgagcaagcggtgtacggaggcataaaacaacatcagtggggccagaacattcgacttgagcaagagcgtattgcatgggactacgtgtggaattcattaattacctga

SEQ ID NO: 42056 - DNA, 1407 bp, Clostridium cellulovorans 743B
attaatttatttaacattatctcagaggatttttttaagccactaacaagcaaacacaaaagtatctatgttgattgtataaggcttatatataatacttataaaacggagttgtcttttggtgtagataaagaggttataatatctgaacttgagaattattttgacaaagaatcaaatatggaaatggtatttgatgaggatgacgaaatcgcaaaagattctagagcaaaggcaaatgctatactaagaaggctaaaagagagtgggtggcttgaatatgaattatctaatgattataaagtaaaggtgaacttatttgactatgctgcaactatgattgaatcctttaataagatagtaaaaaatgaagaactggagtatcaaagccttgtatctcaaattcatgctactcttttaaacaaggaagcttatgtaaagccttatgagtacatcataaagagagttatcgaaaataccgaagaattgataattggattaaaaaaactaaatacaaatataaaaaaatatattgatgctataaccaatgaaaaaactgctagcgagatagttaaggatttcttcgtttatcacaaggatattggttcaaaggcttatcaccgtattaaaactagtgacaatatctcacattttagaacttcaataatcgaaaatctatacaatattataaatgatagaaatatatttgatagagcagttgtaggatatatggaagtagaacaaatagatgaaaaggtagaggctgaggagctgttacgaggtcagataatgaatattatttctcattttagaaaatatgatgacattatagaagaaatagataataagaattctaaatatattaatagtgctgttgcaagagcaaagtttttacttaacaatagcaataatacagagggaaaaatctcaagaatactagcttatctttccgaagagtttaacaaagatgaaaccttgaatttgtgtgatgaaactgatgatacactctttgaggtttttaatatatttcctcaaagctttattgatagtgactctctatatgtagttcctatttctaaaaagatggcattgccagaaaaacttagtgataagtttggaatctcagaagaagaaagagaattgcgtaaattagctttaaaagaaaaaaataaaaatagattttcacgtaagaacattaatgcttatgttcatgaattattaaaggataaaaaggctgtactagcgtccaccattccactaactactaagcgagatttaattaagataattttcataagtctttatggaaaggacagaaaatctatatataaaactacccaattgaatgaaattatatcagtgaatgatttgaggttttgtgattttttgatagaaaggtgtgaatag

SEQ ID NO: 42057 - DNA, 600 bp, Clostridium cellulovorans 743B
gtgcaaaaggataaatttagagtagcagctaataaacttttaaataattgttttataattaagaaaaaagaagatacaagaaatgactatatttttattattcagaataaagagctttttatagagtattttgatttattagggtataaaattgaaattaatgatatgcaaggagtagtagcacttattagtacatatggtactggaagattaagatttaaaaaagtagagagtatcattttacttatattaagacttctgtatatagaaaaatgtaaggagttaagtttaaatgaggatgtagtagtgcttgtagatgaaatacatcagaaatataatatgcttaaaattgaggcaaaattaaatcttgataagacaatattaagagatacaatcaggttgcttaagaggtataatataatttctaaccttgatagtgatgttactatgtctgatgctaggattaaaatatatccatcagtattatttgctgtttcaaatgataatcttactgttatttatgatgctataaatgataagttaaataaatatatgaatggagaagagcagaatgatgatgaagaagttatgcaggattag

SEQ ID NO: 42058 - DNA, 3207 bp, Clostridium cellulovorans 743B
atgatgatgaagaagttatgcaggattaggttgattaattggcattattttgtgaatgaaactatcaatgttagtggttcttttttaatcagcggtgaaaatacagcaggaaagtcaactatattagatgcaattcaattggttttgactactaacaatagaaagtttaatactgctgcaaatgagaaaagcaatcgtgatttaaagggttatgttcgatgtaaaactggtaatgaaaataagtcttatatcagaatgaacagtgttattacatatgttgcattagaattttatgaagaaaagacaggtaaatattttacccttggtgtaaaaattgattctcctgatgaggaaagtaagcttacaaccaaatggtttcgtgaggaatgtaagctagaggaactgtcatttttaaaagatggaagaccagctacagcagaggagtttaggagaaaggataaaaaggtgcaattaatttcacaggtatctgaggcaaaggctagatttgcacagcggttaggaaatttagaggatagatttttcgatatgatacctaaatcattggctttcaaacctatggataatgttaaagattttattaataagtttatattatctgaaaaaacaatagaggtctccactttaagaaataacattgcagcattaaaagaattggaagatttaatggagctgacaaaggaaaaaatagcagaacttgatagaattatttctaaaaataatgatattcttgcaaaaaaacaggaaataaagaccaatgaaatcttaattaaaaaagcagaaatagaagctaaaaaactagagtgtgagaagctggaacagagtagacatatttgtgagcaaaggcttatagacgaacaaaacaatgaaactactttgaaaaaaagcctagaaaatgaacgggagaggtttactaatttacaaattgtactgggacaaaatgaaacaacacagcttatagttaatacgaaacatagaatagaaattcttcagaaagataagcaagttgctgaggcttcagttaaaaagcttcataatatgttaagtagatcagaggatgcattaagtttgattaataaatatgaagtttttattctttcaaaggaagagctttcaaaggtaggctcagcggattttgaaacagaagaaaaaataaaaatagtatataagctaaaaaaagaatttcaaaagcttcaggaaggttatagttcagaacttgtgagaactaaagacctacttgataaatctcaaaagagtaaagctactttagaaaatgaaataaagaacctaaaaaatagaaaatttacttatccagaaaatactacaaaacttaaaacagctattgaaaaggagtttttaagtcgtggtataaaaagtgaggtaagaatattttcggatcttttagagattactgatacaaaatggcagaatgccgttgaaggatatttaaacagccagaggttttatataattctagaaccacagcattataaagtagccttagaggtctataataaaataaaaaaagaagtacatacagttggacttattaacactgggaagcttgacattaattcattagcagacatggcttcgctagcttatgttattaaaagtgataaccgttatgcaaaagcatatgcagtatatttgcttaatcgagtggttcgctgtgaagaggttcaaagcttaaaggagcacaaaatagctattacgcctgattgtatgttatatcagaactatgcagtaagaaaaattgacgagaagatttataacactccatttattggagcatttgcccttgagattcagcttaagaacaagcagaatgaactgatgaatttaaaggaggatataaagaaattaaatgagaaatcaagtgtttgtacgcttcttatagaaaagttaaacacatgtaaaattgatgtattagaagaaaacttaaatgccccaaaagaactaagaaattatgaggaacttatagcaaaggaaaaaatagagttaaaaaaggctgaagctaacccaagctatattcaaatacaaattcagattgaagaatgcagaaaggttgttgatagtaaggatagagaacattctttatcaaatcagaggattggagaactggaaaaaactttaaaagcgaataaaactgatatagaaaatttactaggtgttattttaaatttggagaatatctttaatttattttgcgagaaagatgcaggggtaacaatacttggtttaaataaatttaatgagcaaataaaaataaagacaccggaaacgattgtccagaatttttctcctcttaaggtaggattagaaaataagaaaaacgaattttgtatggaacttatcaaattacaaagtagttactgcagtaaatatgattgcgatttaggttctggatatgaacaagtgcatgaatacataatggaacatcaaaaacttgttttggcagatattattaaatatgaagaagagctaaaaaaggcaaaggacaattgtcaactagaatttagagaatcatttttagcaaggctcaaagaaaatattgagaacgcaaagttagaatttagaaatctaaattatgccctaagagatatttattatggagaagatagttataaatttgagttgacccataataagcaaaaagaaagcatttatcaaatgattacctcaaaaaataacgaagcaggttttaatttatggtctaattcctttgaggaggagtataaagaggaaatggaagatttatttgctaaattaacagcttatgatgataagggagagaaggttcttacagaatatacagattatcgtagttatttggattatgatattgttgttgaaaagaaagatggtactcttcaaagattttctaaaatttatggagagaaaagtgggggagaaactcaaactccatactatgtagcaatagctgcatcatttgttcagctctataagcatggagatacaataagaattattatgctagatgaggcttttgataaaatggatgataacaggattagcgctatgatggacttttttaatagtcaagattttcaaatcatattggcaacaccaccagctaaaatagaagagattggtgaaaaggtagatacaatattaatggcaatcagagaaggaagtacatctataattgaggagtatgatctatga

SEQ ID NO: 42059 - DNA, 1173 bp, Clostridium cellulovorans 743B
atgataggaaagtacgaaaaagaaatcattaccaaattactagataagtatgagaaaagtaaaagctttataggtgaaaataaaataaatcaaaaatttagtgtgaagattgcttctgtatttccgaaatataccgaccactcaaattatgagatgtttcaagaactaaatgaagctattgatgttttagttaggaaaggttttataatagccaaagcaaattctgctcatgtttataacaatgctgttctaaatatagatgatttagaagaaatatataagtatattggtagaatgcctaaaaaaggtatcaataaatctgtattagagttaatggaaaagtataaaggaaggaatgaaatattagaccgatatttcgagatgcaatatgaaaggattcattcaaataaatctatacaatatttcagtaatgacttgatagaactagaaaatattttagtagcagttgatgaattgttgaaggttgatactgagacatttgtaagagatttttcagttagaacttttaaggattctaaaatgtttgagagaatagtggctaaagttataaatcttatctatgagtttgggaactttccagaaaagagccaaatattaggaaacttaaatgtttttaaaaaccctacttatgttaattttaaaggggcaggaagtattactattaagggacaaaaaattgaattaacaaatcttagtggtgacattgcaatctcatctgctatgttaaacgatattgagaggattgatgtagcaggtaatgctgtaataactattgaaaacttaactagtttccataccttctctgatgagaatgtgtttgctatttatcttggtggataccacaattgtgtcagacgagaatttataaaaaaattatataagcaaaatcaaaatatagcttattatcattttggtgatattgatgctggtggattttatatattgcaacatttgaagcatcaaaccggtgttgatttcaaaccttttaatatggatatagaaactttaaaatcatatagtaagtatatcaagccattaacagaaaatgatagagatagactttcgaaattaattaatagcgaatactgtatggtaattaagtacatgattgaaaataactgtaaactagagcaagaagcaatcaataattga

SEQ ID NO: 42060 - DNA, 1419 bp, Selenomonas sp. oral taxon 149 str. 67H29BP
atggagctattcgatgtcttaccagagcgcttcttcgggcttctcgcggggaaatgtcgccgcatctatgcggaagctggactttgtctctacgaacagtaccgtcttgcccagtttggtatcgagcaggagattctacgagacaagtttcaggaactcatcgagagctgggcagaggcgggcgtagcctatgaggacgacgttttttcggacaaggacaatgccatagaggagtcgcgtgccaaagccaaccacatgattcgccgtatgaaggaattcggttggctggattacgagcagcgcgaaaactttaaaatctttattttgcttccacactacagcagtcgtttgtgggggctttttgcaaatctgtgcgaaggccgagccgttgaataccagcgctttgccttcacgacatatcaggtactttcaggtgatggagcaaaggtacagccaagtatggcagtactcgaagcggagcgcttggcagaggagtttgttgaggagctgcgcatcctgctgaacaacattaaaagcaaaatggagcaggtatcttcccaaacgagtctacaggatgtactctcccatcattttgtcgaatatcgggcagatattgtcgatcgaagttatcatcgccttaagacctcggatcatgtttcccgctaccgtatacgtatcctgcaggaggtgcaggacatacggcagaataaggagcgttttcgctcactttgtgatgatgctgtgcgacgtcagcttgccgactcgatggatgcagcagaatatcgcatgaaagcctcgcttcaggcaatcgaggaaatctatcgagggcttgatgatatgttcgcgcagatcgaccgccggcacaatcaatatgttcgtgcatcctatgaacgtgcactctatttgcagcaggagggaagcgctcgcacggagagtatgatcgcggggattctcatggcagtcgctgaggcacgcgatcagagacgggatattgatgagctgccgtgtatttttcgtctgcaaacaacgaatatgcttcttccgtcatcacgttacgtgccacgcaaaaaacgcgtcctgcgcccaaatacggacacccccgtacgcagtatcgacgaaacactgcgtgagcgtgtacgccgcgaaagtgcggagcgcgtcgcacgcagtatatcacggcagaaaatcgaaacgtggattttgaatgttcttgggcaacggagttccatggagattgacgaattgctcgcgctgctgagggaaactgaatctccggatctcctccaactgctctacgtttatctctatggatatgatgattgggcaaagtaccggctgggtaaaaataaggagatcgaagagcaagatacggtacgatacagcaaccgcaccgtcaggcgcaaggggaaaataaaatga

SEQ ID NO: 42061 - DNA, 600 bp, Selenomonas sp. oral taxon 149 str. 67H29BP
atgaaacttgagctgctgaacgaagaagaacgtactcgtattcggagtgtcatacaggcattgttgtcgtgcaattttttgacacgcgaacacgatactgcactttatatcgcggcacgtcgctatcgggaagagattgcggagtactttcaggtcatcggctgggagtttcgtgtagacgaacgctatgagatcgtatggctgctctccacgggcatggcacacagacgggctctgaccatggaggaaagtatatggctgcttgtactgcgcctcatctacgaggaaaagcggacgagtctaaacctgagcgcgtttccaatgacgacgctcgcagagatccgcgccaaatatttggcacttcatctgcccgatctcaagaaaacggcgatacagcgcctgacccagctcacgaagcaatatcgcctcgcagatgtgttggatcgggatctctccgaagagtcacgcattcgccttttccatacactcgcccttgccgtagacggggaagaactttcggacctatatagcagacttgacatctatcgacagaggaaggaggaggactatgaagacgctgcggaaaatgaaggtgattaa

SEQ ID NO: 42062 - DNA, 3321 bp, Selenomonas sp. oral taxon 149 str. 67H29BP
atgaagacgctgcggaaaatgaaggtgattaactggcattattttgatgaggaagagattgccttcggctcggcaacaatgctgtcaggacacagcggtgcaggtaagtccacattgctggatgcactgcagtatctctttatcggaagtcagacacagacgcgcttcaacgctgcagcgacgcaggaggcacggagaactctgctgcactacctgcgaggcaaaatcaaggcagagggcgtacagtatctgcgtgcagacgaattcacctcctatattgcacttgagttttatgatgacatcaagaaaaactccttcattgtcggatacgtggtcgatgtctttcatgatgacaggatgcaggaggaattctttctcatcgatcagcatacgctctcggagcttgactttcgcaatacggacggcacactctatacgcaggagacatttcatcgcaggtatgcgcacggcagcagtgtgtttgagacgggaaagaaacaatggcagaaacgcttgatgaaccggctggggcagctgtcctcgcgttttttgccggcgttctctcgtgcgatcgccttccgccccatcgaccaggtgcgcgattttatctatgaatatgtccttcttccccgcgatttgaagctggatgttctgcgcgaggtgttctattcctatcagaaattcgagcgtgatctgcaggatctgcgtgctcgaaagcatgaattggaaatactgaaagatcactacgatacttactgtaaattgcgggatacggcgtatgagcaggaattcgtattgctgtcttttcggcataagaacgccgacgagaaactggctgtgggacgccggcagagacagacctgtcgtgatcgattggacgatttacagacgaaactgcatgcacaggaacgcctctcaaaacgcagaaaccaggaacagcaggaggcgtatgctgcatggcagggaaatgacgaaaagcgcagacgggatgagctgctggagacacaaaaggaacgggtggaaaaataccgttcgctcacagacgcacgacagctcatgcgtaaggaactcatgggtgagttcgaggaagtatccgcactcggcgcataccccgcaggagagttctttcgcctgccagagggaatgccacaggcgttggaggagctcgcgcggacactcaaatatgcggcagaagataccatccagacaacacaaatcgaacagatccaggagcagctgaaggcgggcggcgaaatacttgctgctgtcagcaatctatggcagcgcggcaatcttctcttggaacaggcacagagtgcagcagtccagcggcgggaggaactgtgctcggagattgaaggtctgaaacggaggcaacgcagatatcgtccggagatgatgcgtcttaaggctttgcttgaagagcgacttgcgggtcgctctaaggtctatgtgctctgtgaggagattgagattttggacgaagaatggcgtgatacgttggaggggtatctgaatacccggagatttgacctccttgtggaacgagaattttttcgcgaagcactgcacatctatgaaacagaaaaaagagaacgcaacatagagggcgtcggtcttgtgaatacggaggcggaaaaaaagtatctcggccaacaggaaaacaaatccctcgccgcactcctgctgacacagaaccccctcgcacaggcgtgtatcgaccacctgctcggaaacgtgatgcaggcggacaatgagcaggatatgctcaggtatagaagcgcggcgacaaaaagctgtatgtcctacaagggcttggttgcgcgtcagataccacgacggttctacgagattccatacatcggtgcaggtgctatagaccgccagcttgaaattcgtgagcgagaacttgcggaagtaaggcagcgcctagtcgtacttgctgaaggggcaggccacatgaagcagatctcctctgttcttcatgaaccgctgcatcgatacgcaaacgctgcgaagagaatgaacgttcttgccgaacttgacgcctgcaaagcagaccttgagcgcatttctggagaattgaatgcgatggatctcagtgaggcagtgcgcctgaaatccgtctatgaggaatccaaacgacgcgccgaagaggcagcgcatgattgcgcagagacgatgcgggcacaggcacacgctgaatccgagctagatcaagcagaacggtctataccaatcctagagcgtacggcagctgctgcggccgaggccgtcgagtcatggcgagagacttatcctgatctctgtactggcgcagaagcacgtcttgcctcactcatgcaggaggcgcgtggaggacggagcatggaggaacgtctgcagagctatgagatcagccgacgagggaatgagacccggcgcgacaacatgtggcaaaaacttctcgttgcgcgagagcattatgggctcgcgcatggagatacgggacatgtctatgatccagatcacagttattacacagagatcctagagcgactctctgggacggatataccttcctttgaggagaaggcacgtgaggctctcgctcagtcggagatggagtttaaggctcatttcatcttcagtatgcgcgaggcgattgaaagtgcacgttatgaatttcgtgagttgaactatgccttgaatcagtttcagttccacaaggataaatatagctttcttgttacgccaagtgcgaagtacaagccgctctatgatgcagtgatgatggcggattgggagacggcaggcgggctctttgccgatgcggacaccgcggcaaacgaacaggcaatggagctgtttgacaagctagtcaaaggaacacccgaggagcaggaagagttttcagattatcggcgatatctggactatgacatccgtatcacagatacggcaggtcagaattatctttactctagagtcctccggcaaacgtcgggcggagagacgcagactcctttttacattgcaattctcgccgcttttcaacagatttacaatgataaaacaatacgcctgactgtctttgatgaagcattcaacaagatggatgaagagcgcattaaatcatgcatcgaactgataaaacggatgaaaatgcagctgattgttgctgttcccgatgagaagttggcagcaatcgccccgctgatggatcagtcaattattgtcaccaatgtgggaaatcattgctttactgacgaattaggggatgtagcaacgtgggagaaaggactgaatcatggagctgatgcctctgcagatgcactatga

SEQ ID NO: 42063 - DNA, 1260 bp, Selenomonas sp. oral taxon 149 str. 67H29BP
atggagctgatgcctctgcagatgcactatgaggatattattctaacaactttattggaaaagtacgaaaatagtaaagcagcagttggggagctggggcgtcggccacagtttcgtatcctgaaatcagcactttccgctgactataccgatgaaatggatgtcgataagcgggaagcgatacatgcagcagcgtgtgaacttgagcgtcaaagactgattctcgtcgtctgggaacgccacggggcaggacggatagagcgtatccttctttctgcaaatgtatctactctgtatcaacggatggggaaagtcatgcctttgatacgggtgaatgaatatcagacaaagcttttagctcttgcaaatgtacgtacaccgtgggtgcagaatttttatgccacgatgatggaatcacttgcagataatgtgattcccgcgatcttacctaaagaacaggttctttacgcgaatttgatacgcgctatccttgctcttccagccgaaggcgagagcgccataccaagacgtgtatttagccagcgtattttccgcaacagcaagtattttgaacaacacatagagctgccgctgctccgtctcttacgtcgatttgtcgatgagccatgtgcgtcggccgcagagtatatggatgcagcagggattgccgtgacgcaaggaaaggtgtggatcgcaggaaatctaacttttctgcttggtgatcgacgatatttcctcgcagattttccgggtggattgatgcttacctatgatacaatcactgccatgaaaatagatgtgcttccccctgaaattctgaccattgagaatctgacaaatgcagaaactctgacacgaatggtagataccaatcacctcctcatctatacggcaggattcccaaaccgtacggtacaagctcttcttttaaaaattgcccccctccatcggactttccatatacgtcactggggagacatcgattacggaggtatccgtatctttgaattcctgcgaagacggtattttccgacactcagccaatatcgcatggacgtagagacatttcgtgcatatttaccatttgcacagagcctcacccctgcgcagagaaaacctctttcggggctactcgagcagaaagatttttcaacgtggcatagcctcattcgcgtgatgttggacgaggggaagtgggtcgaacaggaagtcatgttatggcaggattcgtctgggatggattccctgaacgaagagtaa

SEQ ID NO: 42064 - DNA, 1413 bp, Corynebacterium accolens ATCC 49726
gtgcggctgctggcggccgataatgctccggtgattttggcgctgattgctgagtacttcccccgcggtactcgggcgcggccagcggcggaggtttatgagctgatggtcaccgatttcgaggtgcttgccagtgaattctcaatgccgcgcacaccgcaaagttattgcaatgactgggtaaaagctggttggctagtccgaaagtctggcaagagttcgcgcggggaaacgttggaaccgagcgaggaagcactgtccgcgctcgaggccgttgagcgttgggaaacgccggttactacggtcacggcatcgcgcgtggaatctatcggctcggctctgcagcgcttggcgcgggatacgaatgaggatatttcgagccgcgtcgccagcttagaggcggagcgagaccgcattgaccgcgaaattgaaaaggctcatttagggcagttcgaaaggctgactgcggcagagaccgaggaacgcgtccaagacgtgctgaacatggccatggcggtgccaagcgatttcgccagggtgcgccatgaactcgaagccctcaatcaccgattgcgccgacagcttttggatccagaaggttaccgcggcgaagtgctcgaggaaatctttagcggtgtagaccacatcgcggaatcggacgcggggcgcagcttccgcggattctattcctacctcatggatagagaacgcagcgcgtggctggaccagtggattaagcaggttctagaaagcgacgttggccaagagctagcgccagaaaaccggcggcagctgcggaatctcttccgcgatatggaagaaacgagcttcgaggtcaatcaaactatgactggcttggcacgcagcttgcgcaactatgtctcctcagaacaattcgcagaagaccggcgcatgattgagctactgcgcgaggcgcggggcatggccattgatgcagcgcaggcatcggagctaaaagcctttcaccgcatggaaactcccctacagcgcatcggcatgtccattcactccgtctcgcgcatccaactagccaacccaggacgcgaggtcgtggaagaagcaccggaagccttccagccaggccaggagaacgccgaggcgttgtatgagctggtacgcgaatcagagattgattttgaggaattgcatggggcgattcgcggggccgtcggcaaagcgggtccgtgcacgattggccaggtattgcaggcgtacccgcccacgcagggcctggccagcgtcgtgggattggtgcacattgcggaccaacacccgcttccagctttgcacgatgatcatgaaaaggtcacctggaccgaagaagatgggaccattcgcgcggcgtatatccctactatgtatttcgatagcaccaccgttgaggagttatag

SEQ ID NO: 42065 - DNA, 651 bp, Corynebacterium accolens ATCC 49726
gtgagcgctactgataatcaccgcgtcgattcggcgcatgagcccccgctgtgggaaagcgataaaggatcgctgacctataactcgcgccgcgccttggtgcagctgttgaaggggccgctcgtgcgagcgtacaaggaacctgtcttatggtccgccatcatctcggacgaagacaacctgcgcgcccgcctgcatgaggtattcctcgagctggtcgtcgatgaagcggaagggtttgcgtttacccggatggtagaagaggaaacgctgcctatcccgcaggtgctgcgcacggataagcttaagcacatcgataccgccatcctgttgaacctgcgccaggaacttggtttggcgttgcccggtgaacgcgtgattgtggatgtagaagatctccgggaaggcattggatacgtccgcgcggttgataaccgcgatgaagccgggttcaataaccgcttcaatgcggcgattaaacgcatccgcaatgaatactcgctgctcagcgccaccgagacagaggggcgctacgaggtttcacccgtcttgcgccagcttttcgatgccgccacggtcaccgccatccgggatgaatacgcccgcctcgcagaagccgaaagcgaccaggaggatgcttccgatgactaa

SEQ ID NO: 42066 - DNA, 3372 bp, Corynebacterium accolens ATCC 49726
atgactaacctgtatccaggccaattccgcatcagccgtatccagctcattaactggggtacttttcacggctacttttccatcccggtagcccgcaagggcttcctcatcaccggcggatccggttcgggcaagtccacgctgcttgatgcgatgtcagcggtattggtgccgcagaaggacctcaagtttaacgcggcatcgcagcaggacctcgggcgccataatgggcgcaacctcgtctcctatattcgcggggcgtggcggcaacaagaaaatgcgcacacgggtgaaatcgccccggagtatttgcgtgagggcgcgactaactcggtggtggcgttgacctacgataatggcactggcacgcagcacaccctcatcgccatcttccgtctcaacggcggtgaaaattcggtgagccaaattaaacggctctatggggtggtgcagggagatgaggacatcgataagctcagccccttgctcacccgaagcctggatacccgcaagattaaagccatgtacaaggggcctggtgcgtcatttacgccgacgtacaccacgtttgcggatcgctttcgcaaacgcctgggcatcaagagcgaacaggggcaggtcctgctgcaccgcacgcagtctgccaagtctctctccagcctggaccagctcttccgggactatatgctggatacgccgtctaccttcgagcgggctgaggagtcggtggagcaatttgaggatctgcgccaagcatacctgcgggtagaggatgtcaaggcccagattgagacgctggcacccctgccccaattacactcccagcgcaccaccgcggaagcggataagcacaaggccgaggcgatgaatgaggcgctgccggcggtgcgcgcccgcttggtggcagaagaactggactatcgcattcgcgcgctgaccgcccagcaggcagaggcgcactctgctgccgaggcgctcgaagcggaggtcacgcaccttgacgatgccgagcgccgcgccgccgtagccgtctcccaactcagtgccggcgagctggccgccctagaagccaaaattgaaaccgcggagaaggaaattgagcaccgctccaaggagttccaccaccttgccgctgccgccgaccagtggaccgatcactttgagctcagtccgcacggcttcgccgagctgcaagcaaatgcccgcctgcgtatcgcggacttcgaggctgactcggcccagcttactgagcagcagcaagaagccggagtggccgcccgcgatgccgcgacagcatccgcgtccttagaaagtgagctgcactcatttagctcgcggcgcaccaatatcgataaggcccttgtggagctgcgcacccaactcgcgcgggatactggctatgccgaatcggagcttcccttcgctggcgagctactggatatcgccccgcagcaggcggagtgggaaccggtgatccaaaaattgctgcacggattcgccgccaccctgctcgttccggaaaccgcgcgggaagctattaaccagtgggtcaattctcgcaacgtgggtacccggctcgagtaccgcactatcccggagtttgcaccggcgcccgcgcccgcgcgcagcccgcaacagctcattcacaaattggagttccaggatcaccccatggcgccgtgggtgcgccaccatatttcgagccgttttaactacgaatgcgtcaactcggtggcagcgctcgaacaggtaaccaagaccccggccgtcacgcgcgatggcttggaaagccggcccaaggataaggatggctcgacgcgctttatcaaggatgatcgcacgcgctttaatggcacgcggtggtaccgagtgggttccaccaataccgccaagattgagctcctacgttcccaattgacggaagcgaaagccaatgctcgcgccatggccaaacaggtccatgaactcaaccggaagatggatatcctgcgcacgcagcgcgataaagcgcagcgcgtactggagactaagttccaggatattgataccgcttctgctgaggctcgcaaacgcgatttgcaagaacagtatgattctttggcttcctccccagaggcacaggccttagccacggcacacgagcaggcaaaggaaaagctcaccgccgcccgcgctcaactgaacgaagcacaaaaacacctcggcaacgtggagggcgaactgaaccgctccacccagcggcgccaaagcatcggaacggtgcccacggtggcggatcagggcatcgccaaggcggtcgaagaggccctgcacaagagcagaagaaaactcaccatcgatgacatcgatgcccggcgcgatgaggtgcaggctaacctgcaagaaaccgcgcgcacggccgcgcgccgcatcgaggagacgaataccaagatcgtctccgtcctgcacaagtacctatcgcagtggccggcggaagcggcggatttggagccacaggcgagcttcgccggcgagggcatggagaagttgaaattcctgcgcgcggaccgcttggcggattttcgcgctcagttcttggagctgctcaatggcacgacggtgcaaaacctatcgcacctcgcctcttcgcttcgccatgcccgtagcgatatcgaacagcgcatggagtttattaataagtccctggagcgcacgcccttcaatggggaccgcaccctgcgcattgatgtgaaggatgcccggggccaggtggtgcaagacttccagcgggatctcgatgccgcaacgtcccatagcctggctgagattagcgccgatgagcccgaagctgcggtagcgcgctaccatgccctggacaagattctcagccgcttgggctcgtctgagccggaggatattcggtggcgcaacctggttctcgatacccgcaagcacgtcagcttcattggccgcgagtgctatcccgatggcacgaccgcgaatacttatcaggattccgcctctctttccggcggccaggcccaaaagctggtgttcttctgcttggctgcggcgctgcgcttccgcctggcggaaccagaccaggacgttcccacctacggttccatcattttggatgaggccttcgaccgcgccgacccagcctttacgcgcaccgccatgtccgtgtttacatcctttggattccacatgattttggcaacgccattcaaactcatccagacgctatcgccgtacgtggatggcaccatcgtggtcaattacgacgagcccattatccagggacgcccgcaggcgcgtacgggctattcgcttatcgatgccacttcctacccccaggaatcccaggagtcccccaatgcagatgcctag

SEQ ID NO: 42067 - DNA, 1134 bp, Corynebacterium accolens ATCC 49726
atgcagatgcctagtgacctgcacacccatgcggcaaaatacctgcgcaaccactttgctgaggcactggcctccccggattcgctgagcatcgactggccgctgcacccgcccacggccgccaacgccgcgcgcgatgtccccgccacccaggagttcatccgcgcctggcagcgctggccgcaccaagaagagatccactacgaacagcgcaattggtcccgcacaggcctaggcaccaattccgttcccacccgcgcggtccttaccggtgctccccgcatcgccgctgcagcaggcctcagcgccgaatactcccgcgcgctacagcgctcacacgacatcgccgggatcttccccgactcccctgcattcgccgacgccgtgtaccgcacctatacccagtggaaagaccttgacacatacgatctgtgctgcttggcaccatgcttgacctggctgcgcgcccacccggactccggcgagtgggagcgcgccgttccggtcgaaggtgtggatggcaagtggataggcacccaccgccgccttttactcgcgctgctttcgcccttcggcatcacggatttggggctgcgccgcaccgatgcccgcctgcgcctgcgctacctcaaccacgcccccgcgttgtccgatatcgaggttcccctttcccaggctgcacaactctttcccaccgctcccccgcgcgttctcatcgtagaaaacaagcagaccttcctagccctgcccctgctttccgatgccgccccacccaccatcgccatcctcggttccggccatgccgcccgccaacttcacgcccttgcctggctccacgatgccgaaatcacctactggggtgatctcgacgccgccggcttcagcatcctcaacggcgtgcgcgcccactttccccacacggagtctctcctcatggataccgccaccgtcaccgcgttccgccacctcgcggtccccgatcctggtgatggctccgccatgcttagccacctcaccaccgaagagcagcgcgcctcccgcctcctctttaccgagggcaagctgcgaattgaacaagaacggattccattcgcgcatgccactgacgcgattcaatctacgtttcaacgctag

SEQ ID NO: 42068 - DNA, 1533 bp, Bifidobacterium dentium ATCC 27679
atggaaggcgaatcgccattggctgacgtgagacgagaaatggagcggctgcgacccgtgtacgagaccggcgtgctacgactcctgctacgcagcaattcgatgttgtacgtcgcattgctacgctcctcgttcgacccgctcaccggcgaactgccacgcgatgtattagaggagcgtatctcacgcagcctgtcgcgtctggccgaaaccggcgattatacggtgaaagacgaccagacggtaagacaggccgcgcacgcgatcctactcgaactgtcccgtgaaggcgatgatgactacgcttggctcgccaattcactggatgtcgcctcgcaccgttacctgtaccgtctgacggctcgcgcacatcgtgcgattgaagcgttgcatcgactggaagacaccacgcaggcgttatccggcgcgcaagccaacagcatcatcatggaaatcgaacacgcacgcatgcagctgaccgccgacccacgtgaacgcatcaaactgctcaggaaggacatcgaagaacgtcaaaaagagatcgacgagcttgaacgcaacgaaaccatcgaaagactaacttccgagcaggtcggcgacatcatcaacgtcatccacaacacgcttcggggcgtgccgatcgatctacgtgaactggcgctcgccgaacgtgacaacggcgacgcgctgcgccggcgcatgcagtcgggtgccatgagcgtggaagacatccttaccgcctatcatgacgaataccgtaaatcgttccgtgaatccgacagcggcagacgcttcgaggacgccttccaggtgatcgtcaccgacgaaggacgtcaggaaatcgacgacgccgtacgtgacatcgccaaaaacccatatctggacggtgagccgggcgcgctgctcggtcaggttcgtgccgaactcgaacgcatttattcgggcatcgaggatgtgcgcaggcagatccgcgcctccgatgaggcaatcagtcgactcgtccgccagcagaccgacacccgataccgtaccatgctggccacattgaaccagctgtttgccaaaaccaacgccgaagccaaggcgaatccgaacgccacggaccggccataccacactgatacgggtctgtcacagattgcggtattgcctaccaagccggccaaggccatggtacggaacgccaccgcggcactgaatgacagcgccccaaccgtcggactgcccgacctcaaggccatgatcgaagtgtgcggaccacgtctgcgccacatggtcgatctgattcatcgcaaccccgtcatgtcacatgacggcatgcgcgtggacttcgcggcaagctttaaccgactgccggccagcgaacgccgagaaagcgaaatcatcggcttcctcagcgcgttacgcaccgaaaacgacatggcatgcgccacctggaactgcgtatcgctcgacggcacccccagaacatggcgaaccagaccgatactcgccaccacacagacgcttgatgacatcatcagggaaggctga

SEQ ID NO: 42069 - DNA, 708 bp, Bifidobacterium dentium ATCC 27679
atgacagacgaacacagcgaaaccgtcggcatcgaacggtctcttccaaccgtcgaacaacccgccctcttcgacggcgacacaggcgacatgaccgccgatgcccgcatggccgccatcgcgctgaaacgagaacgctacatttccggagaactattcgacctggtcaaagacaacgtcgaagccgtcgaacgatccctgaacaacgacatgcttcgcctcgtatccaacgagaaataccacgtcatgtacgcggcacccgtcagcggcatcgaatcgaacatccgttcgctgaaaacccgcgcgagtctcagccgtgaggatgcggccatgctcgcattcctgcgcatccacgtactcgaatacgagaaccagaaaaccccggtggccgactggcaggtcagccgcgatgaaatccgtgccgcgctcgccacgggcgccggctatctcgcgggcggcaatgatgaggaaggcacgacgaagaagatcgccgccgctatctcccgtatgacgacctacgggtatctcgagccgaccgatgacgacgagatgcttgcgatcacgccgctggtaccgattgtgcttgaccggcagctggccgacgagtggctggacatgaccacgccgtccatgacgcacgataccgatgcgggaatgttggatcccatatccgaagaaaacggaacgaccgacgaagaggagcgatga

SEQ ID NO: 42070 - DNA, 3510 bp, Bifidobacterium dentium ATCC 27679
atgatggcgggagacgatatgaagatcatcgccgatcgatggatgatggaaagccgacagatcgtcaactggggttcctatgacggctaccaggaattcaggccgtccatcgacgccgaatcgccggtcaccctcctggccggcgccagcgaatcaggcaaatccacgctcgtcgacgcgcagatttccctgctataccccaatggcacgccttataacaaggcgtccaacgcaggtcggtccgagcgcaacgactacacgtacctgcgcggcatgatcggcatcagtgacggtgataacggcgaaacgccgatcttcctgcgaggacgtgacgctaatggcacgccacaggccatatggggcgccatcgtcgacacatacgtgaaccgcaccaccggaagtacgctctcctgcggcaaattcctctacctgcccgccggagacggcaaagacgaggtgcgccgtcgctacattgcatggaatcgcaaaatagatccgcaaatcatggaccggtaccgtgatatgccattcacccccaacatgttcaagaaagcgtatccggattgcagcatattccccaatgccagcgcattccacgcatacatctggcaggagatgggcctcagcgccgaagcatgccgactcctgcacaaaatacaatccgctgacgccccgtcgcgactcgacgacatcttcaaacaaggcgtgctcgacgtgcccgaggcgctcagactcgcacaggacaccgtcgacgactacgatcggttcaacgccaacttccatagcatggaagacaaagccagacgcgtcgccaaactccaagacatccaaacccaatacgacgcatacgccaaacacctgacccaagtgcgcgaatacgaaaccgtgaaccccgacagccagcagggcctcgaaaccctgaccctatggatgcgttcgcgcatggccagcgaagtgcgagccggactgcccgccgccgaacgcaaggtgaagcagcaggaatgcgacctgcacgaggcacaggagcggatctccgatgtgaacaggcaacgcgaagccatcgtcgaacgcatcaaaggcattgacggcggaaccttgcaacggctgagcgatgacctggaacgcgcccgacgcgacatgcaagatgtgcgctcgcagcgtcaaagcatcgtcgagaaattcgagggtgtcgaaggtgcattgccatccgacgagacgtcctggaacgcgaaacgcgacgcattgacccgatccatggaaacgttcgacgaacgcatgggggatctggaatccaagcgggatcgtctgatcggcgagcgcaccgcagccagtcaggaatgtgcgcagttgcgccgggactatgatcgcaaacgcaggcagaggacccgcatcacccaggcgatggatgaggctcgtgcgctgatcgcgaaggcggtgggcctgagcccggacgaattgccgtatgcggcggagctgatggatgtgtgcgagagcgacgaacgttggcgcaccgccatgaacgtcacgtatgcgccgattgcgcagaccattcttgtcgacagccgccacgagcggggattcgcggcgaagatcagcgcgatcgatccgtcgctgatgatccggcgcacctggcagttcgtggatgtggacaagagctatgattgcgcccgcaaagacggttggatatcgtcgaaattgcagtatcgtgaggattcgccgtttgtcggatggctgaaggaacagaccgcttcggcccgtttggacgcattgtgcgtggagaccatcgacgatgccgcacacgaacgccgtcaggtgcaggctgatggtcagatcaagtccggcgtgcacggtttccatggcatcaaaggcatgaatccgatcatcggtttcgtcaatgaaggctatctgacggaattgaagaaacagcttgacgaagcgcatcatagattgtccgataccgaacgtcgctgcggcatggtgcgcaagagcatcgacctgatgcacgcggaaaagaatcttgcggatctggtcgcgaatatgacgtggaataaaatcgatgtggtcggtgcggaaacgcttgtcgagaatctgaaacggcgaatcgaacagattgaagacaatcctgaaatgacgcggcttaccgagcgacgcgaggaaatcgacaggctgcttgatgaagcgaatgcccgcttctaccacgccaaaagcgaaatgcaatcgacccaggcggcggtcgatgccgaacatgcgtggctggaagcatatgagagcatcgaatttgacgatgatgcgctatccggcgatgtatcgaacatgctggccgacgtatatgagggatgtttcggcggtgtggtccatgccgaggacagaccgaagctgatcgccggcgggaacgacgagatcggcgggcattcgttcgagacgcgcatcgggcacgccatggaacgcgccatgcgcgaacagaacgcggcattgggcaaacgtgcaggggagttgcgtaccgtcgtggaacagagtatggcctcctacttggagagatacgctcccgacgatgactccgcgacaggcagcgttgaggattacaggttctatcttgaggagctgcacagtctgcagatgctcgtcacgcgagaggcgaccgacgaagaatacgccaacagcctcgacaagctcaccaagaatttcctgcaactcaaccgtgcactcaacaccgatcaagaaaacgtcaaggaccagctcgaacgcatcaacggcatgctcgccgggcagaaattcggcccgcgcggcggcaggctgtccatcgacgtggaattccgccccatcgaacgtgcattcgtctcatccttgaaggccacgctgaacaagctcgacgaatggttcaggaacgacaaggacgatcctgatgccacacgcaaggcattcacctcctgcgccacgttcatcgaacgtgttcgtcgggaactggaacaggtacgcgacgtgaacggcatcaggagctacggcgcacgcaacctcgacccgcgcgcacgaagcacgttctacgccatcgtgcatcatgacgacggtcctgacgagcgcatcagctccaccggcggcaaatccggcggcgccctgcaggaactgacatcgttcatctacggtgcggcgctcatctacctactcggcggtgacgtgaccggcagccccacctatacgacgctgttcctcgacgaggccctcatcaaggccgacggccgctacacgcaacgtgcgctcaacgtactgcctcgtctcggcttccaagtcatcgtatccgcaccggaaagcaagaccgccgaaatcctcggcgtatccaccaaagcatacgtggcctacaaggatccgtcggtaggacgttcgttcctgcaggagcttacctccgaagacatcgcccgtcaggaagccgagctccacgatgcaatcgacgccatgccggcggccccgaacgatatagggcccacaacgaccacgattctcgaacaggtgttctaa

SEQ ID NO: 42071 - DNA, 1455 bp, Dickeya dadantii 3937
atgagcttgcacgaacaacaggcacgcttcaggcgacagttctccgaacacgctgcatggcgattattacatgcagacaatgctcctattgttctagcctttattaatgatctatttgctcaagagagcgaagtgccatttggtaaagcacgtgttgcactggaagccgagctaccccagtggcaagaaattttcggcttgcacgacaacgccggtacctacctgcgccaatggattcaggccggttggttgcgcgagcatgacgacaaacttacccgaaccgatgctttcgaactggcgttacgcttcgctcaaggtcttgatcagcgagacagcaatgcgactgcctcacatctgcgcatcgtacaggacgccgtacgagatttggctgtcgcactaaacccaaaccccgaagaacgaattacccttctgatagcacgtaaacaagagatcgaactggaaattgggcgcttgcggtcaggaaagatacctgaactcacagaacctgagcagcgtgagcgcattcgggggttgtaccagttgacgtcagtgctcacaggggactttcgccggttggaagatgaaatccgccagctcgatcatcgtatgcgtgttcgcatgattgagtccgaatcagggcgtggcgaagtggtgaaggcgctgatggaacatgaaggcgaattgctccagaccgatgccggcctggctttcgacggcttttatcagctactctgcgatcaaaatcgaattactgaattccgcgagcaaatccgttcgatcctggcgcgtccggcagcccaatacttgaaatccgacgaattgcgttatctctcccatctggtccgggaattgggtaaggaaagcgagcgggtgttccagatacgtcgccgtaccgaggagagcttacgggctttcgttgaaagtactgctcagcaagaacgacgcgcggtcgaacgcctgcttcgccaactagaacgattagccgtaaatttcaaagagcaggatataagcctgcgtgaaccggtggcattggatctgccaacaggtagcctgcgcgtgcgctctccgtccaccattcacctacggctgccggaggaacgtctggacactcgccaggtagccgccaataccaacagccacgtagccagccggggtatgctggatcacctcaatacggtaaaggtgctggaggttgctcaggccatgaagcggttactcggcgagcatggtccgatgacggtagcgcacattgttcaccaccgccccatcatcggtggtctggaagagctggttgcccacgtgcgaatcgccaaagcggtcaacgccgtggtactggaacacacggaaaatctggtggttgcggatcgcgtcggcaatcgaattagggccaacattcctgcattgttgatatccgccgaacagtttccggtagatttggaggaactcgctttatga

SEQ ID NO: 42072 - DNA, 756 bp, Dickeya dadantii 3937
atgaacgaggaaaaacagcattcccaacaggcacccgccttgttcgaccaataccggacgcgtggccctacgcagccgccaacccgcaatgaaatggagacagttgaggattctccggtcgagccgccatccgctgagacttcagaagttggcatgccgctggaagcccggcgagccctggtgttgttgttacgtcagggagtggtgatggctgatagcaaacgtcttgcgttcgaggcgctgtgtcggcacgaggcactgattgcagagtatttaggcaatatattcatgcacatgctgctggatatgaaagcaggcatcgccatcttgctgcaacaggaaacagcggatcgggacgaggaggcagacgaggcatcacggctgatcaacaaacgcacgctcagtctctatgacacgctgttgttgctggtgttgcgtaaatactatcaggagcgggaaaccgcgggtgaacagaagatcatcattgatatcgaacgaatcgaggcgttgttggcaccctttttaccactgaccgacagttcccgcgccgagcgaaggacgctcaacggttcactgacctcgttgaaagataaacgcctcatcggcgcagtacgtggggatgacgagcgtgttgagatcactccggtgatccgctatgtcgtcaatgccgatttccttgagcgtctgctaaacgaatacgcgcgtctggccgatgaagcgggagcgcaaacggacgaagaggcacaagatgcttga

SEQ ID NO: 42073 - DNA, 3423 bp, Dickeya dadantii 3937
atgaagcgggagcgcaaacggacgaagaggcacaagatgcttgagatgaccgaaatacgtcagaatgcgttattcactcacgctcagattcgcctggcggagctttcggtatacacctggggctctttccatggtttgcattccgcgaaaattgatcctgggggaacgctcatcaccggggacaatggcgcgggaaaatcgacgctcatcgatggcctgatggcgttgttgctcccctccagcaaggcgtcgttcaacgtcgccgcggctcagggagaccgttcggatcgtaccttaatgtcctacgttcggggcaactatggcaaggcccataacggcaacgaaacagccacgctgctaaaacgttcaggggccaccgcaacagggctacgggcgctttatcaggcggaagatggttcgaaaatcacgctggccgctctgttctggattactcaggccagcaactctctcgatgatctcaaacgcctctttgttgtgggtaagcgcgacgtgcgtttagaagaactattgcacatcttcggcgagggcaatgcccgcgtgctgaagcagcgcctcaaagaagatcctcggactgaacctttcgattcgtttaccgagtatcaggaaacctatatgcgactcctgcgcatggagaaccgcaatgcgcccgtcctgctctcccgagcgctgggtttgaagaaaattgatgaccttaccggtttgattcgagatctggtgctggaacctagccaggttaaagagcacgccaggcatgcggtcagtgagtttgatgacctggtcggcacacataacgagctcgatgatgcccggcggcaacgagataccctgattgaattgccagagacaaaccaggcgctgaatcaagccaggggggagatggggcggatttcgtcggaactggccggtctgccagtctacttcggcgaacagtgctctcgactatggcggatacggctggagcaataccagacagagctatttcaattggaagatgagatggctcgccaggaagccatggaaacacaagcgacggaacgggcacagacactgtttcatgcctaccagtcgcaagggggcgagcggctggaggggctgcgcagagatctaaaaatcgctgaacaggcgcatgagaaaagcgtacaaaacgcgcacacctatcaaatagatgtacgaacgctcggtctggccgatacgttgacgcttgattcgttcaaacagaaccaagccaaagtgcaagattcgctggcgaacatgccggcattgcgccagaaaggacaggataggttcgcctcgtcggccgcgagtttttctcgtgagcaagaacggctcaaagagctgacgagcgaaattgaagcgattgaagcaaggccggattccaacattgaccaacgctatcagcagctacgtgaccagttggtagagagtttatcgcttgagtgcacggaggtggctttcgtcggcgaactgatcgacgtccgcgatgaacatcgggcctggcaaggcgcgattgaacgggcgtttggcgggcttcgcaccacgctactggtgcccgatcggcaataccgtctggtgactaaatggttaaacgctcgccacacagggcttcacgtaagggtgcaggttgttcggcttaacccgcatcaacagactgccgagtttctggcggatgggtttctgaaaaagctggattggaaaccgcacccctatagggattggctgaaaaaatacctctcacgctttgacctgcactgcgtaacatcgaccgaaatactggatcaaaccgacttctcgatgaccattcaaggattggtgcacctggatagaggacgcttcgagaaaaaggaccagcaacgcattgacgatccacgctattggtatctgggcttcaacaatacgcgtcgtctggcggcattaaaggcagatcgcgttgagttggtagcgaaggtactcaacttagacaagctggttgtggatgcgcgtacggcgatggacgacctcgaagagcacgcccgaatatgggagcgcatcgaccggttgacctggggggatgtcgatgcccggtcagctcaagatcgtgtgcaatcgttgaaggcggatcttcacgcgcttgaacggcctgacagcgaactgggcgcagcgaaggctcgctgggaacaagccaacgtcgaactgaagaacattcaagatcaaaaaggacgaatcagtaaaagagtcggcgggttggaaaacgatgtaactcatgcgaatcaacagataaatcaggccgatgagaggatcaaagcgggagtgacggatgaggtgcgggaacggctcgacagacgggttgggcagttgtgcctcgatgatcttgattcggtttcagagcttgagggccgccaacgttcagcactggaggaggtacgaaaaaaaacgaactcccatgaagttaaggcggcaacaaaggcgggtgggatcgttgctgagttcaaggcgaaatggccgattatcgcgaatgattggctcactggcgttgatggactggacgagtatctcgatcacctgacgcacctggagaacgaaggattacccgatttggtcgagcgtttccgggagcgtttaaaccgtaacgcaacccagtcgcttgctcggatcagccaggcaattcaagccgagcgagaagacatccaggatcgtatagagacgatcaataacgttttgctgcgcacggaattcaagcaaggtacctaccttcgcctgggaagccgctcagaaatcttcgagcatgtaaaagtgttcaatagtcagttaatgcgcgtgctggcaagagctggaagtgacgagcatgaagcccgctttgtcgagctaaaagatttgatcgaaaagctggagaaggcaaccaaccctgcaacttcgagtaacctggaaagtctgcggttattggactcacgttatcaactctccttcttcgccgaagagattgagaagaacagccagaaagtacgcgatgtgctggattcttccggtggtaaatcgggcggagagaaagaatcatttgccggaacgatcgttgccgccagcctagcgtacgtgctcacgcccgacggttgcgatcgcccgctttattgcaccgtattcctggacgaagcattttccaatacggcagaagcggtcagccgccgcgtgcttaaggtctttcaggagttgaagatccatgtgaacctgatcaccccatacaagaatctcaatctcgcgcgcgagtcggcgcattcgctgttaatcgccgaacgaaaccaggagaggcatgaaagccggctctgcgaagttacctgggaagagattgacgaacaactggcgcaatatgaacagcagggtttgtcaaacgcggccggttcattggggatcaacgtggagccgacgcggtga

SEQ ID NO: 42074 - DNA, 1194 bp, Dickeya dadantii 3937
gtgaagacctggggacgacttccgaaagacgctatcgaggaattacgacggcgggaatgggatcacccaggtagactgcgtgagcgtctacttggtacacggcctctccccatcacttgcgtattgaaaccaccaaccggcaatgaggcgcttgaagatcttggccatttccacagctatattgccgcctggcggaaatggccctggcctgatcaggtagtctgggtaaagaagcaatatcggcaactcggcgaatttacggttcccatcaggctggaaatcgaatcaacgaaagccctcataaccgcgttgggaaccaaggcgattgagagaagccagggatgggctgagcgaatggagccattgctttcattggatagggctctgtatccccctctcatcaggcaacttgaggaactggaaaaactctcaatggcggatatccggttactggcccttgttctgccacagcttcgtcgcggattaggtcagcgccgatacttgcgtgcgctgccgcttcagggtgtggacaccaagttcgtagagctgaaccgccccctgattgccacattgctggatacaatgcacgaccaggagatttcggcctctggcggactagaggcatggctggactgccgtgttacgccatcgaactggctttatgtgaagccactctcccctgaagtgaaaagccatttcgctgagcttgatctcctccggctatctttcgaccaactgatgaccgcccctttgcctgcagggaacgtgttgattgttgaaaacctccaaccaggatacgggcttcccgagctaccggacaccgttgcagtatttggcggaggtgcaaataccgcctggctacaagctgaatggttgaaagatagacgaattggctactggggagacattgatacttgggggctgaaatttcttgccgatgtacggctgaggcagccccatgttgaagccgtgatgatgaatcaggaaacactgctatcccacgttcaacgaggagtatgcgaaaagcgaccaacagaattacctgggaaaggtttgacacctgccgaacaaaccttgtttgaagtgttacgcactaatcgatacggcgtcagccgactggaacaagagcgtctgtctcaggactacgttgaacagaggttagccgcctggcttcatgcccccgttaaattgtag

SEQ ID NO: 42075 - DNA, 1467 bp, Cyanothece sp. PCC 7822
atgtttatggactatgaccaaattaaaaatgaattgaaacattcttctagtcttcaactgttaagaagtcaaaatgctcctttaattgtaagttttcttcacaaacagtttaaggaaaatcagcgaactgccattaaaaactcagaattaaccagcaaattagaagattatttagagttcattcgagaaagtgaggcagaaggggcttatccgcaatcgcctcaacaataccttaatcagtggtgtgatgaccaatatttaagaaaaacttatgaaccagggagtgatgatcctgtctttaagctaactcctgcaattgaaaaagtgcttaagtggttgggagaactaatacaaccgcctgaatttgtggtaactgaatctcgattttaccatatcttcgacttgctcaaagaaattcgggattacagtaccacagatgtagaaacccggttagcgcaactcgaagaggaacgcgatcgcatacagcaagaaattgacaagattcgacaaactggcgtagtgactcgttacgatagcactaaaattaaagaaaaatttattctagctaataatgttgctagtgaattgttgggagattttgccgaagtaacagaaaggtttcgggcactaactcgcactatacaagaagagcaacttcaagaaaattcctataaaggttctgtagtgggccgtgttttaaatgctgatcaagaaataaaagaatcggatcaggggcgcagtttctacgggttttggaactttttaatgtctggggatcaacagcgagaactaaagtctttaattcaagaagtttataacttagacgagttacgttctttaatgcaaaaatacgggttactacgtcggattgaacgtcatttgatggatgcaggagaacagattattcaatccaaccatcgactagccgaaaaactgcgtcaaatgctcgatgagagcaatttaagcgaaaataggcgcgttgctgaattaattagagaaatagaaggtcttgccataagagtagcgaagcagcccccacttgatgaggattttttcgtattagaaggagaaccgaacgtcaatttagtaatggaacgtcgtttgcatgacctcgaagagtgtaaacccccgactttttcattaaattttgacaatttgccgccagtgaatctggatgaagaactaaccgagctttatcatcaattgtatgtagatgagacggaattagagcggcgtattgcacaagctttagagcatcgcccacaagtcactttagccgagttagtggaaatatatcctgtagagcaaggattatcagagattgtggcctatttagccattgccagtaaatctgagcaacatttactcaatgataatataaaagaatctattcgagttgccagcttagaacctgaaaaacagttgcggcttacgctcccacaagtaatttttagacgcttattttaa

SEQ ID NO: 42076 - DNA, 579 bp, Cyanothece sp. PCC 7822
atgttacctcaatcaacactaccctacgctcctgctatccttaaacttttacaaggagcaatgtatagtgacgatgttcactggaaccaattacaaacttatctaacagcgattcaaaaatattttgctcaaattggcttagaagttcgtaatcacgaaacagatggatttgcttatttagaacaacccgatcccgatccgcaggataaatctgaacctcttcctcgtttgacgagacgtaatcccttaacctttcgagtaacccttttgtgtgtattgctgcgggaagaatggcgaaagtttgacactaatagtaccacaggacaattggtactcaatatcgaaaaaattcgagagatgttaaaactttatctgccagatgggaataatgaagatagattgcggcttgaagttgagcgcttagtaggaaaagtccgagagttaggatttttgaggcggctttctcaggaagacgaaagctatcaagtcttacccattcttaaagccaaaatcgatgctgatcaactcgctctcttaaaacaaaagctagaagcttatgcaacttcctctcctgattga

SEQ ID NO: 42077 - DNA, 3375 bp, Cyanothece sp. PCC 7822
atgcaacttcctctcctgattgaacaaaatggttattccaacaatgacgatttagctggttttcgcttacaacggtttgaagtttataactggggaacttttgatcaacgtccctgggtagtgaatttaggcggcaaaacaggactactaacaggggcaaatggttctggaaagtcgactctagtagatggactactgactctactcgtacctaacaaaaagcgtaactataaccaagcttctagcatgacgggaaaaaaagagcgagatgaaaaaagctacgtgcaaggcgcttatggtcagattcgtaacgaagaattttatggttctaaatctaaattactccgaaaggaaggaaaacttaccgttgtactggcttattttttaaatgaactcactcaacaaaaagtcacccttgctcaagtgctatggatggaacagagcgcgctaaaaaagttttttgttattgctaatgataatttaagtattacttcccattttagcaaatttaagcatacttccgagttaaaaaaagctttaaaagcatccggagcagaaatttttgaggaatttattaaatacagtcaacgctttcggaaacttttgggtttacagtcagaaaaagcattagatttatttaatcaaacagtcagtattaaagaaatcgggggattgaatgattttatccgcaatcatatgttacaaaaaactgatattcaaactaaaattaataacttaatcgaattttatcaagatttaaccgtttcttaccaggcgatttgccaagaaaaaaaacaattagaaattctcgaacccctcaaagaagaggagaaaaaacttcacaaatccacagaagaaattgaatttttacaacgtcttaaaaagctcactccagcctatattgcaagactaaaattagctctacttactgaagaactagaaaaaatcgagcgacaactaaatcaatctcaagatcatcagaaagaatgtgatgaccgtcttaaagatttgcggcaaaacgaacaacgtttagtaattgctattgaaaatgacagcgttggacaacgtttaaatgaactcaaggaaaaaagcgagcaacgtcagaaagaagttaaccgaagaaaacaccaagcagaaaagtacgatcgctatgcaaaatcgttaaagttgcctacatacctagatagagatggattttacagggcaaaaaaacaagcagaagatctcgctcaaacaattcaattagctttggaggagattggaaataaattagacggccataaaatccaacaaaatgatttaaaccgcaaaatagagccgcttgaaaacgaaataaaatctttacgccaacgaaaaaatcaaattccctcagaaaatttacaaatccgtgagcgccttattgcccatctaaatttagatgaaaccgacttaccttttgtcggagaactcttgcaagtacgtttagaagctcaggaatgggagggagctattgaacgactattaagaggttttgggttgtgtatcctcgttccagagcaacactatcgcgctgttaatgcctatgtacaagccaatcatttaaagggacgtttagtctattatcgggttaaaccctcaacccctaacccaacagcacgggctttttctcttcaacaaattcctcataagttagacattaagaatgacaataatatattttttaactggttacgggaacaattagtacagcactttagctatgtttgctgtgatagtgaagaacagcttcagcacgaaactcgcgccattactcgtaatgggttaattaagcatggggaagaacaacatgaaaaaaatgatcgctctcgaattgatgatcgtcgtcactatatcttaggttggaataatgcgaataaaattaaagtgcttgaagcagaactaaaggaaattaacgaagagttaggtcaagttcaaaaacatatccaagacttaaaagatcagggcagtcaatacaaaaaccaacaatctttgttgcaagcttttaagacttttacagattttatagagattgattggcgctcagtacatcttgaattacaagacctggagcggcagctaaaagaattagaagctagttccgctcacttgaaccaattaaaagaacaacttaaagaggttaagcagcaaattcaagatgcaactgaacaacgggatcaattgatgcaagaaataggaagactaaaaactaagcagcaaaattttcaattctctcagtccctgtgtgaacttaaacttagtcagtttttaccacaagaaatagatgaattaattccctggtttactaaacaactgaaaaaaaaggaactgagcataaacacaattgctgaaattgaaaaggaaattatcgagttagtatcaagtacaatcgacagagagaaggaaaagcaaaatggctgtaaaaacttaatttatagggtgactgacaaatttcttaaggaattcccagaatttactctaaatttagggacttcggtcgattttttaccggcatatttggctctgcaagataaaattgagcgtgatgatttacctcgtcatgaggaaaattttaaaaaactcatgaatgaaaaagttatacaagagatttcttggtttaaaacttctttagaaaaacaggaggaagagattcaagataatatcgatcaactgaatcagtgcttacgagaaattaattatacagattcgacttatattgaattgtgttatgaaatgacccgtgatacagaaattctagaatttagaaacgacttaaaaatctgtctaggtaaaatagtagaatacggtgctgaggataatgaaaaaagatttaaaaatattcaagaacgtctcattaaacgatttaaagaggaggaaagatggaaaaataaagttatagatgtacgcaactggttaaacttttccgtcagtgagcgttatcgatcagatcattcagaaaaagaacatcataccgactcttcaggaaagtctggaggacaaaaagccaagtttgcttatacaattttagcatcctcaattgcctatcagtttggtcttaatcaagaagattcaagaagtaaatcatttcgatttgtagtcattgatgaagcgtttagtaagttagatgataattatgctcgttatgcaatggaattatttaaaaacttaaatttacaactgttagttattactcctaaagataaaattaatgtaattgaaccctatattattaatttacattttgtttgtaataattctgattatagttattctcagattcactcaatctctattgaagaatatcaaaaaaaacgcaatcaagtattaaacaaagctaatgatcaatccttcggaaattaa

SEQ ID NO: 42078 - DNA, 1158 bp, Cyanothece sp. PCC 7822
atgatcaatccttcggaaattaaaaaaaaggctgaacgtctttatcctgacttactcaaggcagtagttaaagctgaatgtttttttcctaaagactttcctataggaacattgcccaaagattttatcgctttacgaaatgaagttatcgtactgattgaacaatcaaaacaaactttaggttatgggtataatcttgagttaaaaactcgtaatacacacaaatacggtcatcaatcattaccagaacggattacgattgagacagaaattgattatttaaagttcattaataaagaaaaagaattgactcaatttaagagagatatagagttaattagactgaaagttcctgagctagaaaactggatttatgataatcctctaaaagttattcagcataccgaaaaatgggaagatttacttaaagtttgccaatactttcaaaaaaatcctagacccaatctttatatccgagaattaccaatccaagttcatactaaatttattgaagaaaatcaaacaattattcgctctcttctagaaaatatattacctcctgacgctctccaatcagtggaatcgccaaaagaacattcatttgaaaaaagattttatttaaaatatcgggagccgctaatacgattaaggattttagataacagtatcaaaaaaatctataaatttcccatttctgattttcaaacgccaatatctgaatttagggaactcaatttccaaccacatcgctttattattactgaaaatttgatgaattttttgacgcttcctcccttaataaatacttgtgctatatggggcggtggctatgctgtacaagctttaaaatctgtaagttggttagctgactgtccccttttttattggggtgatttagatactcatgggtttgaaatactttctcaatttagaggttattttcctcatacagtttcggtgatgatggacgaacaaacctttaaaagttttgaagaatttaccgtaagcggtgttacatcaaaaatagaaaatattccccatcttacagccgaagaatatcacctatatgtatatttaaaacaacaccaaaaacgattagaacaagaacgcatcagccagaattttgttaatgagtatttacaaaacctattcaaataa

SEQ ID NO: 42079 - DNA, 1542 bp, Xylella fastidiosa subsp. fastidiosa GB514; identical to SEQ ID NO: 41641

SEQ ID NO: 42080 - DNA, 714 bp, Xylella fastidiosa subsp. fastidiosa GB514; identical to SEQ ID NO: 41642

SEQ ID NO: 42081 - DNA, 3432 bp, Xylella fastidiosa subsp. fastidiosa GB514; identical to SEQ ID NO: 41643

SEQ ID NO: 42082 - DNA, 1206 bp, Xylella fastidiosa subsp. fastidiosa GB514; identical to SEQ ID NO: 41644

SEQ ID NO: 42083 - DNA, 1353 bp, Pseudomonas aeruginosa 39016
atggaggatgcgctgcaagcgctgtccgaaatgctggctgcttatgccagccaggagctttacgagatcgacccggatgcaacgcatctccaagcaggccgtgaacttcgtgaatggatcaagcggcgccttgtcgtagagcgagagggccatatctacgcaaccgacgcgttggagtccgccatccagttcgttgactcgctggatagtcggatcatgacctccacggcatctcgcctgtcggtggtccagcgcgagatcgaaaacctggaaacgggtctgaaccccagcccaactggccgtattgccagcctgcgccgccgaatccagcatttggagcacgagctagcgcaggtagaagctggccacgtcatcgtgctggatgaagcgcaggcgatagagggcatacgcgagatatataacctcgccaccagcctgcgcgcggactttcgacgagttgaagactcttggcgcgaggcggatcgcgcccttcgacactccatcatcagcgagcagtctcaccgtggagagatcgtcgatcggttattggatgggcaagatgccctactcaacacaccggaagggcgtgtctttgaaagcttccagcagcaactgaggcagtccgctgagctggaggccatgcgtgagcgcttgcgcaccatccttcgtcatccagcggttccaaaggctctgaatcgtccccagcaacgtgagctgcgttggttggcgttacgcctggttcgggagtcgcaggctgtgctccaagcgcgcgcccgaagcgagcgtgatgttcgcggcttcatgaagacggggttggccgccgagcatcatcgcgtcggacagttacttagcgacttcttcaatctagcgctcagcgtcgactggcaacgtcagtcagagcgccgtaagcctgttcgtttaccgccggttggcgtagccattaccggtgtcccggcaatagagcgtcttcgcttcaagaccctgggtgacgatgacacgggcgagctggatctgagtttaaagcctgcggggttggaacagattgatgacgacttctgggatgctttcgacgggctggatcgtgaaacgctgattcatgacaccctggctgtgctggtggagcaggggcgccctgtgagtctcggggagcttgcgtctttgcttccacctgatcacgacctggaaacctttgcgctctggttggcgatggcgcgtgaggcaggcatcgaggtgctgaaagaggagcgtcagcttgtggagctagttgaggaggatgagcaacgctggcgcttcaatctgccttatgtcggactcgaccacgaggcactcaagggcatcgattgggaattgtga

SEQ ID NO: 42084 - DNA, 675 bp, Pseudomonas aeruginosa 39016
ttggatgacagcatggatgatgaacagcctgtcatgagcgccgctgtacaggtcgatgaacgccggacgccgcaacgggtacgtgaggccgtacaggaaatgctcaagtacgggctgctggaagaaagccacaagcccaacctgtatcgctcagcactttccaatatcgaggcggtcgacagaatcctggagccgctcgacctggccatgggagtcgacgaggttcgggggctggtgtttgttatcgttcgccagggcgaggtggccgaggaggatgactggtcgcaccccctcgtgcgtcggcaaaggctgaatctggagcagtctctgctgatagccattctgcggcagcatttcatcgcatacgaacaggaaagcggtacgggcgccagtcaggcactggtagcggttgatgagctgattccccaactgcaggtttacctgggcgaactgggcagtgaggcgaaggagcgcaatcgtattatcacgctgctggatcagctcaagggtcatggtttggtgtcggctctggacgcccatgatcgcgtcatcatccgccccatcattacccacttggccaacccggagaacctgcaggctctggtggcatggctgcgcgagcaggtggagggcgcggctactccggttgctggtgctgaggaggatgaggcgtga

SEQ ID NO: 42085 - DNA, 2718 bp, Pseudomonas aeruginosa 39016
gtgggtgaaaacgccttcaccttgctcaaccgcgctgccggcctgaagcagctcaacagtattgatgagatctttcgagagttggtgctggatgatcgctctgccttcgagcgggctgccgaggtcgcaagcagcttcgatgatctaacggacattcaccgagagctggaaaccgctagaaagcagcagcgctcattgcaaccggtcgccgatggctgggagcgttacaaggccttgcagcaacagttacacgataaacagacgctcgaaggcattcttccggtctggttcgccgaacaggggtatcgcctgtggttggctgaaaccaacaggcttgagaaggcgcaaaaacaggccgaactgaatcaggagcaatgcaggggacagtttgatatccagaagggcgtggtcgatcagcatcgtcagcgctacctgcgagtaggcggtgcagagatagatctattgcgcgcgcgcatcgcggattgggttcgggagtttgataaacggcgcctgaaagccgagcagtaccagcgtttggccaaagggctaggactcgtggtggagttatcagccgctgcgctcgaggaaaatcagcagcagatcacggcacgcctggaagtactggccgagcaaattactgaggcacggcaaaaggcgttcgatgcaggcatcgtccagaaagaactcgatggccgcctgcagagcttgcagcatgagcgtgccgaggttgagcgacggcccggctcgaacctgcctgggcattttcatgcttttcgaggtgatctggcgcaggcgctttgcgtcgatgaatcggcccttcctttcgtcgccgaactggtgcaggtcaagcccgaggagctggcttggcggggggccatcgagcgggcaatcggtagccaccggctgcgtatcctggtgccgcagggctcgtccgaggctgcattgcgctgggtgaaccaacgacacaaccgcttgcatgtgcgcttgttggaggtcaaggagccgtcatcgcggccagtgttctttgacgatggttatacccgcaagctgactttcaaggagcatccgtaccgagaagctgtaaaggttctactggcggacaacgaccgacattgcgtggaaagcacagagcaattgcgtcataccccttacgccatgacggcccaggggctgatgtcgggcaaagagcgcttcttcgacaagcaggaccagaagcgcctcgatgaagactggctgaccggcttcgataaccgcgaccgtctggccttcctgactgaacaaattcgcgaggtcaatgaacagctcgcgcctgccaagctggccttggatgctgcccagggcgatgtccgcaagttggaggatcaagcttcgctgctgcagcgcgtcgaagaactgcagttcgaggagattgatctgccgggcgccgagcgtcagctggagtcgctgcgtgctcagctggacaccctgacacgccccgactctgacctcgcccttatcaagtctgagctggatgaagctgaggcattgctggactctctggatcgacagaggcaacaacttatcgagcagtgcggtcagttgaaaattcagttcgagcaggccgcatccgctacccgtaaggcttatcgcggcgccgaaaaggggctgagcgatacgcaacgtgagttggcgctagcgcacttcccgacgctgagcgctgctgacctcggcgatattgtcgagctggagcgcaagcatacgcatgagcttcaagggcagctcaaagcgctgggtgagaaactgggcgatcagaaatccgagcttgccaaacgtatgtccgacgccctgaaggttgacactggtgcgctgtcagaggtcgggcgagagctggtggacgtaccaaagtatctggagcgtctacgtgtgctgaccgaggaagccctgcccgagaaactcaagcgcttcctggaatacctcaatcgttcctcggatgacggcgtcacccagctacttagctatatcgaccatgaagtctcggtgatcgaggagcgtctggatgacctgaacagtacgatgcagcgtgttgactttcagcccgggcgctatctgcgcttggttgcgacaaaggtcatccatgcaagcctgcgcaccttgcaacaggctcagcgccaactgaactcggcgcgtttcatcgatgatgaaggcgagagccattacaaggcattacaggagctcgttggactgctcaaagatgcctgcgagcacaacaggaatcagggcgccaaagcgcttctggatccgcgcttccgcctggagttcgcggtctcagtgattgatcgagaaagcaagagtgtcatcgaaacccgaacaggttctcaggggggtagtggtggcgagaaagagatcatcgcctcctatgtgctgaccgcttccctcagctatgcgctctgtcccgacggcagcagccggccgttgttcggcaccatcgtgctcgacgaggcgttctcgcgcagctcccatgcggttgccggtcggatcatcgcagcgctgagggaattcggcctgcatgctgtcttcatcacgcccaacaaggaaatgcgcctgttgcgccaccatacgcgttcggccgtcgtcgttcatcggcgcggcgtggaatccagtctggtttccctgagctgggaagctttggatgagcatcatcaacagcgcatcaaggccatgcatgaagtcgcccactga

SEQ ID NO: 42086 - DNA, 342 bp, Pseudomonas aeruginosa 39016
ttgcagtggctagcgtccgcgcacctggccgggaaacagatcgcatactggggcgatatggatacctggggcttgctgatgctggcgcgagcgagactccatcaaccagcagtcgaagcactattgatggagcaagagctgtttgaacagtactcaccggtgagcgcagtcgtcgagccgaccaaagctctggattcggccccacctggtttgctggctgacgaagcggacttctatcggtatctgctggtgcaagaacgaggacgtcttgagcaggagtacctgccaaaggaacaagttgagcgcgctatcgagcagtgggctcgaaagatccctgtatag

SEQ ID NO: 42087 - DNA, 1533 bp, Bifidobacterium dentium JCVIHMP022; identical to SEQ ID NO: 42068

SEQ ID NO: 42088 - DNA, 708 bp, Bifidobacterium dentium JCVIHMP022; identical to SEQ ID NO: 42069

SEQ ID NO: 42089 - DNA, 3507 bp, Bifidobacterium dentium JCVIHMP022
atggcgggagacgatatgaagatcatcgccgatcgatggatgatggaaagccgacagatcgtcaactggggttcctatgacggctaccaggaattcaggccgtccatcgacgccgaatcgccggtcaccctcctggccggcgccagcgaatcaggcaaatccacgctcgtcgacgcgcagatttccctgctataccccaatggcacgccttataacaaggcgtccaacgcaggtcggtccgagcgcaacgactacacgtacctgcgcggcatgatcggcatcagtgacggtgataacggcgaaacgccgatcttcctgcgaggacgtgacgctaatggcacgccacaggccatatggggcgccatcgtcgacacatacgtgaaccgcaccaccggaagtacgctctcctgcggcaaattcctctacctgcccgccggagacggcaaagacgaggtgcgccgtcgctacattgcatggaatcgcaaaatagatccgcaaatcatggaccggtaccgtgatatgccattcacccccaacatgttcaagaaagcgtatccggattgcagcatattccccaatgccagcgcattccacgcatacatctggcaggagatgggcctcagcgccgaagcatgccgactcctgcacaaaatacaatccgctgacgccccgtcgcgactcgacgacatcttcaaacaaggcgtgctcgacgtgcccgaggcgctcagactcgcacaggacaccgtcgacgactacgatcggttcaacgccaacttccatagcatggaagacaaagccagacgcgtcgccaaactccaagacatccaaacccaatacgacgcatacgccaaacacctgacccaagtgcgcgaatacgaaaccgtgaaccccgacagccagcagggcctcgaaaccctgaccctatggatgcgttcgcgcatggccagcgaagtgcgagccggactgcccgccgccgaacgcaaggtgaagcagcaggaatgcgacctgcacgaggcacaggagcggatctccgatgtgaacaggcaacgcgaagccatcgtcgaacgcatcaaaggcattgacggcggaaccttgcaacggctgagcgatgacctggaacgcgcccgacgcgacatgcaagatgtgcgctcgcagcgtcaaagcatcgtcgagaaattcgagggtgtcgaaggtgcattgccatccgacgagacgtcctggaacgcgaaacgcgacgcattgacccgatccatggaaacgttcgacgaacgcatgggggatctggaatccaagcgggatcgtctgatcggcgagcgcaccgcagccagtcaggaatgtgcgcagttgcgccgggactatgatcgcaaacgcaggcagaggacccgcatcacccaggcgatggatgaggctcgtgcgctgatcgcgaaggcggtgggcctgagcccggacgaattgccgtatgcggcggagctgatggatgtgtgcgagagcgacgaacgttggcgcaccgccatgaacgtcacgtatgcgccgattgcgcagaccattcttgtcgacagccgccacgagcggggattcgcggcgaagatcagcgcgatcgatccgtcgctgatgatccggcgcacctggcagttcgtggatgtggacaagagctatgattgcgcccgcaaagacggttggatatcgtcgaaattgcagtatcgtgaggattcgccgtttgtcggatggctgaaggaacagaccgcttcggcccgtttggacgcattgtgcgtggagaccatcgacgatgccgcacacgaacgccgtcaggtgcaggctgatggtcagatcaagtccggcgtgcacggtttccatggcatcaaaggcatgaatccgatcatcggtttcgtcaatgaaggctatctgacggaattgaagaaacagcttgacgaagcgcatcatagattgtccgataccgaacgtcgctgcggcatggtgcgcaagagcatcgacctgatgcacgcggaaaagaatcttgcggatctggtcgcgaatatgacgtggaataaaatcgatgtggtcggtgcggaaacgcttgtcgagaatctgaaacggcgaatcgaacagattgaagacaatcctgaaatgacgcggcttaccgagcgacgcgaggaaatcgacaggctgcttgatgaagcgaatgcccgcttctaccacgccaaaagcgaaatgcaatcgacccaggcggcggtcgatgccgaacatgcgtggctggaagcatatgagagcatcgaatttgacgatgatgcgctatccggcgatgtatcgaacatgctggccgacgtatatgagggatgtttcggcggtgtggtccatgccgaggacagaccgaagctgatcgccggcgggaacgacgagatcggcgggcattcgttcgagacgcgcatcgggcacgccatggaacgcgccatgcgcgaacagaacgcggcattgggcaaacgtgcaggggagttgcgtaccgtcgtggaacagagtatggcctcctacttggagagatacgctcccgacgatgactccgcgacaggcagcgttgaggattacaggttctatcttgaggagctgcacagtctgcagatgctcgtcacgcgagaggcgaccgacgaagaatacgccaacagcctcgacaagctcaccaagaatttcctgcaactcaaccgtgcactcaacaccgatcaagaaaacgtcaaggaccagctcgaacgcatcaacggcatgctcgccgggcagaaattcggcccgcgcggcggcaggctgtccatcgacgtggaattccgccccatcgaacgtgcattcgtctcatccttgaaggccacgctgaacaagctcgacgaatggttcaggaacgacaaggacgatcctgatgccacacgcaaggcattcacctcctgcgccacgttcatcgaacgtgttcgtcgggaactggaacaggtacgcgacgtgaacggcatcaggagctacggcgcacgcaacctcgacccgcgcgcacgaagcacgttctacgccatcgtgcatcatgacgacggtcctgacgagcgcatcagctccaccggcggcaaatccggcggcgccctgcaggaactgacatcgttcatctacggtgcggcgctcatctacctactcggcggtgacgtgaccggcagccccacctatacgacgctgttcctcgacgaggccctcatcaaggccgacggccgctacacgcaacgtgcgctcaacgtactgcctcgtctcggcttccaagtcatcgtatccgcaccggaaagcaagaccgccgaaatcctcggcgtatccaccaaagcatacgtggcctacaaggatccgtcggtaggacgttcgttcctgcaggagcttacctccgaagacatcgcccgtcaggaagccgagctccacgatgcaatcgacgccatgccggcggccccgaacgatatagggcccacaacgaccacgattctcgaacaggtgttctaa

SEQ ID NO: 42090 - DNA, 1938 bp, Burkholderia pseudomallei 406e
atgcgaaggccgatttgctggcggcacgcttgtgtagccagcgagaagaccgcgggagatatgggggcaaggtcaagtcgcaagtcctccaccgtcgctccaaccccgggagtgctggccttctggatgaggtgcaaatattcgtctggcgcgcttcctgcgaatttcggcttgaacgcgtcagtgccggtaattggtgcgtgcggtgtcgctcgcgtgacgacgtcgccgaactcgctcataaacgcagacagcaatcgactggcttggacagcttggatgccgaagacttcgcgtacgcgcgcgttatcgagctggccttcccagcgcaacaaaatttccatctcgcgaagacgttgttcggcaggagttagcggtgtccgcatgaatgttatcttgtgtgataatttatcttgcaagataataccgcaaaactgcacagaagccctacccgagggaataacgttgaactcatcaagtctttcgccggcaccgagggccggtgcgtccaacacgcccgtgttcttcgacgccgagcggcagaggttttttcgtccgctcaatagctccaggcgtgaattagtagcggcatgcttgcgtgcactttatgaccgcctccatgggcccgcagccgactatgcgcaccaccttactcgagacgtccttcgcgaactactgctgccggttgttcggcaataccagactacgctggcggatgacggctccgacgatgaattcagcgccgtcgatgcgagcgaccctcaactgctggtcgccatggtcattcgggcgctcgtcgcagacggttggctagagcagttcgctgaccggactggcttggttgcagcttttcgtttttcgcgtcccggcaagcttttttcggaggcgctttgggcattggaccgcccaagccgaagccggcagcgcaacatgcgcgggtgccgcaatgcgctcgaggctgcgttgtccgaacgaggcgacgcacatgacttggtggatgcctacgaatacgccgagaaggttatcgaggacctcgcggacggcatcgattactttcaagaactggtccggcacttgatgcaagccgcgtctgctcatacgcaatggaacgaattcgttgactttctcgacagattccagcgggactactccaagcaacttacagcggataacgcgacgctgaaccgccaagccattcggcaaaagcttgagaaactccgggccgttccggaggcgaagttcaatcgaatggatgcgcagttgcgcgatatcgcgcactggatggcgaaggagtacaccggaagctcgctctatgattggctgctcggtcgtattgaagacatcgtagacgcggcgtgcgagtctaagcagccgggctttctcaaggccatggagacttatctgaagcgtgtgaacggcctcgctttgcagtcgatgatgctacgctcggggcagactcggcatgcctacttagcagccgttcagaaagtggccgagtctcccaagttggaacaggaccgcttgctgaagcttgttggccagttcctcgcaccagcggaggtgcgcgtcctagacccagctagcttcaagctgaagactgcaacgcagcgccgcaaagcagtaaccgtgtctattcgaccgcgcccgacaagggaagagcggctcgctgcggcgatggcgcgagcagaggccgaagtgttctcaataccgaacgaggatgtcgcgcaggggctgcgtgcggacctgcgactcttccaacatccaatccgcgtttccgcaatgcctacggcaagtgcccgcgacgtcattcgcgcaatgcaagcggtggaagccgcgcgaagcgccatcggcggggacctcatcgtcaagaagctgccgacccgtttggagaatgagttctacggggccaacgactacgaaatcgacctgaaaaaatga

SEQ ID NO: 42091 - DNA, 672 bp, Burkholderia pseudomallei 406e
atgagcctatccaatctaattgacgaacagctcgccatcgcgaatgtcaagcgcgagcggttccgggaaatcttggtgcgcctgatggcctacggggtcatcgtgcgcgacgaagacaaaaccgaacaacttctgtatgacgatgctcggcgcgttgagagtctgttggatgagtacctcgatttcgcgggcttccgccttcatcacgaccgcgacaaccggttctacaggctgtacgccgccggcgcggtcgtagacggcttgccgccggacgtttacgaacctgccccatctttacgcgcgcgcgtgtcccccgacttcgttgcgctggcgcttacgttgcgtttcctctatcagaacaagttgaatgccggcgacatccagcctcagggtgaggcgcttgttaatttcgaggaaatcgccgcgacgatgcaaacgcaattgaagcgagcgcttccatccagcatgggcgacaagatggctctgctggccgagcttaggcgtcataggctgctccgatatgccccagaattttctatctcggatgaggacgcactacttgcgattcgcccaaccatcctgggtgttgtctcaaacgatgcactgaccgctgcgctcgatgcagacggcgtgcttgaacaacagaccaccgttgaggagaaggacgcatga

SEQ ID NO: 42092 - DNA, 3633 bp, Burkholderia pseudomallei 406e
atgaagctcgaccgcatcgttctggtcaactgggggcagttgcggccgggcgactatgaccttggaaacatgactcttcttaccggcccgacgggcgccggtaagtccactatgctcgatggcctccagaccatcatgactgccgcgtaccagggtatcgtcgcatacaaccctggccaagaagaggtacagcaggggcaacgcagtgggaagtccaagcgcaccttggagtcatttgtcgtcggtgctgagtacagtcgtttctctcgacctcatggcgcgcacgggtatatggcggctgtgttccgccccgggcccgatgaggactcggccaagacctttacggcgctcgtcgccgcatcggcacaggtggatggcatcggggagcgcagggttccgaagctggagcgactcgaactggttatcgtagacgacgccgcgctgaccgttgacgattttctaaaggacgcggagcagagcgagtgggtggctgtcgaagaaatcgtcaagcgattgaaggctcggtattcgaaggtggtgacctatgacgggcataagcgagactacctttgcgcactctacgggcgcttccgggggcgcatctcgattacctgggatgaggcccagaacgctgcgaaggcttggtgccagtcaatagcttacaaaaaaattggctcggtccacgacctcgttcgcgatgacattctggagtatgacggcaagcagttgcaggagagcatcactcgcatcagcgacctgatgcgccaagtcacgaacctgaagcaagaagggcagcgactggaagcgactgttgggcggttgcgagggttgaagactgctatcgcgcaaacgacgtcggcgtttgaagagcaagtccagtatgacttgctgctggccaagatgctggtggcggcggacgacgaacgtatcgcccaagagcagaaacgcatcaacgatgactcggcactggtaacgcggtgcgagcaaaaggtaaaagccgaggagcgactgaaggcaggcgtggaccggagccgcatcgacattgcagcgaagctcagtggaatcgccgccaacgccgagaaagagcgcctggaccagcagctcgagctcgccaattccgcagctcggcacaaactggctgagctcaatactgggcttcaagaggccgcccaaatcgtcaatgcggctaccggtttgttgcggaagcccattccggagcagttccccaagctcaaggcgtcggttgacgcggtcggtcgagttacagcatcgactgacgttgctcgcttggacggtctgttgggcgctgtcctcgatgcctcaagtgatgcgcagcttaacgtcgagaagctgttccgattgacccctgcattcgctggtgtggaagagggactcgccgcgctgcactcatatctagtggggaccgaagatagtgtcttgatggctgttgcgtccgagacgtcggaattgacgcaacgtgtcgaagccactcgcaaggcgcgcaaggaattggctgaccgcaaggagctgttggcgagcggcgctagcgattacaaccgcgacactcgcatggcgcttcctcgcatccgagagtgtctgcccgaagctggtgtccaagttctctgcgacctcgtcgaacctgtgtcggatgaatggcaggaggccatcgaagggtacttggacaatgcccgcttcaatctcattgtgaagcctgagtgggaagcacgaactatcgatttgcttcactcatggggctcgcgctgtaaggtcatccagggtaaacgatgtcttcagcgtgccgatgccggtcgtgtgccatctgactctatcatccatgagctccgcactgaccatcccattgcacgtgcgtatctcatcgagcagtatggcgccgtcgtcaaggtcagggactccgagcaactgcgcgataccgcgcgtgggttgaccaaggacggcaaaggaagcggttctcgcactatgtttgttggtgagcggcgggaccttgttcttgggcgcaaagctcgcgagcaggcgctgcgggctaccatcgagaaactcgatgcggcagaccgaggaattcgagagttcgagcaactgcaggatacgctgtcgagcgttaaacggcttcttggcaacctgcgtgaacccgtattcgatgcgatgccgcttggccaagcagcgggcgaaatcgacagcactcggcgctcgcttgcgcagctggacctcaccgaggtggaacagttgcgggcggagcgagcgaagctggaactgctcatcgcagggcacgatgcggaaattaccgcggtaaacaaagagattaccctggcgagtcagcgtatcacggacgcccaaggcgccattgagcgcatcaatggaggccgagacgcgcgatttcgggagcgtgaagaccagattcgtcggctcgggcagatgtgcgaaacaaactcagagaaaacctacacggttattgccgaggaagtagagggcttgctcaaatcccggaggtttgacgtgcactccgttcaggtgcggctcaacacgctgcgcgcgcagccggacaaattgctgggcgatgtgcgggaaatgctcgcggagtacaacgcgaacgcgcgccaagaggagcgcttccagtcagcgctgcctcatcttcacgacgccaccatgttcgacccgtactatggcccccttgttgcgctcggccgcgcggtgggtgcactccacagcgagcttgagggcattggcctctacaacaatcgggccaaggtggaagaagcggagcgctctttccatgacgtgttcaccaagcagttttgcgtcgaaatcaaaagcaaggtggatgatggcgtccgactgctacggcaacttaatatggagttggaaaggcttaagttcggcacggaccgcttcagcatcgactggtcgaagtgggagccggagttccaggagtactacagcttcttctcggccgtcaccgaccttgcggactcagtcgaaacggtcgacctcttcggagagacggagctcacgccaaagcacgtagaggtacgcgaccgcctggtgaagctcctgctcgactcagaccaagagagagcggggcgggagctattgcgcattgccgactatcgaaactacaggcgctacgaaatttggaatgattcagacagtggggggcgcatcgcgctttcgacatggggcacggggtctggtgggcagcttgagacgccggcttacatagttcgcgcggccgtggtgacgaaccggctaaagttcttcgagaagggacccagcctgaagatgctcgttagtgacgagtcgttctcgacgatggatgaacctcgcgctcgggccgtgctgcagtacctacgcgaaagcctcgatattcaggtcatcagtgcgatgccgacacgaggcgctggtggcttacggccagagttcgaccgggagtacagctatagccgggttcctgttgacgctaacggcgaactcgacttcatcctcgaatacgacgagcgcatcttcaagaaggacaagatgcgagagctctgggaaaagcagcgggcggcggcccgtgcgcaggccgagctggcgtttggcgccgccgaggccgcacagcaggcggaggcgcttaaatga

SEQ ID NO: 42093 - DNA, 1359 bp, Marinomonas sp. MED121
atgcattcaaaatttttcagtgaatcagcagagtttattgacaccagcattccaataccacgaatcaaggcatttattgaagaagcacttcatgaagaaaactggaacactgaaggtgaaggtgaaggtggttgcatcaaatcccgtgcgatttatgtatataaccgattacttgaaacaggttggctaaatattcgcaaagacggcattaaacaggatatttatatgtcatcgaaagtttctatgttagtagacttcatagaaaacattcaactttattcatccggagaaattggtggaggagtgttatcaatccgtaacaatctagaatcaatcatctcaccaagaaaacgaacctctgcaaccgatatttctcaaatgctagaccaagtggttcaagacactcagtcattaagcaagacaatgaagaatttggctttgcacttgacagatatctctcaggactttcgtcgctttaccaaactggatgaaaaaatgactttgttctttgaagagtttattaagaattcctctttctccgattacaacttgattaaaggtcagcatcatccatttcgttttaaaagtgagatattggacatgctgtactcgattgagtatgaagtagatacaaccgagcaagtagtaaattccatccaagaacacaatagattaaaaacagctcaagaccttccctatgaaaaggctctagaaagcttaaaaaacaaggttcgtttgattcgtaacatctttgagaataccgaatatttaatcgagaaaatcgatgccagtcatgctcgactagggcgacaggtgaatgagtccattaaatatcactcgcgaaccccatcaagtgccatcaatgattttgagtccttattaaaaactattaaagagaccggagtaaaaggcacaatcagtaacccattacctgtttatccatttttttcactggaacttgtggcaagagtcccgaaacaacgcaaacagattacccagcgcaaaaacacaataaagacactaatccctgaagaagtaataagacagaaggaagaaaaacgtcttgcacttgaaaggcgtaccattaatcaagagaagcttacaaaatggctagatgcgttattcaaccagcatggagagctcggccaaattaactcaatcaacattccggtctccaccattgaagattttgtggcatttaccgtctgtcggcgactgggcatagaagatgaaaaacttcaccgtaattattcagacacgctcacacaatacaattttatcctggcaggtgatgatcttattgagcatgagcacaccttctgccagccatttaatatcgtaaaaatgtttgggagttaa

SEQ ID NO: 42094 - DNA, 660 bp, Marinomonas sp. MED121
atgttcaatgaggtaaggaatctaattaataatacagcggttgaagagtcacaaattatcgagacgttcaactacctacaaaatcaccagtttgtcttcagaaaacgttcaaaagaccgtaagcactatgcattcatcagcgagcatttcgacctctttagaagtggttttgaactgtttggaaaatttcttatccagaataatgattatggttatattggaatcaacagtacttcgtcggatgactttaatcgtctaacgatgattgacacagctattctggtaactttaagggttatataccatcaagagaaagaatcccgttctaatgaagatggctcaatcagtatctcggggagtcacttagtgacgcagtataagcaatatactgaacgtaatgacttggttgatagtaagtcacgctttatggaatatttaaagctgtttaaacagaagcgaatcctttcgcttagcagtgaggttgatgaagaaaccctgcttccgataattaccattttcccgacaatcgaagtcataatgactccggaggttgcactaagacttaatcaggaaatcgctaatagagcaaactctgcttcttcagatgatgataccagtcagattaaaatatcttcctataccatggaggaagaagtatga

SEQ ID NO: 42095 - DNA, 3384 bp, Marinomonas sp. MED121
atgaaattaaaaagtgttattcttgttaattggtacttgttcgacccaatcacagttcccattcacggcaatgtcgccttaatcggtgagaacggatcgggtaaatccaccattattgatgcaatccagactgtcctgtttggtgggaaccagaaatctatccacctaaatgcaagtgcctctgttgccaaaaccaatcgaagcatccggacttactgcctaggttattacaaaccgggcaacaaagatgatgaatcctcctctacttatagaaagcgtgatgagagtattacctatctgggtttagtatttgagcacccaaataatggcagtcatgtttcactttttgtggggattgaggcttatgaagatgatcctgcgccaaactttaaaattagagggatatatcaaggtaatcgtgccttagaggccaaggactttattactatacatgatgatggatcttttgaatctctaacagcgataaatttaaaaaaatctctatcgctacaagggattactccctactatgcagacaagtcaaaagactttatggaggcaatggttaagctcattggtccaactgcacaccatgactggatagatcccgagatcttgcgtggctcactttccaaatctatctcattgaaaaaagagatcaccgaagtatcgcagtttgtcgagagcttcgttctggaaccccgcgatatcaaagttgatgatttaattcgaaccaagaatcactatcaaaaccttactactaaaatcaatgaattaagtcaacaaaaggagatattggatgaactgaatgccactttgaaccgtgctattacacaacgaaaaaaaatgcactcactttcgtggattgctttggagaaacagctcgaaggcattcaagaagatcaatatgttcgaaaacaaggtttagcacaatatattcagaaacgatgggacaaccgtaaagccgaacgtcaactgaaaaagactattgcaacgttacgtaataagcagagcgaactgtcaatccagattagtaatgatgatgagcagcgacgcagagacaatcttactaaagaaatcgaaaaaattgtggataaaattaattcaattcaaagggacatgcttagtgacattgcacattaccgacagttctgtaagcaagatgtttcggttttgcatgaagagtcaataaatcttttgacgtcaaaaatgcgtcctatgcttgaacagacagctaacatgtcttttgattttgaatcgttcgacgatctttctgaagccttgattggacagattgatgcgattgaggatttgattgatctcaaacaaaagcctttgatagcacgggaagtccaaattgaagaacaggttacaacgctaactgaaaacattaatcgcgtttcctccggtaagcgtcttttaacccctgagacggaattcttgattcaatacttagtagaacatggtattcaggcaacccctgtatgtaatgttgtagaaatctcagatgccacttggcaacctgcaatcgaggcatttttggcgaataacgtggaagccttgattgtaccggaagaccaagaagttgaagcgattcgcttgtatcgaagattgaagaacacccaccagatttataagcgcgtcattgttaaagcctccctttgcgtgaattggtacgattcaatcgctttggctccaaactctgcagccactcttttagagtcaaacaaccaatatgctttgggctttttgtacaaattgctaggcagacttgagttggtagattcagactcagaacttagacgctcgagattcgccttatctaaagatggaatggttacaaattcagtcggaatttctcgtcttaaattgatctctcatctaaaaatgatgaaagatcagagtcataaccttgagacgtggcgcaataagcgtcgtgatttatcgactgaaaaagacgaccagattacgccaactaggtcaaaactcaaagacgtttctgattcactcgcgcatttaaaaatggtccagagagatactgagcgtcaatcattccaagcacgaaacttagcgatcacacaacaagaaaagctgaaagaaaagaatgaagaaatcctgaaagggattgatttaactcatattgacagcctgattcaggagcgcgataaaattgaaaagaagcttctgcctctgcgaacaaaagagctagaaaagcttctggatgaaaaagggggcatgagagcccagattaaagatacaaaaacgtaccttttggctcttaataaaaaagttgaagtaaaatatgaagaacagggcaaaattgaagcctctgtctattttgatgttcaatataatgacgaacttcagatcaagtctgaggatgaagatgcagatatagtcaagggcaagcatgaaagtctcagtaagcagttttacaatgcattgaaccgaaatgagttcacaatgaaagatattgctgaaacgaatgaaagttttaaccctgaggcgtacttcccactaaataatgagaccttggagcctgtgactcaatacgttcatgagtgcatcaccaagattgtcgagatgaatatcgtcaaatataaagaagcagctgaaagagccagtaaagaactgaatgaatcctttagaaccgatgtgactaaccgattaagggaagtctttaaaatgcagaatcgtcagttcagagatttaaataaggcactctcacaaagactttttcattcagaacgttataagttcataaaaaaaccaaaatcagaatttagggacctgattaattatattgagaagactgacttgaccacaaatactgatgatttgtttgattccatgccaccggaagtagaagcgcaaattgaattacttatttccagtgataaggacgatacattgaatattcgggattacagaaaatattttgtgtatgacgttgaagtaacatcggatgtgactcaagagcgttattacgtcagcgaccaaatgggaacaggttctggtggtgaaaagcagtcgcccttctatgttgccattgcctcatcattagcgaccgcatggggaacattgagcaatccaggtagaagtgctggacttgctttattggatgaagcatttgacaagttggatgaagaaaacctcaagaacgcgatggattttatgggcgatactgggttacaggttattgtggcaaccccagcacagcaagaatacgtattcaaaccagcagtcaacagtgtgatctatgtgtccaagcacatcttgtctaaagataaggccaccgccagtctagatattgagattttaacggaaagaggttgggaaatcttcaatccagtacaagcaataccaagcgaggttcttgtatga

SEQ ID NO: 42096 - DNA, 1209 bp, Marinomonas sp. MED121
atgaatgaccctgcaaaaagcgaacagattttaatcgaaatcttgactaaactgttactcaagcaagagcaattactgggatctggttcaaataagcaggcagacataggtacgcgtgaatcagtgttcaagccttatgctaaaagtcagccactaggcattgtgaagtacataaacattctgatccaaaagtatgaaaaagaaggtattctaaaagcctcttggcatactgaaaatatatctttgaagcgtatctatttgcaagattacgaaaggctttgtgagttaattaagcacacccctatactgaaaaaactgagtatcgccttacaatatttggactacaaggtgctagatattccgctttattccatgttgagagatgctattagggcgaattggttggaacataaatcttttcataaatgcacggttgatcaatatgagactctagctaagggttttcagggcgcacatatagcattgtcgctgtatcagaaaaaagaggccatcgactaccgtcatttctccattaaggcgtttaaagattccaagaagctcagttcttataaagcccttattgctaaccttctcaaatcacaatattcagaactcgaaggttttggtattgatgaagtctttcgattctttggaattactcccatagagcaacctatccttctttcaggaagtcttaactttacgcaacatggaagtattctcgatgccagttttcctccggcagtaggattgttcccaactgaagagctgctagtatcaactcaaatagctataactagtgttataaccatagaaaatcaggcttcctttatgcgctacgttaaagaggaaaaacaaccaacagaaatagtactttatacttctggcattccgacccctaaatttattgaacttttccaaaaggtttctaatacgttagaatctgaaactaacttccttcactggggagatatcgatcttggtggctttaggatctggaacatactaaataaatcgatagaaagagaggttaaaccgcaccggatgtcaccagatgattatccaagctctcagcacttaaaagatttaaacgagtctgaaaaaacacagcttgaaacactttccaatcctagcatagcgaaattaattcaaagaataacttctgtcggaaaaaaatatgagcaagagatgtggaaaggaaaacagtaa

SEQ ID NO: 42097 - DNA, 1386 bp, Marinomonas sp. MED121
atgctattcaagcatctacccgatgagatttttcaagcccttagtggctcaaataagcagctagttgaggcggtgctgtttgacctttctgatgtgttttatgattatgctgaagaccctatcaaagacaaatcgaccattatagaagcgattgaagatagtcttcataaagtggatatcttgtcttggcaagaggatcaaaaagaatcatttgaatcgccgaaaactatccatgattatgctcttcgtatttaccatagactggtgaatacaggctggcttgtggaagaacaagagttatatagagtgagtgttttgatgacaccgcaaatttccatgttgttaaagtcgttagtggaaattagtcgtcatggtaagcgtaactatggtgccacagtactcagtatattaagtaatttggaatcagttgcgctggcaccactagagcgtggcgtgactttgaaccaagccgcggcagcagcacgagacttttctgctcatttgaatcagattttgctaggtattcgatctcttcaaagggacttgtttgccagccgagatccaaaagcaattgtttctggcttttttgagctctttgtagaagggattttaattgcggattataaaacccttaaaaccagcaacaatccctttcgttttagacgacagattttagaactggtccaaaactttctcgcgaatgatgatgctttatacgctatttcacaatgttatagtgagcaacaactgatcccaattgaaaaagcgcaagccttggtagaacaagactgtcgagccatactgcaaacctttaacaatattgaacaaaggctagagcgtattgacgaataccgttaccgtctggagaagcgtgctgccgacacagcgcgttatatggatagctctaggcctggtatggcaagcaaaattgcgaatgttattaccaatgttgcacgttttgacaatttaccagtgcttaaacaagttgtcggggtcaaagtcttagggatggaatcagctgcgacgccgagtcgacgtcgtgagccgcctgcccctagagtggtaacgccggccagcgtttccgagcaagcgattcaaattcgagatgcacaaagacgttttcatgaggcaaggcaggtaactgtggcgaaattgcaaagctacttacagcggcaaatgaacaatgagtctgagaagcatattaaaagttttagtattgattcggtagaagattttgtgtgttttgaccatttgcgttatgtcggctctttaggtgtgaatgcgaagatcatagaaaaagactttgaagtgaaatttagtgaccgctatctcgatgttcatcagtttgtagaatgtcgtgaatttgttgtggttcgcaggagatag

SEQ ID NO: 42098 - DNA, 639 bp, Marinomonas sp. MED121
atgttaaaagaattaaaaagagttgttgaagaatctgggaaggatgtacaggagtttcagcaagctgcgaactatttattgtcacatcaatttgtcagtgcgtataagcatggacagcgtaagtactttcttctgatagaaacctatcagcattatttttctgttgtgtttgatgccttaggcatgaagctttatgtgaatgagaacgagagattacttggacttttgcctgtcgaaagagaggcgtttgtgaggctaaaaacagatgaaaccttatttctgttagtgttaaggcagatatacgaagagaaaattgaaaactttgaagtggataatggttttgttgcttctaatactcatgctgttttagagcgctttgtccagttagtgaagcgtgaaattccgactgaaacacgttttaaagacatattaacccttttaagtcgtcatggtgtgctgatcaaaggaaaggcatacgatgaggacagcaagaatcttgctatccatattacgccagttgtgcgtcttgttgtgacagaagcctatttaaggcaactagaatcatttaatggttctgatgctgaacaagatgaagatcaagacgacgcgattcaactagatactgccagcgaagagtag

SEQ ID NO: 42099 - DNA, 3414 bp, Marinomonas sp. MED121
atgaaaaaacttagcagaattgtattggttaattggtatctacttggtgcagaagagatagaaattcgtggaaataccgcgattattgggccaacaggctcaggtaaatcctccttacttgatgcaatacaaaccgtcttaacaggggcaagtaaacgccacttaaactacaacgccagtgccaatgatgggaaggcgagtggccgtagtattcgttcttacattttgggtatgattgattcgggccagcagaatgcaaaagtctttgggacagggcctaggcaagatgccgtcagttacttagggctggtatttactgatacaaatacgggtaaagaatctaccataggtttgagtctttctgcgtctttagcctcacctgaagaagatgtattgggtcgttttgtgctatccaattatggggtggtaaaaggtgactttattgaggagttagaaggacgaagctttaaagcgaaaccttggcttgatgtgcgtgaagccatgaagaaggtgtgtttagatccttttatcaaatctggtagtgcatcagcaacacaatatattaatcgttatttggaagagttaagcccaagtgctgatcaactgattacgctggatggctttcttaaaaactttaaaaatgcgttaaagtttgtccccatcgcttcaccaacacgatttgttcaagattttgtattagctgagcaaccgttacaggtcagtgcttatcaaaaatctttaaatgaatatcgacagcttgagaacaaaacccaagaagttgctaagcgcattgatgaccttaatttaattgcactcgattgtgataagaaacgccaacaagaaaaagcgaacatcaattatcagtgggtagccactgaagcacgttttgatgaacttggtagtaagcaagatgagatccaagataaatatgaaactcatcaagagcgtgatgatgagattaacttagagctggatactcataatgaattagccaagcagttacagggtcagctagttaggcttgagcaacaatatgagcattctgatgtgggtttaaaactccagcaattagagcaaagccgcaaactgttagatctacaaggacaacaagataaaaaaagcttacttcagtgtaaacagatgctgattattctagcgtctctttatgactacgaggatcttttgtctaatgagttactggccttgtcagcaagagcgggtgacttgcataaaaaaatcagtgaagaagggcagttagacacagaatctcatcattttgataaagtacttgctgatttgtctaatttactggatagagagaaaacagaactattcaggcaacgttctgagcttaatcgtacgattttgaatctcaaggacgattgcaagcaactcgaatccgatgtttcttcgttaaagggcggaaccagtcctttatcaggtaataccaaaaagcttatttctttgttgaagcaaacaggtattgaggcaacgccgttaagtcatttagctgaagttactgatcacaaatggcaagatgcgattgaagggtatttggggcaacaaagagaagctttgattgttaatccagaagatgcggaagaggcgattcgagtctttcgagctcaccgtaagcagttaatgggttgtcgtgttattgatacaacacaaactcgcctttggttgaatagaggcgacagaagttcattgttgcaatatattcgttgtaataatgatcatgctcaagcttatctaaatcgtcgtcttggcgggataaagccagtcgataccgagcgtcaattgctgcgcgaagacagtgcaatgacttatgatggtatgttgaaactgtcaggtaccatctctacgattcgttttacacctcacatgatggtgggtattaataccgatggaatgcgccaatcacgagaaactcaactgcaaacattaagcgctgaattgatggacctgttacaaacagaccagcgacttgagaaagcagacaccctattaagtcgtgtcgctgctaatcatcaaattgatgtggataaactaacagcccatagtaatgcgctaaataaacaatcccatgatattgccgaaattgatgctgaaatccatttgttacaacaaaaagatgatactgagctacaagataaaattgaaagcttgaaggcgcgaattgctcaggtagaacttgagcagaagaagcttgatcgtgaaaggcagcaaattgcagaacagtacggtagtttgaatactcaaaaggcgcaattgagtgctgctttatctaatctagatgaagatagaacacgtctaaaaaatcatgcgttctatcaggctgaatttgccagtgagcgctacgaattacttgaatccagtatggttaatggtgcggccatttataaagaggccatgagccgagctgagaaagcgcaagaaaaagcgcgaaactttgatcaaaaagttcgtaaagaagtcgccgatcattatgctaaataccataatgctgatatcgattctgatattcaacttgattaccttgagtctcgctttgaagagtttgaaaactatatccaccatcaagtaaaagtgctttctgaaaccgaattagcgcgttatgcaaaacgtgcagaattggcccgtaaagaagcggaagaaacctttagaagtgattatgtctccaaacttaaggattcattggatcaggttgcgcatatcattcgtgaacttaaccatagtttgaagcgacgtccattcaatgctgaagtctatcagttccgttactacgcaaatggtgacatgaaggatattcttgatttggttgagcgttttagtagccaagatcaggcaaatgtgggtggtttatttgatcctgccagtgcagagaattctgagcacgcaaaagccattgaatccattcatgatctaatcagtaatgaggataagcaacaggacttggctgattatcgtaagttctataactttgaagttgatatattagatcaagaaggtaataagaaaacaaccttaagccagcgaatccaaaccgggtcaggtggtgagcaccaaatacctttctacttagccattgctgcagcgctgtctacaacataccgtttacatgaaaccactgaaggtgaaatcgtaggtggtttttccttagccatgtttgatgaagcctttaacaaaattgatatggcaaaaacatcaacctgtatgggctttatgaaagatatcggtttacaggttattgccgcagcgccagatgataaacgcgctgtgatggcggcaaacatggataccattatcagtgtgtggcgagagggcggcgctgtttctttagatgtttcgtacccaaagtctaaggggcgccaattattgacaggacaaacagaaaacttagccttaagttaa

SEQ ID NO: 42100 - DNA, 1485 bp, Blastopirellula marina DSM 3645
atgatccggctcggaaagttgctggtctacttcgagacttctccggccgttagcctcttgcaatcgagaaacgctccgtttgtcattgggtttcttgatcaacagttcaagcaatcgggacaaatcgttattccgcattcggatttgatctctgcgctagttctatttctcgatgaactcaaggagacgcacccggacaggatgaccgcgaaaccagacgcttatcttgcggattggtgcgatccagagaagcgatggttgcaacgatttttagaagccgatcgagaagagcctgtctatcaactaacgacccacaccgaagaagttcttcttttcgtcgatcgagcgatcaatctggatctgggcttcgtcggaacggaatcccgattgaagctagtaattgaaactctatccgatctagtcgtcggatcttctgatgatcccgagacgcggctgattcatcttcgcaaagaacgagatcgcatcgttcgggagattgagcagatcgagcaggacgggcagatttctaagtatcagccggcacaaatacgcgagcggtttgcgacggccgtgtcgcttcttaggcagcttcagggcgattttcgtgccgttgaagactcgtttcgagagattacctcacaggtccaaaagagagaacaagaggggctcgaaaggcgcggagcgattctagaattcgcactggactcagaagatctgctgaaacaggaagatcagggggtcagcttttatgaattcgtcaagctgattctttctccaagccaaacagaacgcttggaaaaggtgattcaagaagtacgttgcatccccgaattgtattcgctgcacgaagggctggagacggttcgcaatatgatcaccctgctacaaaatgaagcggaaaaggtgatgcggaccaatcagcgactttcggcgacgttgcgtcgtttgctagatgctcgggcatttgcggacaggcgacggatcgcccaattactgcaggagattcaaagccttgcgattacctatgagggaaattcgcgtgaccaggctcctggcgtctcgttcgactttgcgctggatatagattctccgtttcgcagatcgttttgggtagagccgccgcagttcgagacgatcgatctgaccaatttcctgcctagttcggaagagcggcgagaagttttccatgaatttgcgtcgcttcaacatctagactggcgccgaatgcgggattgtatacgccacttactagcgactgaacattccgccacgctggggcagcttctcgcggtgcatccgatttccgctggcgtggtggaagtaattgggtacctacagctagcgaatgaggatggtcatttgatcgatccgacggaagatgaagttatccatgttgctgcagccagtccattggaccgcagttaccaagtgactgtacctcgcatcacgtttctgccctcaaggagtcgacgtcgtgcgaagtga

SEQ ID NO: 42101 - DNA, 621 bp, Blastopirellula marina DSM 3645
gtgcgaagtgactatccagaatatcgcgaatggagtcttcctctcgtgcggctcttgcagggagtcattgagcaagaggatgggaaggcgtgggatgtattgatgtcaaacatttcccaggttgagcagttcgtcgctcgacttgggcttcaacttgtcaccgatgaaacggaaggtttggcctatctgcggcagttttcggaagaagagacgcccgctggctacgacgcgttgcccaagctgtttcgcgcgtcacgactcagctttggtcagaccgtgcttgccgtcgtattgcgcgacttattgcgacgcttcgacgaggaagagactagagacgctcgttgtgtagtcgacgaggcgacgcttctcgatacttggaaggccttttttcctaatcagtttgacgaagtcaagctgcaaaaagatcttcaggcgacgctcaggaaattggaagagctgtctttcgttcggcgttttggaaaagactccgcaagttgggaggttcggagaatcctcaaagctcgccttacggcggatagtctggaacacttgcgtgatcaattggcgaacgccgtccaaaggaagtcagatgcggaagtttccaccggcgactctcagtga

SEQ ID NO: 42102 - DNA, 3387 bp, Blastopirellula marina DSM 3645
atgattcagtccaaccttccctttggctcatctgctacgactggatttcgcctccagaaaattgaggtactgaattgggggacctttgatgggcaaatctatcgtgccagtccaggcggagactctacgctgctaatcggaaagaatggctccggcaagtcaacgttagttgatgcgttgttgacccttttggtgcggccgggcgtccggaattttaacgtcgcggctggcgccaaaaaacgggaacgagatgagaagtcgtatttgctcggcgcctatgaccgttcaagcgacgacgatagccaaagtatccgcgtcaaacacttacgcccgaaaggagactcttactcggtcctccttgccttctttcataatgccgatatcgaaaagtcattcaccgttgcacaggttctctacttagcatccgatcaaagcgtggagaaggtctattgctttaccgacgacgaacgttcgattcaaacagattttggggagcttcaagcggcggaatcgatcctcaagattctcaagcaacgaggcgttcgggcaacgcgaacctttcaagaatacgaaggctggtttaataaggcgacccatgtaaagagcaaggcgatggaagtctttaatcagaccgtcgccgtgaaagacattcaaaagctaaacgacttcatacgaagtcatatgttggaggcacatgactggagcgataaagttgaacgactattggggcactttatgcagctaaatgaagcccatgactgtctagttcgagcgaggcagcagcgtgatcttttggagcccgttgcccgattcggcgaagaatatcgaatcattgagaattctattcggcgaattgaaaatctccagaatgcggctcccgcatatgaagctcaaagggcaatcgacctttttacgccattgatggagaaggaagagcgcgagttaaaagaagtgcgttctcgcctcgtatcgattgccgatgaaacggcgcgtcttcgatccaaccatcgctggttactaaatcagatcgacaatgttggtggagatcgtttgaagctaattcccgcacttattggtttggaagaggtggagagtcggaataagcattccgcgtttgtcagttttcaggactcattggcaacgatcgggattgagtccgagatgtcgaacgctgaggcgttcgtcaaagctatatccgagtttccggaacgcaaatcctcgcttgaatcggaatcggagcaagtcgcacgcatacgaagtgatttggctcaccgacaaataactgctcgcagtctattagttgatctccgtgccgaactcactggtttggaacgccgcagagacaatatgcctgagtggtgcgtgcaaatgcggaaatctatcagtgatgcgttgggcatcgcaattggcgaaataccctttgccgcggaattgatgcaagttcgagcggacgagcgggattgggagtcgtcgatagagaaggtattgcacggacttgcattgagccttctcgtgccagaccgattttatcccctcatcgcgtcgcatatggaacgaactcgtttgattgcccaagggcatggtcagcggctggtataccaaagagtcaccgatcgaaggcatggacggacagggggaatgaactccccgcaatcgttagtcgagaaacttgacctcagagatcgtcatccgcttttgccttggctgaagatcgaattgagcgagcattttgacttcaggtgctgcgagtcgattgacgaattcaggagctttgaaggacaggcaatgacgcaaaatcgccatgtcaagtatggcaagcggcgtcatgagaaagacgatcgggatcgcgtagtcgatccacggaattttgttttgggttgggataaccgagataagaaacgtcgattagcggaagagatccaacggctttcaacagcggattccgtattaactggcgaaattgaccaagcggatagacagtaccgacggattcaacggcaacttacggcaatcgaagaggctcaacgaatcacaaattttgatcagatcgacttccccaggcatgacgtagaaatcgcacgactgaaagaggagcagcaggcaatcgagagtcaatccaacgaacttcagacgcttaaacgacatcttcaggaaacggaagctttgattacagacctcgagcttgaaaaggacgagttgatcggagacgaacgggagcggaaaaactcaattgatagtgcgcaaaaagctatcgccaacgcggaaagatgtctcgacagatggcgtggtgatggcagccttgcgcaattccttccgttgtacgaagagattgatgaggtgttacgcgagccgcccgtgacggctttttcgcttttcgagaggctaaaggcgcagattgcgaattggcatcaagtgatcgaacagcaacgaaaaaacttgaccgaatctcaaaataggcttacgacggctatgtcgaagtttttgggcgtttgtccagaaaaaacggacgatctcagcgcctcaagcgtctatctggatgcctttcttgatcttcgtcagcagattttagaggacgacctaccacgtcacgaacagcggttcaaagaacggctcaatcagaaggtcattgaagagattggactgttccggaattctttagagcaagagcgacgcgggattgaaggaaagattgaacttctgaacgtttcgctcaagaaactggaatatcgttcaggcacgcacatagagcttcagccgcgtccgatgcgagactctgaaatttccgattttcagtcgcaattgcgagaatgtattgaaggtagctttgaggatacggcggaagcgaatgaagcgaggttcttgcggatcaaaaagctgattgtccggcttcgtgatgaagagagtaaacgatggcgagacaaggtgacggatgtgcggcgttggtttgattttgtcgctgcggtcatcgatcaagacagcggaaagaccgtgtccgtctaccaagatagtagcgggcaatccggaggagaaaaggcgaagcttgcattcacgattttggtggcggcgatcgcctatcaatacgatcttgaaccggaccttcctgtaagcgaccgtttccatttcgttgtggttgacgagatgttctcaaaagtagatgaccaacatgcggaatacgcattgaatctgtttcgtcaattcggcttgcaattgttaattgtggcgccgttggacgcaaaggcgcgggtaacgcaaccttacgtcgggcggtatctgcatgtcgtcaaaaaggagaatcgctcagcaatctatgaaatgacagccacggagttcgacgaggtggcggaggcctctcaatcctattcgaaagacggggcggccatgtcatga

SEQ ID NO: 42103 - DNA, 1188 bp, Blastopirellula marina DSM 3645
atgattcgcccggaggaaatcaagcgaaaggcaattcgtctttatccacagtggcaaaaggcttggctcaatcaagagccattttttccccggacaattccttgtgagaaacagttggacgaaaacttggcggttgctcgagagtcgatccttgccctccgcaatggatccaaggaaaaggtaggatgtggttattccgttgactggaaagaaaagaattcgcgtcggcacggcaagaattggtttcctgagagagttttcatagagtcagaagaggacctcctgcgactcgtcgaaaagcaacgagagttccgcctgttcaaatcttcggtagacgcgattcgcgatcgttatccggaactagcgacatggattggcacgcatcgcaaggatcttgtcgatgtggccgaatcgctggatgggttgctagaagtattggactattttgtcgggtatcctcgccccaaccgttttgcacgagagcttcctctgtccgtcgatacgaagtttatcgaacaaaattcccgaattctgcgatgttggttggatctggtattacccccggaggcgattcgtgcggatgaagagcatttttgccgccgctttgggctacgttacgccgaacccttagttcatgttcgctttctggatgaagaacttcagcgtgaaacagcatctctctggccagagcttgccgttccattgcacgcgttggccgaaacgccattgcctgggaatcgagtgctgatcgtggaaaataaggtcaatctaatgacgctacctttcatccaagaaggtgttgcgatgggagggcttggaaattcggttacggatatgcgttacttgacttggctcgccaaaaaagaagtgtggtactggggggatattgatttagagggattcgagattctctctcggcttcgcacttttttgcctcacattcgtagcctcatgatgaacgaagagatggtaagaacgtggggaaaatcactggctggagtagggaattcgggccgcagagaaccgtctttgaatctgacgcctgaggaaatgtcagcgtatcaaatttgctacgaaaccaatttgcgaatcgagcaggaacgcgtgccgcaaaacttcgtgattgaggaactggatcgcgtcgtatttgagaacttgcaaagcaaaaagcccttttcgacgcactga

SEQ ID NO: 42104 - DNA, 1476 bp, Reinekea blandensis MED297
atgttttttgaccaaaacagggttcagttttttcgcccgctgacgagtaagtaccgcgagcaggtggttgaatgtctgcgcgagctgtatcgccggctttataccagctccagtgccgattacggtcacgctctgacgcgggatgatgtgatcgaaaccttcagtgccgcactggttcgcgcaccggttttgcagacggatgatgacgataccgaaggtcggtttcgcacctcacgtgagcaggcgggttgggtacttaatcagctgcttgagtttgggtggttggaaaaacaggtggatgaagccaccttgcagagcagttttaacttcagccgttttggtcgcacttttaccgaaccttttgtggccaccgatgcctcacaggttcgcactcggcatcgcaacacccgcaacgtgcgtaacgccatgagttcctttttggaaaacggtgaagcctatgatctgttggatgcgtgggaatactccgagcgcatcatcagtgatttcaccgatgtcattgccgaactcgatgaccgcaaacgctccctggtgcagcagatggaaaatcaggtgatgattcagcaggctaccaacgacttttttgattttatggaaaagcggtttcagccggacctggccattcgattgtcagcggacaacgttgaaaaatatcgcaatgagatcagccagaagatccaacagatccgtcagcaggacaaagggtttaagcagcaggccgaacgccgcctgcgagagttattgccggatatggttcaggacggtcaaagtgtattgtggatggtgctcgacagcattgagcatcgtctgcaagcggcgagtgacatcatgttgccggccttgaggcggtcgctgcagagttttaccaagcgtgccgacatcatcatccgtcagatgaattatctggccagctccacgcataacgacatggtacaggtgctgcagcagttcactgaaaaaccgataacagagcaggaagcactgcttgatcgcgccagtcagctaatgtctgtaccgcaaatcggtttgttagacccggctcatatgcggttacacaaccggcgcattcaacgttcactggctctggatgtggtaccggacagcgacgaagagtttgaccgcgatgcccataaggaactggtggttcagcagtggctggatcaggcatttctgattaacgacaatcaggttcgtgagtttctggtccggcatctgatggctggcgaatccatccgaacggatgacctgccagtgcgcagtgccgccgacctgctgaatctgtcgcatgccattgaagtgggtagcgctaactcgttgtccagtgagctgctgtttgatgtcacctacgttggtgacgcgcccgttgctacagaatactttacccaacaggacctgtttgaaatccggctgcgtgatgcgagcgtgccggcatctgaggaatctccccatgcttcatga

SEQ ID NO: 42105 - DNA, 750 bp, Reinekea blandensis MED297
atgcttcatgatctggaaaaacaactcgacaaagccgggatcacccgcaacgaatacagtgagttgctgattcgactgctggattacggtgtgttgtgccgtgatgaaagccaaacggagcaggtgttgtatgaccgttacctgcgtatcgatggtctcgttgccgattatctggaagtcattggaatccgcattcagcacgaaccccgttttcattttgttcgcctgtttccgcccggcgccgaagttccgggtatggctgagccgcatcagcaaccgtttaacaacggtttccgcgttaagctgaatcaatccgaagtggccctcgtgttgattctgcgcagtctctacgaccgcgcactgcgggaaggtcagctcgatgaacagggctgtgtgctggtgtccatcgaaaacatcaccatctcattgcgaaacctgttgaaacgaacgttgccggacaaactgacggagcgtcgccaattgtttggtcgtctgcgacagcttcgcctgattcaattgaatcaggaaattcatgaagactcggccgatctttggattcgtatccgcccgatgatcatcagctatgtctctgacgatgttctgtccaccttgttgggtgaacattcgtcggactctgaaactgtgacggagcctgagtttgaaacagcagcgacggccgacaccgaagaagaaccccgtttactgacggatgatctgcctgaagatcattctgtgtttaccaaggaataa

SEQ ID NO: 42106 - DNA, 3582 bp, Reinekea blandensis MED297
atggatttcgagttcggaccgattaatctgttttccggcggtaatggttccggaaagaccacggcggcggatgccattcagaccattatgacggctgcgcacgacacactgtttcatttcaacccgggacaggatgaagcgacgcaacgtggccgcggtaaacaagtccgtacgctggcgtcgtatgtcatgggttgtgatgatggctcctttgcccgcaccgaacccacggtgggttatctggccgcagtcttccatccaacgcagggtgaaagtgccgaaccgttcacggccatcatcggcgtcacggcttacatcgacaaagcaggcgcgacacccgtggcacgtcagtccgatatgatgtacatgatcgtccccgatgctgaactcaccaaggctgatttcgtgcaggatatcgatggcgtcagtcgtgtcgtatcactggatcggctgaacgcgcatttcaaacatcagaaaattgagtccgctgaaaagtacgacactaaaaagcaatatctgcggcgtctgtattctgctctgcgtggtcgtaaagatgcgatcagtgagcgcgaggcgatgaacgctgcgcgttctttctcacggtttatggcgtacaaaccggtaaaaagtattgatggctttgtggctcaggaaattcttgagaaaaaagatctgggcgaagccattcgcaccgtctccgatctgatgaaaaccattaatggtctcgaaggcgaagctaaccgtttgaaatcgattatcgatcgtctggtccgggcgcgaacgcaggctaatggctatgttgatcgctggattgagtacaatgttgccgattatgtggcggccaaatcccgttttcttgctgaccagaaaaaatacctggccaccaagtctgagcagcaacgtgtgcgacacgaactggatcagctcaacgacgacctggacattgccacggagcgtcgcaaccagaccgatgaacagcgtgtgtcgatggaggcccgcaggctgggtatcggtgctctgcaggataaagaccgttttgaaaacaaaattgcagcctcaaccgcgacattgcaaaaacaggcaacgccgttgctggagcagaacgatgctctggaaggtaccttgtcagcctcggctgtcattcataaaacgctgttaacgtcgtcactggcgactgagttgccgtcgatggctgacaagtcattgctgcagacgtccaaaaaagtggctcagtctcaggcgctgggtatcgattttcgcagtttgctcaatcaggattggatcgatatttcgccgctggaacaacatctggactcggccatcgcacaacaggcactgctcaatgaatggcgggaactgtggttcaatgctgaactgcatgcggatggtgtatcgcgccgcgatcagttgcaaagactggtggatcgacgtgaacagaaactgatgcaggtgcgcaccaatctgtcacgtaagcagcaggacatcgacagtctgtcgactgagcagatcaactatccgtatcatgtgcggatggctctggaagccattcgtcgagagtgtcctgaagccgacactcgcgttctctgcgaccacgtcgaggtggtagacgaaaaatggcaggcggccgtcgaaggctatatgggtggtgcccgttttgcgatccttgtcgaagccgactatgaagcacaggcgattcaaatcgtccgcggcctgccgaaagacaatcgcgcccgcgtcattcagggcagtaaagcccgtcaggatgccgctagggtgtcgttaccagctaactctattgtgcacctgatgtcttttgatcatgccgtcgccaaagcttatgtcaccgccagttatggtctggtggaacaggcaaaagacgctcaggcgctgaagtcgattcggcgtggtgtcaccgcgaacgggttgggcagtggtgcctatgctatgtatcgctgtgatattccggaaagcgaactggtgttcgggcagggcgcacgggaaaaagcgctgtcggccaaaaagcgagagctgaacgaactggcgacgcaggctaatgagttacaggcgcgtgtcagtgaggtcagtgagctctacaaagcagtgaaccagttgcgacacctgcagcatgggcagttaatgcgtgacatgctggaaactcagcgtgagttgcgaaaagccgaacaggcacttgcagcacttgacctcagcgatgctcaaggtattgaagaagagtatcgcgcggtggttacacagcttaacgagttgaaccagaagattcgcgatggtgatgagaagaaagggtcgctgaaccagcggattgaagccctgactcgccagtgcgagttgcttagcgctcaacaggaaaaaaccgagttgcgggcagaagaaaaagagcagtatctgcgtgatatcgttgaagtctggccaaactttgatgttgaaaaacgtctggctgaagccgaccagcaagccgaagattcggacgcagatacagaagagaatctgcgcaaatcgctggaaagtgagttaaatgccaagtcgcatgagttcgagcagctgttaaaagaacataatcaggattgtcagccacaggatgccattgttgtcgaactgaactacagcgtgttgcacaacgtcgagtttttccgaggcatggtcgggttggcgcgcgacgtagatcgggtgcataaccgtgttaaaaacaacgtcctggtggaaaaggttgaccagcttggtgttttgaaagaaagctttaacagcgcgtttgtgaccaatctgtgccactcgattcaccaggcgatcaatgatggtaaaaaggtgttgatggacctgaaccgggaactggaacaccatcgcttcggtgcggatcgcgaacgctactggtttgattacgaatgggtgccggaatttaaagagtattggcatttctttgatgaagtttacaaaagcccatccattggtgaaggcaaaacgctttttgacaccaccttaagtgcccgatcgctgaaaatacgcgatcagttgatggagatgctgctggacgcggacgaacagaaagcgctacgggagttggaacggatttctgattatcgtaactaccgaagttatgaaatttataaacaaccggaaggcaaacaacccattgcgctgagtcagtacggtaccggctctggtggtcagcttgaaacaccggcctacatcatccggtcggcggcgattacttcggctttccggtttaacgaaggtgacagccatctgcgcatggtgctggtcgatgaagccttttcaaaaatggatgaaacccggtctaaagaggtgattcgctacctgacggagtcgttaggactgcaattgctctttattatgccgaccagtaagtccgggccgtttatggacatgatttcgaatcagtttgtgttctcaaaagtgccgttgttaaatggacagcggcgcggagagctgagtaccaaggtgctggtggatcgccagcaatgcaatcaggaaaaaattcaggagctgtgggcgaatcaccgtaaagtgatccgtaagcaggccgaactcgattttttggagggactgtaa

SEQ ID NO: 42107 - DNA, 732 bp, Nitrococcus mobilis Nb-231
atggcactgcagcagtgcgcggcgtgggccgcctgtgcgatcatggcggctcgcctcacatgcaccgtcgaaacgctgatggattcgctgacccgcaccatggatcacgactatcttcagacgctgcgccgtctgcatccggcctggcgcttgctggccgcggaccatgggccgctggtcatcggcttcctgcaccgctgctttatcgagccgaatgtacgcaccctatccgaagaggaggcggccgcgcgcctggaggactatcttttccagctgcgcgagcggttcggcgaggaggctttcccaaagcgcgcactcgactacctcaacgactgggccaacgaccagcgcggctggctgcgcaagtactaccgcgagacgcgcgacgaaccttgcttcgacatcacgccggctacggagcaggctatccagtggttggcggggctggaacagcagcaattcgtcggcaccgaatcgcggctgctcaccgtcttcgatttgctgcgccagatcgttcagggcaccgaaaccgatcccgagacccggatcgccgatttattggcggagcatccgctgcagcagggactggcggaactggtcgtctacctgagcctggctgccgccgaccgcaaggcggtcatcgacgagcagacgcctcagagcgtagcctggacggacgaaaccggccgaattcgacgggcacggctaccggccgttgtgtacactcgctga

SEQ ID NO: 42108 - DNA, 2910 bp, Nitrococcus mobilis Nb-231
atgaacgacgacctgtgcaagcgcctgcgcggtctgaccgatgtcgagctgcacgagactttccctccgtatggggccgcctttcggcgccggttcggcttgggccacgagcaggccctggagctgttcaaccagaccgtatcgatgaagtccgtaggcaaccttaccgacttcgtccgcggtcacatgctggaggcctttccggtcgagccccgtatcgaagcgctgatcggccacttcgatgacctcaaccgcgcccacgcggcggtgctcaaggccaaggcgcaggtcgaggccctggaaccgctggtagcggatgcgcagcgtcacgccgaactcgccggcgagatcgagaccctgcgcgcctgccgcgatgccctgcggccttatttcgccgcacttaaaggtgaactgctgacgcggcgcatggacaacttggaccaggaactgacccgctgcggcaaccgcatcgtcgagttgcaggacgcgcggcgcggcgagcagagccgtcgcgacgagctcaagcgcgccatcgccgagaacggcggcgaccgcttggagcgcctcaaggccgagaccgtcgaacggcagcgggagcggcacgctcgccgcaagcgcgccgagcaatacaacgccctcgcccgggagctggagctgcccgagccggccggggctgaggcgttccttgccaaccgccgtgcgctggagaccgagcgcgcggcctgcgagccgcacctggagcaggtgcagaatcggctcaccgaggccaatgtggaattccacggcttcaagaccgagcacggcgggctccagaccgaactggagtccctgcgccaacgccgctccaacatccccgcccggatgctcgccatccgtgagcggctctgtgaagtcctggagctcaacgaggaggcggtacccttcgccggcgagctgatccaagtgcgtgcggaggcccgggactgggagggtgccgcggagcgcttgctgcatagcttcgggctgtcgctgctggtgcccgacgctcactacgcccgaatcgccgagtgggtgaacgccacccacctcagcggccggttggtctatttccgggtccttgagcggcgggcggcggaacccgctgagcggcacccggaatcgctggtgcgcaagctcgccatccgccccgactccgccttctatccctggctggaggtggagctggtgcggcgcttcgactacgcctgctgtgaggacatggcacgcttccggcgcgagcagcgggccattactcgggccggccagatcaaagccggcggcgatcgccatgaaaaagacgaccgccaccgcctcgacgaccgttcccgctacatcctcggttggaccaacgaggccaagatcgctgcgctggagcagcaggccggccacctggagcagcgcatgcaggccgtgggccgcgagatcgccacccagcaagccgagcaaaagcgcttgcagacgcggctgcagaagctcggtaacctcgccatgttcagcgacttccgcgagctggactggcgcccgctggtgaccgaaatcgagcgactggaggaagagcgccgccgcctggaggtggagtcggacatcctgcgcgcgctggaggagcagcttcagagcttggaggcggcgatcgagcgggccgaggaggcgctcacccgggcgcagcgcgagcaggccgccgccgagagcaagcacgaggcggcccgactggcgttggaagagacccggcagcagctcgtcgcgacgccgcaggcgctgcgcacccgctatttccctcggctcgaggccatgcaagcggaggccctcggcgaacaccgcctgaccgtcgagtcctgcgacaaccgtcaaagcgagctgcgggattggctgcaaaagcgcatcgacgccgagcagcggcggctcgaccggttgcgcgacagcgtcatcgacgccatgcgttcctaccagaacgcctatccgctggagacccaggaggtggatgtcagcatcgactccgccgccgagtacgcgggcatgctggagcgcctgcgcgctgacgatctgccgcgcttcgaggcccgcttcaaagccttgctcaacgagaacaccatccgcgaggtggcgagcttccagggccagctcaaccgcgagcgcgaggcgatcaaggagcgtatcgagaccattaaccgctccctgcacgagatcgactacaatcccaaccgctacatcacgctgctcgccgagaccgccgccgaccccgaaatccgcgacttccagcaggagctgcgcgcctgtaccgagggcacgtttaccggctccgaggaagcacagtactccgaggccaagttcctgcaggtcaaacacatcatcgagcggttccggggacgggaaggcagcaccgagctggatcggcgctggacccgcaaagtcaccgacgtgcgcaactggttcggtttctccgcctccgagcgctggcgcgaagacagcgccgaatacgaacactacaccgactcaggcggcaaatccggcggccagaaagaaaagctcgcctacaccgtgctcgccgccagcctggcctaccagttcggcctggagtggggtgagacccgctcgcgctcgtttcgcttcgtggtcatcgacgaggctttcgggcgcggctcggacgaatcggcgcgctacgggttggagctgttcaggcggctcaacctgcagttgctcgtcgtcacgccactgcagaagatccacatcatcgaaccctacgtggcgagcgtcggcttcgtccacaacgccgagggccgcgaatccatgctgcgcaacctcaccatcgaggagtaccgaaccgagaaagccgcccgcggcggtggcgtagcggctgcggagcaaagcgcggccgtctcctcggccggccgatga

SEQ ID NO: 42109 - DNA, 363 bp, Nitrococcus mobilis Nb-231
atgagctggaccactccggccgagctgcgagcgcaggtgacacggctctgggagcggggggagatcctgcgcgcccgcctcagcggcgagcccctctttcccctacggttgcgcctgaggcgaccctccgcgcgcgaaatcgccgatcatttcggcgaggtcggcgactggatccggcgcctgcaggccggcagccgcgagcagcgcggtgccggctacgccatcgaatggcgccggatcaaccaccgggtgcacggcgcgaaccgcctgccggatagtattagcgtccccagcgagcacgacgcgctcacgctcatcggccggaccgcgccaccctggcgcagcatcgccacctgtgggtaa

SEQ ID NO: 42110 - DNA, 1434 bp, Neptuniibacter caesariensis
atgctgtttaataaactccctgataacttgtttttgcccctttccgggcaaaaccggcaggtctatcaggctgtactgatatcactggccgacctgttctttgatgaggatttggttgacccgtttgtacctaaggacctggtacgttcaaccattgaaggtgctgtaattcggttaggggtgcgccgctgggaacctgaagaggatgactcagaagaagagcagcaagagctgccgcgatccactgccgaatatacaagccgaatttatcgcaggcttgtcgcaactggctggcttgaggaagagcaacgtatttatcgtacttacgtgcttttatcgcctgccaatagcttcctgctgagaacactggtttctatcgcaaaccttgaaaagcgtagctatggcggtgcggtgttgaacgtattgagttctttggaagccgcaattaatgatcctcaagggcgtggtattacgctgtcagaagctgcgcagactgcagcagactttagcgcgcacctcaccgatatgatgctagggttgcgtgagcttaagattaacctctcacaaacgaataacccgcaggaaattgtcagaaacttctttgaccgcttcgttgagcatattcttgtttcagattataagacgctgaaaaccaagaataacccgttccgcttccgtcagcagattttgtctattctgcgagagcttcagtttgatacggtaaaactcgagcagctgataatgcattaccagcagcagtttgaagttgatgttcatgacgcagaggcaagggttcatcaacacattaaccgtattatccgaatcttcgaatcagttgatcagcgtttagcgatcatcgatgacttccgctaccgccttgagaaaagggtatcggatacggtgcgctatatggataaaacgacaccaggtatggcgtcacgattgtcccgtgtgatctctgagatctctcagaaagatggccgcgaaattccacgtatccgtacactggaaacggttggattcctggctccaggtagtgtgagagcaccggttaagcgtaaaaccccagcagaacctaaagtgattacccgtcaggagatcgatcctaaggttctgcaacttcgccaactcttcaaagagtataaagagcgccgtgaagttaaggtggatcgtatcgaagcctaccttgagagacacctgattggccgcgatcaggtagacgctgctgattttgaaattgactgtatcgaagattacatctgcttcagctatgtccgtcatcttcagtcattaggtaaaaaagcgaagaaaactattcagaaatacgatatccgtttcgaggaaaactatgtcaacgtcgctgatatggtggagtgtcgtaatttcagtataaccagaaaagatcattcaaaggacgtttcaaatgctaggtga

SEQ ID NO: 42111 - DNA, 723 bp, Neptuniibacter caesariensis
atgctaggtgatctgcaaaaaattattggtcgcagtgatcattaccaggcaagcgattttagccgtgcagccaatcaactgctgacaaaccagttcctttatgcggaacgcccagctcatcgagaaagttactttctggtagcctcacatgttgattacttcactaacctgttcgaagcgattggctggtcgtttgttcatcagcccgatgaagcgtatatgggtatcattccaaagggggaagagcgttttatgcgtttgcgcctcgacgaatccttgctgctcctttgtattcgtcaacagtatgagcaaaaactggaaagtttcgaagtggaagcaggtcaggcatataccagtacagatgacctgctaactctgtatgaaaacctgacaggtaaagagattcccaacgaaacccgtctgaaagagatactttcgctgttttctcgccatggtgttattgagcgaggaaagcctgatgagatggcgcctaagaatattccgttgaagattaatccggtgattcgtcaggttgttgttgaggactttgtccgacagttagaaggtctttgtgatccggatgagcaggaaaacgcgctgattgatgaattgtctgctcctgttgaagcgccttctcaggaggctgaggtagaagagacgactaatgaagaacctgttgctgcacaagaaacagcggcggcagaagaggtagaaacaccatga

SEQ ID NO: 42112 - DNA, 3453 bp, Neptuniibacter caesariensis
atgaagcagctaaaccgaattattctggttaactggtatgtattgggtgcagtagagatcccgattaagggtaacgtagcggttgttggcccaaatggttcaggtaagtcatcactactggatgcgatccagactgtgcttatgggcggcaacaagcgtcatctgagcttcaacgcatcggcaggtgagaagtcagaacgaagcttacgtacatactgccttggctttctggatgatgatggtaagaagaatacagcccgtcacgactctctctgttatctggcgctgagcttttttgataccgaaacagcgaaagaaaccaccgtcggcgtagcgatcagtgcatcaacggcatcagctgatgaagatgtattgggacgctttatccttcctgacttttcggtctcgctagatgactttacagagaagaaaggtgaagggcgtttacctaaatcctgggattcagtacgtgctcatcttctgaagcagtgtcctgaaatgatcatcgaaaaacgctcgagccgttttgtgaaagagatggtatctcacctgagttacgatcctgagatgccgaacgacgatgaaaaattcgtcaagaacttcaaaaacgccctgaagtttgtaccgatcgatagcccaactcgctttattcgtgagtttgttttggatgagaacattgtccatgtgggtgctttccgtaaatcgctggatgaatatcgcgcgatggagaccaaaacccgtgaagtggctgatcgaattggtgagttggaaaaggttcaggagctatgtaatggcattcagcgcaacgttaagaatgccgctgaatatgaatgggttgtccatgagactcgttttgaaaatgctgacctgaaaaaggaagatgcagcagagcgtttggatgacaaccgtgagaaagaggaacagttgcaaaaggatctgggtaacaagagcgaagagcttaaccagattatgcagaaccttgctgatgcccgtgccgagctgaatacttcagattctgcccataaggtgaaagcacttgagtcctccatcacggctaagacccatgaagtgaatgtggttaaagagcgtattcagggtgtatataacctgatgcgcaccacggtagggtttgctgagaatagcgagctactgcctgaaaaattccgtccagtcgttgagcagtgtgttcagcagtggcgctcgggtcaggatatgatggctgatctgtggcctcattcgccggttgaagtcgataacgttctggaaaacctaaagcttcaggttgaaggtgtgcgccgcgatgtggcgcgccgttatgagcattcggttattcgcatcaatgagttgcgctccgaaattcagaatcagaagagtgcggtcgaagcgcttaagcaggggcatgcacctgtgcgccgaaacacccgtgagctgatggaactgctacagggttatggaattgaatcgacacctatctgtgaattggccgatatcaatgatgataaatggcgtatagcgattgagtccttccttggagctcgtcgtgaagcgttgattgttgaccctgatcgggtgaaagaggcaatcaccttgtatcgtcgtaaaggtcgccacctgaaaggttgccgtatcgtcaataccactaaatcaggtgattggttaaatcgatataaagcgggttcactggcgcactttattgataccgataacgaccatgcccgcgcttatatgaatcgagcattgggcggagtgatggcggttgaaacagaaaccgaactgctgcgccacgagcgtgctttgacctatgactgcatgttgcagactgaagggtctaccactgcgatcaatgaacttcagccaattatgggtattcgacgtcgttcagatcaagctgccctgcaaggtaagcaggttgatcaaatggtgacagagtttaccgagctaggtcgtagtcatgaatccttagaaaaactgcgtgatgcattgattacccttaacaacggtttagataatgtaaatgagcgtgtgtttgacctggttaatcagcgtgagcagttagccactgagatcgatggtcagcgtcaggcgattactgacctgcgtaaccaggacgatacaggcgtgcagcagcgaatcagtgatctggttactgagcaaaaagaagctgaacagatgcagcgtactctgatggacaagctgcaaaaaattcgcacctcgattatcaaagatactgcatccttggaagtgttcgatcaggagcttgaagaacactctaatgcacgtagccagtgtgaagagaaggtcgcgtttgatgctcagtcagcacaggaaaaacgtgattatctcgatgaaacttgttctggtgagttggagagaattatcttcgaagccgctaaaaaagcgcaatcggaactctccctccacgagaagaagaaaaacgctgttcgtgatggcgttgcgcaatacaaagctaagtaccatggcggtggtttaagccatcagcagcttgacaagatcagcccggattcaagccatgaagagttgtctgcatttgttgatgaaacggtccaggcactgaaagattctgagctggcaaattacagtcagaaagctgaaagggcccgtttggaggctgaaactgcgttccggtctgactttgtggctcatctgaatgatcagatcaataagatcaaagatatgatccgcgaactgaatcagcatcttaaagggcgtccgttccataaagagatgtatagtttcgagatgacgccaaacccagaactgaaagatattctggaattggttgaggcctatacacagatggattcagccaatgtcggttctctgtttgaccttaagttcgacagcgataaaccgcataaagatgccttggctaagatccacgaagtgcttaaagatgaaggcgaaagtagcctgcttcaggattaccgaaacttctacaacttcgaattggtggttaaagatctgcagggtaaccgtaagacaaccctgacgcagcgtattaaaaccggttcaggtggtgagcatcaggttccattctatgtggcgattgctgcggctcagggggcaacgtaccgactcagagaaggtaacgatggccaaccaatcggtggtatgagtttgtcggtatttgatgaagcatttaacaaactggattcggaaaatactgttacgtccctgggctttatgagcgatctggggttacaaactatcattgctgccccggatgaaaagtattcattgctgagttcatgcatggataccatcatcaatgtttgtcgtgatggacgtgtggtcgatctggacgttgaattcccaaccttgcaggggcgtgagttacttaattctgacaatccattgaaaatgatggcggctttagaagctgatgaagcagaaaatagtgctgaggaaagctttgaagttgagccagcttag

SEQ ID NO: 42113 - DNA, 1452 bp, Bermanella marisrubri
atgttttttgttcaggaacgtttacagttttttcgcccccttacgagtaagtaccgtgagcagttggtggagtgtctgcgagaactgtatcgtcagctttactccagttctcatgcgggtagtgccgaatatggccaagccctgagtcgtgatgccattcttaatattttcagcgaagcattagtacgtgctccaattattcaggatgatgaagaagatgaaagccgcttcaaaagccatcgggaactagcgggctttattcttaatgtcttactcgagcacggctggattgaaaaacaagtggatcaagccactttgcagtcaagttttagcttcacacgccatggccgtcagtttgttgagcctttcttagaggatcgcctaaccaatcaagtggcacgccatcgcaatacgcgcaacgtgcgcaatatgctggaaagctttttagaacatggtgaagtctatgacttgttagacgcctacgaatacagtgagcgcatcatcagtgattttaccgatgtaattagtgagctggatgagcgtaagcgtgatttagtgcgtgagatggaaggacaaatgctggtacaaaaagccagtgatcagttctttgatttcatggaaaagcgcttccagcccgatttatcggtgcgtttaagtgccgataacgttgagaaatatcgtgatcagatcagtgagctggtggatgatattcgacaaagtccaaaagcgtttaaagccaaagcggaaaaacgcctaagagaattattgccagatttagtacatgaaaatcaatctgttttatggactgtgttagatgatatcgagcatcgtttaaaaagcgcttgtgaacatatcttgccgttggtgcgcaaagcattgcaaaactttactaagcgtgccgatattattattcgtcaaatgagttatctcgccagccaaaagcacaatgatgttgtatccgtgtgcaagcaattggcgtcgatgaatgaagaacagcaagcagagcaattggaacgggtcgcagatctcatgtcggttcctcaggttgggtttattgatccgcaacatgttcgacttgcacctccacgtcgccgtacggtgatcgatacacaagtggatgaaggtctagaaagtgttgatgaagatagtcgtaaagagctttatgtacagcaagctctagatcaagctttctttgttaataacaataaagttcgcagcttcatgattgatcagtttaagcatcgagatgaagtcattagtcatgaaatacccattgataacgccaacgatttgttagcacttgcccatgtagtcagtgtgggggcagtggataatttatccagtgaatatcacttcgaattaaattggattgagcgtagtgagcacgaatattttgagcaaaaagatgtgttttctattcgcttagttaaaaacgatagcgcagcagcttaa

SEQ ID NO: 42114 - DNA, 834 bp, Bermanella marisrubri
atgttaaatagcattgaacagcaattagaaaaagaagggatacaactcaaagaattcagtgagttgattatccgtttaatggattatggtgttatttgccgtgacgaatcacaggttgagcaaacgctttacgatcgttatctacgactagagcatttggttcaagactacctatctatcatgggaattcgcgttcagcatgataagcgttttcaatttattcgctgctttccaccgggtgcacaagtaccgggtatggatgaagacgatcaaccgtttaacggcggtttacgtgtgcggcttagccagaatgaagttgctttggtgttagtattgcgcagccaatacgacaaagcactgcgtgaaggtcaagtagatgagcaaggctgtgtattggtttctcttgagtcgttaagcattgcacttaaaaacttattaggtcgttctttgcctgaacaaatgacagagcgtaaatcgctattccgtcgcttgcgtcaattacgtttgattcaattatccagtgaagatgcgcttgaaagtgccgagttctggttaaagattcgtccaatgatcatgagctatgtgagtgatgatgtcttgagtacgcttctagcggaagatgaatctccggtggaagtcggtgacgaagaatccgaatcaaaggttgaaaacgaagccacagatgaagaaaaccaatcacaagctgaagcatcgactgaagaagaagcgcaagtaaacgaaagcgatgatcagccagaagaaccacaagaaccatcattgaccgcaattgatgtcgaagatggaccgagcgtcttcgcacaggagacaaactaa

SEQ ID NO: 42115 - DNA, 3639 bp, Bermanella marisrubri
atgtttttgaaaaagtttgtatatgtaaactggggaaatatcccagccactgaatttgaatttggtccgatcaatttattaagtggtggtaacggtagtggtaaaaccacggcagcggatgcgattcaaaccatcatgaccgcagcccacgatactttgtttagttataacccgggtcaggatgaatccacacagcgtggccgtggtaagcaggtgcgtactttggcttcttacgtattgggttgtgacgacggttcttatgcccgacctggtggcgccaacggttatttagcggcggtatttcatcctactcagggagaaagtggtcagccgtttacggcggtgatgggtgtcagcgcttatattgataaagcgggcaatcaagcggtagcgcgtcaaagcgatatgctgctgatgattgtgtctggccatgaattgacgcaaagcgatttcttactggacgaagaagaaggtaagcaagtcgttggtgttgataaaatttataagcgtttacaaaaacgttgtggtcagcgtgcggtagaaaaatacgataccaaaaagcaatatttacgtcgcttgtatggcgcattacgtggtcgtgaagatgccatcagtgaacgtgaagccattaacgccgctcgagccttcagtcgcttcatggcttataagccagtaaaaagtatcaatggttttgtcgccaacgaaattcttgagaaaaaggatttgggtgaagcgattcgcaccgtgagtgatttgatgaaaaccattcacgccatggaaagcgatgccaatcgattgattgaaaatatcgatgttctactggatgcaaaaagcaatagccagacgtatatcgatcaatggatcgattaccaagtggcgcattatgtagcggcaaaaagtcgctatgtagaagaccaaaaagcctatcgcgacgccaagaaccagcaacaacatttacgcagcgaacttagcaacaagcaaagtgagcgtgaaacagcagatgcgcgacgcaaacaagcccgtgaacaattagtaagcttggaagcccgtcgccaaggtattccggcgctcaaagataaagatcatctcgagcaagaaattgagggctttaaaaagcaattgcaacaacaagcggtcatgctgcttgaacaagataaacagcttaagtttacccttgatgccagtaaaagcattttcaaaaccttgcaaaataccagcattggcgcagaaatcagtgcgctcaatgaacgtaattttttaaagcaagccaaagatgtggttgcgttagccgatgaagatcaattggactttgcggcgattctaaataaagacatgatcgatatggcaccgttagaaagtcatctcgatgaggggattaagcgccagcaacaaattaatgaatggcgtgatcgttggttcaaccctgaattaaccacagatggtgtgagtcttcgagatcaacttgcgcgattggctgatcgccgcgagcaaaagctgcagtcccaacaaaagaaaatgcagcaaatacaaatggacttggatcgtttgaatgcatcccaggtgagttatccttattttgttgaggcggcattggatgccattcgtcgcgaatgtccacaagccgacccgaaagtgctatgtgactatgtcgaagtaaaagacccagattggcaaaacgctattgaggggtatatcggtggtgctcgctttagcatcattgttgaaagcgattacgaatctcaagccattagtatcgtgcgtaatatgcagggcggcaatcgagctcgcgtgattcaaggcagtaaagctaaacaggacgccgaacgcggtaatactccgcataactcgatcattcatttgatgtcatttgagcatgcaacggcgcgtcattatctgacagccagttatggttcagttgagcaagtgcctgatgcggatactttgcgtcgcacccgtcgcggtattaccaagcaaggcatgggttctggttcttattctatgtatcgctgtgatatgagcgatacggaacttgtctttggtcaaggtgctcgcgagcgtgccgagcaagcaaagcagcgagaactgcaacaattggccgatcaagcaagtcaggctcagcagagcctgcgtgaagcgcaagatctattgttggccgtaaatcaattgcgtcatctgacctatgctgaccaacttcagcaaatggtaagtgtgaatcgtagctggcaaaacgctgaaaagaacttagagcaaattgatttatctgatttctctgaactagaagtagaatacgagcaacttgccgaacaagcgcaagagttggatgcgtctattcagatcttagatagcgaattgggtcaaacagcacagcaactcaaagaatgcgaaaaacgttgtgcggtgttaagtgaccaacaggaatttacttctgaaaaagccgatgagaatgaggataaccttcgttcgatcgctaagttgtggccagattttgatgtggaaaaatgcttagaagacgcagatgcagaagctgaacgcaccacagccgaaattgcgcaaaaccagcagcaggctatattgagtgaactcaatagtcgcgcacaatgtttggatcgagcgttggcagatcataatcaacgttgccaaaccctggatgcgattgtctataacccagattatagcaatgaacatagtgctgatttcttccaaggtatttgtgatgtacagcgcgaaatcgaacgtattcataaccgtcttaaaaataatatcttggtggaaaaacaagacaaattagtgggacttaaagaaagctttgataacgcatttgttaccaacttgtgtcacgcgatctaccaagcgattagtgaaggcaagcgtacgctagaagagatgaacaaagagcttgagcatcatcgcttcggtactgataaagaaaactattggttcgattgggaatgggtgcctgagtatcgcgattactggaacttctttgaggaagtcattaaaaacccagccataggtgaaggtcagactttattcgatgttgaattgagcgcgaaatcaaccaaagtgcgtgaacagctaatgtccatgttactggatgatgatgagcaaaaagccatgcgtgagttggaacgtatttccgactatcgtaactaccgtaattatgagatttataagcagcctgaaggtaaagaacccattgcattatcgcaatatggtacgggctctggtggtcaactagaaacgccggcttatattattcgaagtgcggcgattacgtctgcgttccgtttcaatcatggcgatacccatttacgtatggtcttggtggatgaagcctttagtaaaatggatgaaacgcgatctaaagaagtgattaactatttaacggaaagccttggcttgcagttgctattcattatgccaaccagtaagtctggcccgttcatggatttaatcagcaaccaatacgtattcagtaaagtgccgttggctggagccggtaaacgcggtgaattgaatacgcgagtattggtggatcgacagcaatgcaataaagagaaaattcaagcattgtgggcgcaacatcgcaaagtggttcgccagcaagcggagttggattttatggaagagtttgcctaa

SEQ ID NO: 42116 - DNA, 1461 bp, Ruminococcus torques ATCC 27756
atgagtttgatggaaaggatccccaaagatttttataaattattttcaagtaaatatacggattactatatgctgtttctcacggcaatctatgaggaaatgagtctgtcttattccgtgcttggattgacggaaaaagagtgcagggcagttatgaatgaaaagatcgcggcagcggctcttctgtgggatgaggaaaattatgatgaagagggagagtttcttacacgttctaatatggcgtccgtgtgtctgaaacattttcaggagtggggatggctgaaacaggactatgacgaggctttgaacagttacgttgtgacatttcctgaatatagtcagatgtatgtggagttgtttaggagtctgcttgatgaacaagagagcgaagagcgggaaagcgttatgacgatatacagccatctgtatacatatagttccgataaagaaaaaaataatgagattttaaaaagcgcccttcgtgtttccaaaaagcttgtgcagatgcttgtaaatatgcaggacggtatgagagggtattttgatgaactgtcccgtcagaaagattttcggggaatacaggacgtccttgtaaaggagatcaataacagtgacagccgaaaatatgcgatcttgacgacaacggacagtttttatcgatataaagaagctgttaaagaactgcttgacagaaatttacaggaaaatgatatgagcaggctgaaactgttgcgggaactggaagaggtccgtcaaaagaagatgaaagacgaagaaaacgcgggaaaagttaaagatccgaaaaaaacagatgaggcggagaaaataaaagaactgcggctggaacgggcggcggcaatgtgcgaggaagcggcagatacgctgatacgaatcgaaaggcagtttgatgcgatcgaaagaagatataataaactgatcgaacagaagacgatttttgcgtccagggcggctgcgagaatacggtacgttcttcaggaaggagcagaagaagaccgtacggttgcgcttgtagatctgttgaataaaagcaggagaaaagaagaaatatcggaaaaactggcggagcgtatccgccttagcagacctcacagagcgttgacggatgaaagtctgtacaaacggaaagaaaaagggagagaagcgtttgttccggctactgtttcggaaggcggacaggcggaagaaaatttggagtcgtttgtcttaaaaccgctttatacaaggaaagagctgcaggagttcaaagaaagaaacagtgtcggaaacgtatttagaactacgcggcagacggttcggtcggctgaagatttggaaaaattgttttttatatggcaggaagcgacggaaaatgcgtttggcagtggggagatcaccgtaggagaggaagaagaaaccgaacagggaatgcgtttttcaacgctggaaataagagaggactaa

SEQ ID NO: 42117 - DNA, 639 bp, Ruminococcus torques ATCC 27756
atgtttgagtatttggaaagtatttctatcacagaaggggaacagataaaaaagacgatacaggcgttgtttcgccagacatgtattttgcaggtgaaatatgatccggcaacacttgtgccgaaagataatgtacagtatgaaatctgtgtccggcacagacattttatagaagactatctttcggtacttggatgtgagcttacgcatgatgcacaagagcatattttctgtttgacaggcgacggagctgcaagggaaaaactgaatatgacagaaacggtgatccttcttatcataaaactgatctataaagataaaattatgggagaagggttaaacgctcctgtgacaacgctgaaagaaatgcgcgaatacggaaagaatacgaacctgatcgtaagaaaattgaaggcagatgaatggaaagcttctctttatctgatgcggcttcatcagatcatcgacgtgccgggagcggtgagggacgtagaagacgatacgccgatctatatttacagtacgatcaatctgtatgtgacggcgaaagatatgaatgatttgattgaagaatatagagaggaggcagacggatatgaaacagccgaagaaaatttttacaagaatgctgatcaataa

SEQ ID NO: 42118 - DNA, 3366 bp, Ruminococcus torques ATCC 27756
atgaaacagccgaagaaaatttttacaagaatgctgatcaataactggggcggcatcagccataaaatgttggaattccacgagtatgtgaatcttttcagcggaaagagcggatcggggaaatcgacggttatggatgcgatacaggttgttctgtatgggagtgtgtctgctaattttctgaataaagcggcagatgattctaaaaacaagagaagcgttttaagctatcttagaggagcgcaaaaagacggaacggcaaacaggggagacgttgatttttgttcacagattgttcttgagattgaagataccgccactcatattgtgacttgtgtcggggcggcgttcgaggtggcaaaaggggatacggatctgaaaaaatatacttatttcagtcattcgggaagaattccaaaggatgaatatttggaaaataacgtaccttattcgatcgcacagattagaaaacttacggaagaaagaagcagaagcgccgataacagaggccggggtgaagtaaataaagtgtatccgtcgaaagaagcttatctttatacgctgtacggggaaatcttcggtcaggtagaacaaggtcgtatgatcacgatggaaaaaagcgccattgctctgaaaatgacgagtggaacaggtcagtttataagagattatatgtttccgaaaacgaaagaagatacggtggcgacgatcagtgaacagcttggcgcgtacagagagatcaaagaacgggtggaagatctggaaaaacggatcgaaatgctggataagatccaagtatatgacagagaactgacgaatgtgcgtgcggagaaagtacgaacggaaacagtgctcaaatgcattgatatcgaggaaaatataattcgactcaaaggacgggaaagtgagttggaatccgttgaaaaagaagcggacgaggcgaaaaaagaacagaagatacttcaggacgaactgcagacgatacgggatgaaagagcccgggtacaggcagaattaaataacagcgattatggaaagaaagaacaggaactaaaagatttagaatacagaattgctcttctggcggataattcggcacagtggcggcagatcgtgaaaggattgaaacgatgggaagaagaggatgttgtcactgattatgtgagcaacagagctcttcagcttattcaggaaatacgaggcggagcgcttacggaaaagttatgtaaagaactgaggacacatcttgacttggcccttgataatattacaaatgaattgtcggaacttcgtatttcgatccatgaaacggaaaaagacatcaaagaaaaacaagatgctgtcgaagatctccaaaacgacagaaaaccgtatccgttggaattgaaaaaggcgagacaggaactgcagcgtgcgttgagcgacaggtacggaaggaaaatcgaagttcatattttcgcggatttgtttgatattacggatgaaaaatggaaaaatgcgatcgaaggacggcttggcaggattaaaaaaagtatgattacagaaccggcatacgctcttgatgcagcgaaaatatttcgcaggatgcagcagtttgaagaagttgatctgatcaatagtgaggcggttcaaaaggattctccggaagcggacgaaaactcgctatatgaagcggtacacgcagaaagcggatatgttgaccggtgcttgaaacgttatcttggaagaatacaaaaatgtgagacggtggaagagttaagtacggtaaaagacggagtcacaccggattgttattcgtacagcggatatatgttccgccatctgcgcaggaaggattatacgaaaaatgcatgtatcggtacaaaagtatcgaaggcaaagctaagagagctgcaggaggaaattatagatcttcaaagttcgctgatcgcagatcgtcagacggaagagtcgttgaaagaagcccggcaatttgaacggttcggtcaggaaccggaacatttgatgcgtcttgcgggtgcggcagacgaactggccgatcattaccgccgccaagaccggctcaaagaagaaatcaaagaactgaaaaacggaactttggcagcagaactgcaggctaaaacgaaagaacttacaagccggattgaagaaaaagaacaggcggcaggaagattaagagaaaaagaaatcgaaacagggaagaaaaagggcaaactggaagagaaaattaaagcgctgaaagaaagactcgattttttgatgaagggatatgttccgaatgatgagatatttgccgaagtgaggtcggctttggaaacaaagagcgaagcggcttataaaaaagagatgacagtgatggcggagaggctttttgagaaagaaacaaaacttcaggatgagcggataaaatcaagaaatgcatttaacaatacatatcccgcatatggattttcaggtgtagaacatgacaatgaagtttacgacaaagttttggagcgatgcagaaaagattttgagccgaaatataaagaagaatttgaaaaacaatacgagctcgtgtaccattctctgcgcgataacgtgatcgcaacgatacacggggaaatcaagtcggcatacagacatcggcgtcagatcaataaaatgctgtcgcagatccgtttttcggacagcatttatcagattgatatctctccggcaaaaaatgaaaacggacagttttatgagatgcttatggcagaagaactggacagcaaagtaatagatcatagtgggtttgacggtcagatgagtttgatggaagatgaatttttcagaaaatatgaaaggaagatcggacttcttaccgagaaattcatgccgtccagagaggaagacggggcagggcgtgaaaagcacaaaaatgaaatggaacgctttgctgactacagaaactatttggactttaatatgtatgaacaatctatcgatgaaaacgggatcgagaagaaaaattatgtggacgacatggcgggcgtcgattccggaggagagggacagaacccgaaatatgtggcgcttcttgcaggattcgcaatgctctatatgcagcagagtaatcgggattcaaagattcgccttgttcttcttgatgaggcattttcaaaaatggataaggagcgaagcgaagtctgcttaaaatacgcaagagaattggaacttcagttgattgtctgcgtgccggatgaaagacttcagtctctgatccgaaatgtggacagcgtatacggcttccgcaggtttagaaatcaggttacgatgatgcatattgacaaaggaaattatctcgatatgatcgcaggggaaagcagatcggaagaggtgtag

SEQ ID NO: 42119 - DNA, 1233 bp, Ruminococcus torques ATCC 27756
atgagcggcaatttgttggcaaagtggattattgggaaagcggaaaaaagtgaagcttatcgggcgggaacgctgacaggcatgaaacatccgaaaccggacagagaaatgatcaaggcagcaggtggcttgcctgagctgatcagacaggctgatgagttggagaaaagcggatatatccggacagaaaaaagcaatctgggcgcggatatgaaaaaaatctattattccatagatgtcattccaaagctgtgcgaaaaagaaggaattgaagatccaagaaagcagcagcttcgttatataaaacaaatagaacaactgcgcgctgaggtacaaggcagttttttggaaggttattatgatgagatcataagacggttggaacttggggagatcgtaaaatcacccgatatggaggacgttgattttttccgatgtttgaatgcagttgtgaatttgaaaaaatctctgtggatgcgcgtattcagtgctgctgtgcttaatgactctaagcgttttaaaaaagattatgagaaaaaagtggtgaaagtactggtcagatcacctttgtatgaagaggggatgactgacgatgagatattaagcgttcatggaattctcagttatgcacaggtgatggaatggaaaggtccgcttctgtataaattaaagggcggacaggagtatatagaagataaggcgagggaaaaggaatatgaaatagatacatctcaaaatcaatacggaacagtgattaattcgcagacattggaacgtgcctttcccgtttctataaaaggagtccaaagaattgtaacgattgaaaataaggcaaattatgaagaaatgaaatacagagaggatacgctttatctgttctgtcatggattttattctccgaaagaacggatttttttgaaaagattaatggaagtggcggaaggagagatacagtattttcattggggagatatggatatgggaggcattcgtattttccggtttaataagaaaaatatttttccgaaattgaagccgtataaaatggatcgagaagcatttcaagaagcgcttgaaagaggagcgggcattcctctggaagagaaaaagaaagaaaaattggaaaagcttaatgcgggagaattagaagagcttaaaaagtgtattttggaaaaaggagtagaaatcgaacaggaaattttattggcggaaaatgcgatagcggaaaattga

SEQ ID NO: 42120 - DNA, 1365 bp, Dorea longicatena DSM 13814
atgcagttaatgaatgaaatcccggatacgttctggagtctgttccgttcggtcaaccgggatatttatattgaagcacttttatgtattaatgaagaatacgaatataataactatttcctgacgaaagaggtgtgcatccagatcttaagtgatatgaatgcgaagaaacggtttgagttacagcgggaggaaaatgatacggattttgatatgctggagacgccgtcatcaaggatattaaactggcttctgcggtcaggatggctgaagcgtatcgaggattataatacactggtgacgaatattgtcattccggattatgcggcggtgatgatcgatgcatttgaaaagctgaattcggaagatgcgtcggagacggatatttatatccagaatgtgtatgcgacgctgtatgcatttcgcaatgatccgagggcgagtatcgggcttttgaggacggcactggtgaatacgaggcggctgaataaggcactgcaggacatgcttcataacatgaacaagttttttgcaaaacttttacagcaggattcgtacagcgggattttaagagagcatctggacagctatgtggaagagatcgtgtggaagaagtatcatattctgaagacgtcggataacttttacatttataagatggatattaagaaatgtctgagagagatccgggatgatgaggcatttatcatgaaggtacaggtgcggtcgaagatgcttggagataatcaggatgatgtactggatctgctggatctaatcgagcggggatttgatgatattgagcacagaatcgctaatatggataaggaacatacgaagtacgtccgtgcgacggtaacgaggatgaattatctgttaagcggtgagactgatacgaaaggtctggtggtccagcttctgaataaaatgtcggaagatccggatcagatggaagagatcatcacagagaccggaaagcgcatgaatctgtcgctgctggaaattctgtcggagaaatctttatataagagaagaaaatccagaaaagacttcatcagccagcttcttccggatgagacgacgggagatctggataaggatgatatcttaagactgaaccggatccagatgcggttcagcaagaagcagattgaagaattcatcgagaataatatggaagatgaagtgatggatgcgtcgaagattaatattgctgacgaggaagaatttgaaaaactgattcttgcttatgattacagtacgcgtaagaacagcagatatatggtgctggaagaagaaccggagatggtggaaaaggacggataccggtatccggcattaagattcgtgaagagacgggcgtaa

SEQ ID NO: 42121 - DNA, 645 bp, Dorea longicatena DSM 13814
atgatagattactacgaacagctaacccaggaagaaaaagaagaggtcacagaggtcatccagacactgtaccgtcagacatttctcctggaaagaaaatttgataaacgtgcgggaaggatgcagtatacaaaagaataccgtacctgtacgaagcatctggaattttttaaagcatattttgaggtggctgggatcatactgcgggaaaatgtacatatgggtgtgatctatatccagggagagcagttatggggtgagaagctgccgcgtctggcgacgatctatttactggtgctgaagcttatctatgacgagcagatgcagactgcatcgtcgagcagccatgtggtgacaacacttggtgcagtaaacggaaaagcgggagaatttcatgtattgaagagtcttccgtcaattacggaaatgagacggacgatcgcacttctgaagaagtatcagatcatcgagccgcttgatgttctggaagaattaaacgagtcgacccgcctggtcatctacccttgtatccatacggtacttttaggagacgacatcagggaattattagcgacattcagtgaggaggatcaaattggagacgaagcagccattcaaagcactctcgaagatatgcctgaataa

SEQ ID NO: 42122 - DNA, 3099 bp, Dorea longicatena DSM 13814
atggtgaatatcagtgaaaataatgaatcacagtatttaagaaatcgtaatttttccagtacgatcgtgctggagctgacacagacgaataccagagataaacagtgtgtcggtgttgtgtttgacgtggatacgtcgaataatgacgtaagccgcctgttcttctggcatacgggagaattacttccgaatcattaccgttcggaaggccggtgccttaccactgcggaaatgcgtgagtacctgcagcgttcctttacgccggaacagttctactgcggtccgagcaatgaaagattccggagacagctatacgatatctatcttggcggtctggacatggaaaaatttccaaagctattcaaacgtgcgatctcgttccgtatgaatatcaaactggaagatttcgtaaaggaatatatctgtatggagcaggatatccatattgaggatctgcaggaaagtatcatgcagtatggacgcatgcgcagtaagatcgaggagacgatggaggagatcagaagactgaagctgatctgcggaaaatatgagcagtatgcagaaaaatccgatgaggagaaagtgtgctcttatcagatcgaccgtctggagattatgaaccatgaggtgaagagtcaggaagctagagaccggatcaaggtaaggcaggaagccatcgaagatctgaagaagcagcaacaggtgctggagcaggaagaaaaggacctgcagaaagagtatgaagagatcattctgcggatcgcagacagtgggtatgcaaggctggaatcagatctggatacattaaatgagacgctggagcgtctgaataacggaaaagtccgctgggagcagactgcagagcatctgaaggcatggacggagaaagacattacgccaaatcaggtgatctgggatatcgaaaaattcgcagacggaagcatttccgaagaagagcttgtgcgcctgcaggaaggcttaaaagatctgcaggaggaactggaagaccagagacaggaagcggatgcagaccttcgccggatcaagaaagaagagaaagaggcaagagcagaattaaaagaactgaagcagggaaagaaggcttatccgagagagctggaagaggcgagattcgaactgcgtaaccgcctgcatgagcgctgcggcaagttcgtgaatgtgcatattcttgcggatcttctggatgtgaaggacgagagatggcacaatgcagtggagggttatcttggaaataataaattgcagctgatcgtggaaccaaagtatgccagggctgcgatggacatttaccaggagatggatacaaaacgtttcttccgggcagcagtcctggatacggagaagcttacgaaggataagcatcaggtacagccgggcgcgctggcagaagtagtaaaagcgaaagaagcgtatgtgcaggaatacattaatttcttccttggaaatgtaaagaaatgcgaatcactggatgaactgcgtgagtgcaggatcggtgtgacaccggattgtatgctgtaccagagctacaaactgcagcacatgagtccggagaattacaccagaagagcctacatcggtgagacgagtatgcgccagagaatccgcaagctggaagaaaaatgtgagaagttaaatggcgagagaatgccggtacaggagctgttagaagagatccgccaggcaatgcagatggagatgttgaagcagccggcagaggattatctcggatggctggctgacagcaaggcaatcatttccaaagaaaagaaaaaggctcagcttctggaacagatgcagaagttaaaggatgaatccgttgctgcatgggaaggcaagaagaaagaagtgcaggcggcacaggatgcgaagaaagaatccgtatccaaggtgcaggaaacaatctgggagaacaagaaagaaatcgaacgtctgaatgcagaagttctcgaatcggaagaacagatgaaggacgtgaagagaaaagtagcagataagcgttacgagaaggagttccaggaatatctggcgagcagaaaatccgagaattatgagtatctgagacgtcagatggtttcgcgggtatatacgctcagggaagaagaggaagacgcttaccggaagctggtggaagagagaagcagttatatcagagaatatccgaaccgtacattctcaacttctatccgggacaacgtgccgtatgagaagcttctgaattcactgtcctgcgatcatctggagacttacagggagtcggcgaagacacaggcgaaagcggctgtggagcatttcaaagatgacttcatcttcaagatccggagtgcaatcctggaggcttatcagagaagggatgagctgaaccggatcatcagcaaactggacttcggtaaggataagtatcagttcgtgatcacgaagaacaagggtgcagatggaaaatattataagatgttcatggatgattccctgcagatccgtccgtctgacttagatgatacgatggacaaccagcttgatatgttcacgatggagcatgagaaccagtatggggagatgatgaacgagctgatcaacatcttcatcccgccggagaatgcgacgaaggacgagatggatgaggcgaaacgcaacatggataagtatgcggattaccgaacctatctgtcattcgatatgcagcagatcgtacatggcgataaggagatgacgatcggactgagtaagatgatcaagaagaactccggcggagagggacagaacccgctgtacgtggcacttctggcaagctttgcgcagctttataagatcaatctgtcgccgaagatgcaccggtcaccgacactgcgtctggttgtgttggacgaggcgttctccaagatggatgccgagaaggtggcaagctgtatctcgctgatccgcggacttggcttccaggcgatcatcagtgcgacgaacgataagatccagaactatctggagaatgtagataagactttcgtgtatgcgaacccgaataagagacatatttccattcaggaatttgagaagacggagtttggggagttggcggaggaataa

SEQ ID NO: 42123 - DNA, 1497 bp, Bifidobacterium adolescentis L2-32
atggaacggctccggcccgtgtatgagaccggggtgctgcgattgctgctgcgcggcaattccatgctgtacgtcgcgctgctgcgctccacgttcgacccgctcaccggcgagctgccacgcgagatcgtcgaggaacggttctcccgcagtctgacccgacttgcggaaacgggcgattacacgcccaaggaagggcagacgtccgcggaagccgcgcacacgatcctgcagcagctgacgaaggaaggcgaaggcgactacgcctggctcgccaattcgctcgacgtcgcagcccaccgctacctgtaccgtctcacggcgcgcgcccaccgtgcgatcgaggcgctcgaccggctcgaggacaccacgaaagcgctgtccggcgcgcaggccaacagcatcatcatggagatcgagcatgcgcgcatgcagctgaccgccgacccccgcgaacgcatccgcctgctcgaacgcgacatcgaggagcggcaaaagcagatcgacgaattgaagcacagcgacacgttggacaagctcacctcgcagcaggtcggcgacatcatcggcgtcatccacaacacgctgcgcggcgtgccgatcgacctgcgcgaactggcgctcgaggaacgcgacaacggcgacaatctgcgccgaagcatgcagtcgggctccatcagcgtggagcaggcgctcggcacctaccatgacgaataccacaggtcgttccacgaatccgacagcggccggcgtttcgaggacgcgttccaggtgatcgtcactgacgagggacgccgcgaaatcgacgaggcggtgcgagacatcgcccagaacccgtatctcgagggcgagcccggcatcctgctcgcccaggtacgcgccgaactcaaacgcatctacgagggcatcgaggacgtgcgccggcagatccgcatatccgacgaggcggtgagccgtctggtgcgccagcagaccgacacgcattaccgcaccatgctcgacaagctccacagactgttcgtgcgggccagcgacgacgcgaagacgcaccccggctcggacgaacgcccataccgtacggacaccggcacggcgcaattccaggcattgccgtccaggcccgcgaaatcgatggcgcgcgcggccacggccggattggacgacgcgccttcgacgaacgtcgacgcgccggacctgaaggccatggtcgagatgtgcggcccgcggctgacgcacatgatcggactcatcaggcgcgatccggtcaaaacggcggacggcaggttcgtggatttcgcggcgagcttcaaccggctgccccgggaggaacggcgcgaaagcgagctgatcggcttcctaagcgccctacgcacgcaggacggaccggcaaccgtggcatggcattgcgtatccatcgacggaggcgagcgcgtgtggcgcaccaggccgatcctcaccaccgaggcggcgcttgacgagatcatcgaggagggatga

SEQ ID NO: 42124 - DNA, 846 bp, Bifidobacterium adolescentis L2-32
atgagcatgacggacaacaccgacggattcgacactggcatcggcatcgaagaggagacaggcccggaatccggcatgccgtccgaagggccggatatgacgagggacaggccggcattgttcgacggggatacgggagacatgcctcttgaggcgcgtatggccgcgatcgcgctgaaacgcgaacgttacatcggcggcagcctgtacgacagggcgtgccagtaccgtgaggccgtggaacggtcgttgaacaacgacatgctcagactggtcgacaacacgaaataccggatcatgtacgcgtcgccggtcacggacgcggagacgaacatccgctcgttgaagacgcgtgtgagcctcacccgcgaggaggccgccacgctcgcggccctgcgcatcaaggtgctggagtacgagaaccagaagacgaagccgggcgactggctcatcagcttcgacgacatccgcgcgctgctcgccacgggagcgggcttcctcacggccagcaacgacgaggagggcacggcgaagaagatcacgtccgtcatctcgcgcatgcgcacctacgggtatctcgcggaaacgggggacgagaacatgtacgtgctcacgccattggtgccgatggtgctcgaccagaagctcgccgaccggtggctcggctccgatgatacggacggcgatggtatgaaagacgcggatggcgatggttatgacgattcgtccatcggcgcggatggtggcgatacttccgattcgaccgggacggtttcgtccggcgtcgagcaggacgcgttcgatttcgattcggccgatgacgcttttgatggaggggaacactga

SEQ ID NO: 42125 - DNA, 3459 bp, Bifidobacterium adolescentis L2-32
atggaagacggcatgaaaatcgtttccgaccgttggatgctgcaaagccggcagatcgtcaactggggctcctacggcggctaccacgtgttccgcccgtccatggacgatgcgatgccggtgacactgctcgccggcgcgagcgaatcgggcaaatccacgctcgtcgacgcgcagatctcgctgctctacccatccggcaccccctacaataaggcgtcgaattcgggacgttcggaacgcaacgactacacgtacctgcgcggcatgatcggcatcagcgacggcgaaaacggtgagaccccgatcttcctgcgcggcagggacgcggacggcaccccgcagaacatctggggcgcgatcgtcgacacatacgcgaaccgcagcgacggcggactgttgtcctgcgcaaaattcctctacctgaccgcaggcgacgggccggacggactgcgccgccaatacgtcacctggaaccagaccatcgacccgcgcctcatggaccggcaccgcgacacgtcattcacgcgaggactgatggaacagacctacccaggatgcacgacgcacgtcaacgcgcaggcgttccacgcctccatctggcaggacatgggcctaagcgccgaagcatgcaggctcctgcacaagatccaatccgccgacgcgccctccaaactcgacgacatcttcaaacagggcgtgctcgacgtgcccgaatccatccggctcgcccgcgaaaccgtcgacgactacaaccggttcagcgagaacttccacagcatggaagacaaaatggaacgcgtcgccatcctgcaggacatacaagcccgctacggcgaatacgccaaacaagccagcgaacgccgcgaatacacgcccatcgaccccgaccgcgagcaaggcgagacgacgctcgccgcatggacatggtcgcgcatggccagcgaagtacgcgccggactgccatcggcgcaacgcaaagccaaggaatcccaggacgccatcgaccggtctcagcagcgcatcgacgaactcgacacgcaaatcgaagccgtcaaagaacgcatgaacggcatcgacggcggcagcctgcagcagctcggcaaggacttcgaacgcgcacgccaggacgccgacgaggcgcgcagacaacggcacgccatcgccgaacggttcgaacgcgtcgaaggcagactccccgccgacgagcagacatggaacgccaaacgcgccgcgctcgccttgtcgctcgatacgtacgacaagcgtttggaagacgcgcgatccgaataccagcggatggtggtggaacgtcacgcccggcagggcgaacgcgacctgttgaggcaggattaccggcgcaagatcgaacacaggacgcgcatcagcgacgacatggaccatgcgcgcacgctcatcgcacgggcgactggcttggacgagacggaactgtcgtacgtggccgaactgatggacgtggacgagggggacgagcaatggcgtctggcgatggacgtcacgtacgcgcccatcgcgcagaccattctcgtggacaagcggcatgagcaggggttcgccgcgaaggtcagcgcgatcgatccgacgcgtatgacgcggcgtgcctggcgtttcgtcgataccgacgcgcaatacgattcggcctgcaacgaggggtggatgtcgtcgaagctgcggtacaaggaggattcgccgttcgtcggatggttgaaggagcagaccgcgtcgcaacggttcgacgcgcgttgcgtggaggcgatcgacgacatggaccgggccgaacggcaggtgcaggtcgacgggcagatcaaatccggcgaccgtggattccatggcgtcaaaggcctgcgtcaggtcatcggcttcgtgaacgaacggtatctggccgaattggaacgccagcttgacggggcggaacgggcgttggaggacgccgaccgccgcggcaggcagatggccaacgccatgactctgctgcaggacgagcatgagctcgcattgaccgtcgcggatctgccatggggcaagatcgacgtggacgggctcgagacgaaggcggaacggatccgtctgcagatcgaacggatcgaaagcgatccggaactggcacaattgcaggacgagttgaaacagctgctacggcagaaggacgacgagggcaagaccaggtaccgtgccgaagcggaattggaaaacgcgcagcatgccgtccagaccgaacaggcatggctcgacatgcatggcgactccgatttcgacgatgccgcattgcccgacatggtgtcgaatctgctggccgacacgtatgagacctgtttcgacacgtcgcgtccgcaggaacggccgcagcgcatcgccggcggtttcgaccgtgaggggacggcgccgttcgacgtgcgcgtgctgcgcagaatcggcaacaccgtgcgtgcgagactccagcagatcgacgagcgtgccgtccaattgcgcgccgacacggaacgcgccatgggcgactatctgaagcaccattccacggagggcgacaccgtcatggcgagcgtggaggactatccgtatttccttgacgagctcaagaacctcaacatgctcgtcacccgcgccgcgaccgacgaggagtatgcgaacagcgtcgaaaagctgtatatgagcttccaacagctcaaccgcgcgttcaacaccgacgaggagaacgtcagggagcagctcgaccgcatcaacggcatgctcaaaggccaacagttcggcccccgcggcggcaggctctcgctccacgtggacttccacccgatcgaccggcagttcaaatcctcgttgggccgcatcatgtcgaagctcgacgattggacacgcaacgcgcgcagcaatcccatggagacgcgcaaggcgttcgcaggctgcgaaacgttcatcggcaggctccaggcggaactcggccagatccgcgacacgaacggcatcaaggaatacggtgcgcgcaacctcgatccgcgcgtgcgcagctcgttctacgcgatcgtgcaccataacgatctgcccgacgagcgcatcagctccaccggcggcaagtccggcggcgcgttgcaggaactcacctcgttcgtctacggcgcggccctgatctacctgctcggcggcgacctgaccggcaagcccacctacaccacactgttcctggacgaagccctcatcaaagccgacggacgctacacgaaacgcgccctgaccgtgctgccgcgcctcggcttccagatcatcgtatccgcgccggaaagcaaaaccgccgagatcctcagcatcgcagacaaagcgtacgtggcatacaaggatcccgcaaccggcaactcgtacctgcaggagctcgaccgcgagccggcaacgcaagccgaaacacaagacgccaccgtcgagcagacgcaacccgcgacggaggcataa

SEQ ID NO: 42126 - DNA, 1233 bp, Bifidobacterium adolescentis L2-32
atggcagcggccagaaacaccacaggcgaaacggacatccgccggaaactcgacgaatacgtcgacgcccacctcaccaggcacatgtacgacaccgacgaatcctggccgctgcgcaaaaccatccgactgcccaaacaagccgaactggagcagcactacaaccaaatccgcgcccaaaacgaaaccatccgcgactgggcgcggcaacaccactgcgaaaccagcgaaaaaaccaaaatcgtctccagcggactcatccaacaaaaaagcccgctcatcgactccgtgaccatacccgacctcgacaccgccctccgcatcgccaccaaacaaacccgcgaacgctacctacgcgaacacgaccgcatgagcgcgctcgccaaagaattcggcctcgaaccggcgaacgccatgaacgtcgccaaaaccctcaaagaccacgacgacaccgacttccacctcgtcatccaagccgcccactacttcgcaaaccacgactgccacaccatgaccccacgcatggcgcccatcccaggattcagcgccaaatggctcggcacacccaactcccaacgccgcaaagcgatacgccagctcaccagacaagacaacctcaccttccaggaacgcccgaacgaactccgactacgcctcatggacgccgaacaccacgaccaacccgacctcatcgtcacccaaccatgggtccgcaaccagccaaccgacatcgaacacgccatcatcatcgaaaacaaagacacctaccaggccatgcccaccgtcgaacacgccatctgcatcctcggcaacggatacgccgcaacatcacacatcacaacactcctgccatggctcaccaccatccccaacatcatctactggggcgacatggacgccaacggactcgacatcctctccaaactacgcgccaccggcatcccatgcacatccatactgatggacaccaccgcataccggacatacgaacaatacggcacccaactcgacgccaaaaacaaacccctcaccacacaaaccccacaacccacacccggactcaccaccgaagaacgcaaactctacgaaacactctgcacaggaacagacatccaatacctacgcatcgaacaggaacgcatccccatacgcgacgccacaaccatcctgcacgaccaacaccactggccaatcgacatacccggcaacgacataccaaacaacaccaaatag

SEQ ID NO: 42127 - DNA, 1362 bp, Anaerostipes caccae DSM 14662
atgagatttggttacgatatcccggattctttttggagcctgttccgttctgtaaaccgggatcattacatagaagcgctgctgaaaatcagtgaagaatatgaatataacaactattttctgagccgggaggtctgtattcaggtcctaagcgactggaatgcggacaagcgcatctggcttcagcgggaagagtttgaatcagaactggacgtactggagactcccccaaaccggatactaaactggctgatccggaccggatggctgaaaaaactggatgacttttctacgctgacatccaacattgtcattcctgattacgcggcagttttcctggatgcttttgaacagctcgtgaatccgcagatggaagacacggagatttatatccaaaatgtatatgcaacactgttctcctttcaaaacgataaaagaatcaacctagggatgctgaaaacagccctgatcaatacaaaaaaactgaacaaggcacttcaggatctgctccacaacatggacaaatttttcggacgcctgctgaaacagcagtcttacggcgatgtcctggcggaacatttagaaggatatgtggaagagatcgtcaagaaaaagtaccatatgctaaagaccaacgacaatttctatctctacaaaatggatattaaaaaatgtcttcaggaaatgtgggaggacgcagagtggatcgagagagtccgggccaaggcaagagcagagggcagggatgaaaaggaagatgtgcttgatattctggatgccatcgagagaggttttgacgacatcgagcaccggatcgctaacatggacaaagaacattccaaatatgtgcgcgccacagtcacaaggctcaactacatgctcagcggcgaggcagatatgaaaggaatggtagtcagtcttttaaagcacttagaaatcgacgaaaagagggaagaacggctttcaaaagtggcggaaaaaatgaacctgtcacgtctggaagtcctgtcggaaaaatctctttacagaagaaagaaaaggagagactttatcagccggttagagccggatgaagatgtgcgggaacttaccagggaagaagtattgagactcaataagatccatacacgttacagtaaaaaagaaatcgaggagtttctggaaagccatatggaagacggatccatggaaatgagagatgtcaatatcggcgacgatgagtcgtttgaaaagctgatcctggcctatgactactgtaccaggaaaaacagccggtatcaggtgatcgagagggaaaataagatgctggaaaatggaaaataccgttatccggatctgttgtttgtgaggagaaagtcatga

SEQ ID NO: 42128 - DNA, 657 bp, Anaerostipes caccae DSM 14662
atgattgaatactatgaacagctgagcgatgaggagaaggatgatgtaaagcgtgtcatccagattttgttccggcagacctttgtgctggaacggaaatacgaaaagaggaccggaagatttgctttccagaaggattacaggatcttaaatcagcacctggaatttttaagggagtatttttcgattgccgggctggaacttcgggataacagtcatatgggagttttttatatccagggggagaccgtcctgggagaaaagctgcccagactggctactatttatctgctgatcttaaagctgatctacgatgagcagatggaaacagcgtctgcaagcagctatgtgtatacgtcgctgggagaaatcaatgaaaagatcggagattttgccttgcttaagaacctgtcttctgcgacagagatgaggaagacgatttctctgctcaaaaaataccagattatcgagccgatggacgtactcgaagaccttaatgaggagagccgcatggtggtgtatccgtgtatcaacgcggttcttctcggtgctgatgtacagaaattgatagaaacatttacggaggaggacgaacgtggagaagaagacggagagcaaacaggcattcaaagcactatcgaagatctgtctgaataa

SEQ ID NO: 42129 - DNA, 3384 bp, Anaerostipes caccae DSM 14662
gtggagaagaagacggagagcaaacaggcattcaaagcactatcgaagatctgtctgaataactggcattatattgaacggaaagtgctttctttcagtgaagggatcaatttctttaccggacattccggcagcggaaaatctacggtcatcgacgcccttcagatcgttctgtacgccaacacggacggaaggggatttttcaacaaggcggcggccgatgactcggaccggagcctgatcgaatatttgagaggcatgatttcggtgggagacaataatgagggaaaatatatcagaaaccgaaatttttctacaacgatcgtgctggaacttgagcagacggttaccggagcaaaggagtgtgtcggagtcgtttttgacgtggagactgccaccaatgagatttccaggctgtttttctggcataaaggaggaatccttgaaaaccgctaccgaaaagaagaccgtgccatggcaacaacagaggtgagagattacataaaggaacattttccgaaagaagaattttatttcggttccagcaatgagaggtttcggaggcagctctacgacatctatctgggaggactggacgcggagaaatttccgagacttttcaagcgggcgatcccgtttaaaatgaatattaagctggaagattttgtgcgggaatacatctgtatggaacaggatatccagatcgaagatatgcaggaaagtgttcttcagtacggcaggatgcgcaggaagatcgaagatacgctgaaggagatcggcagtttaaagcagataggaaccggttacgaccggttttccagggcagagcaggaggttcgggtctgtcagtacctgatggaaaagctcgtaatgctccagctgaaagaacagatcagagacctgcacgaaaaaatagagaaggcaggggaagataagaagacccaggagaagaacagaaaggaactgtctggccagcttgcagatctcgcagaggaatatgaccgtctggtaaagcagatcgcaaatagcggctacgagaatttaaaaacagaactgcagggtgtcaatgaactcttggatcagctgcaaaaaagcagggccgcatggcagcagacgtccacagggctgagccggtgggcagaactggacgtgacaccgaatcagaccatatgggatattgaaagcttttccaagggagatatcagtctcggagaactgcgcagactccggcacagtttaaaggaaatccgggaagaagtggaaaacgaccggcaggatgcggcctcagaactgagaaggctcaagaagcgggaaaaggaaatcgacggggagctgaaagaactgaaaaaagggaataaggcttatcccagagaactggaaaatgcccggtatgagcttcagaaccgtttgagttctaagttccaagtagcggtaaaggtacatattctctcagatcttctggacatgaagtcggagacatggcataaagccgtggaagggtatttaggatcaaataaactttcgctggtcgtggagccggattatgccaaggcggccatggagatctatggggaaatggatgaaaagcagtttttcagagcctccattttagacacagaaaagatcctgaaagaaaagccgtccgtcatggatcacgcactggcagaggaagtgattgccaaggagccgtatgtcagaaatttcgtggacctgcttctcggaagggtgatcaaatgccaaaccattgaagaactgaggaatcagaggaccggagtgactcctgactgtctgctctacaagaattttcagctgaaacggctgaatccggcggattatacgaagcgttcctatatcggtgagagcagtgtgaaacagagaatcagagatctgaaggaagagttcaaacagctttcggccaaaaaagaaccgtttgccaggatgctggcagaagcggaagatattttgagactggaagctctggggcgttctgaggaagaatatatagaacagcaggaagccttaaagaaaataagagagaaaacggcgcttaaaagagatcttcaggatcagatgatgaagatgaaggaagaatccatcggtgaactggaagaaagacagagagagaataagaggcttcaggcacagaaacaggaactgttaaatgaagtttcaagagccgtctggaacagggaaaaacagatcgaggactggcagaggctctatgtttccgcaaacagtgagctgacggaacaggagagaagtttttgtcgcagcgaagaactggaaaaagcctttgatgactatatgcaggggcggatgccgtcaaatcttgaaagccttaaaaacgggacattcaggaagatcaaacaggcggagaacagcagggaagaagcttacagatcacttgtagaactgcgctccgaatatttgagggagtatccgaaccggacattctcgccggccattgagaccaatgagccatatgaagagctgctgcagaagcttgaatgtgaccatcttgcggattatcaggagagggcaagagaacaggcaaggtcagcggccgagcattttaaggacgattttatatccaagatcaggtatgccatattggaagcatatcagagaagggacgaattaaaccggatcatcagccggctggacttcggaaaagataagtatcagttccgcatcacgaaaaacaagggccctgatggtgtttactatccgatgtttatggatgaatcgcttcagatcgatccgtccactctggatgcatccatggatcaccagatgaatctgttttccatggagcatgaaaaccgctacggagaggtcatgagtgacctgatcgatattttcatacctccggagaatgcatccccggaagaactggaagaggccaagcggaacatggaaaaatacgcggattacaggacctatctgtctttcgatatggaacagatcgtggagggggaagaaaagctgaccatcggtcttggcaggatgatcaagaaaaattcgggaggggaagggcagaatcccctctatgtagcccttttggcgagctttgcccaggcctaccggatcaatctgtcgccaaagttaaggagaagccctacgatccggctggttgtccttgacgaagccttttccaagatggatgcggagaaggtagccagctgtattgaactgatccgtggactcggattccaggctatcataagcgccaccaatgataagatacagaattatttggaaaacgtagacaagacctttgtctatgccaatccgaataaaaaaagtatttctatacaggagtttgaaaaacgggaatttgatcatctgatggaggaagcagaggatgaagaaggaactgcttaa

SEQ ID NO: 42130 - DNA, 1212 bp, Anaerostipes caccae DSM 14662
atgaagaaggaactgcttaaaatgatcatcgaaaagactgagaagtctgcatcggactggaagaagggagcggaaggaaaccgttcctttctggttcaccaggaactatatgatcagatcggaaaaacagagtttataaatgcagccagagaacttgagtgtcagggcctgttgaaaattgagtgggaagccgtaggggtggatatacgaaggatacgctattctttaaaggatcttgcgctcatatatgaaatgtccggtatccggccgaagtttcaggtgatggaagaaaatatggcggctgttgaaaaccttcttcattcggtcaaaggactgtggataaaagattatttaagggactgtatgaaacggttagagcagggcaaaatcccgtcagaattttcaaaacgggaagagctgtttcgatgtcttaaagggatcgatggattgaaggagccgctgtataaaagggttttcagcaaatattgtctgggcgattccaagctttttgagaaaaaactggaaagcactgtgctatctatagccagaaaatatcatacagatatagaggaaggtatggatcatacgcaggtcctttcccagcttttcattgaagaatattcacaggagcttgcgttaaaagggccgctgcgaatttcagtggacggacaggaaataaatttgggacaatttcgttacggcgcagtcttaaattcacagatgctggtccatgcaaaaccccagtcgggtcaaaacataaagagaatcctgaccatagaaaataaagcaaactatatggcagcaccctatgatgaagaagccgtcatcatttacagccatgggttttttacaccgaaagaaagggagtttctcatcaatctgcgggagagtctttgtgcagagacagaatgcttccattctggagatttggattacggaggtatcctgatctaccggtatatcaaacaaaaaatatttccggatctcatgccctgtcaaatggatgaggaaatctatcataaatatgaaaagtatgcggtggaaatggaacctgagactttaaaaaaattaaaaaagttgaggatggacgaaattcctgaactaatggagatgaaagaacttttggtcagagaaggaaaaggtctggaacaggaaagttttttactggcatccggtgaaccacaggaaaatgcggaacttagatgccggtaa

SEQ ID NO: 42131 - DNA, 1383 bp, Clostridium bolteae ATCC BAA-613
atgatactgatgaatgaaataccagaccggttctggagcctgttccgctctgtcaaccggtctacttacatagaggcacttcttaaaatcaacgaggagtatgagtacagcaattactttctcagcagggaagtctgcatccagcttttaagtgaatatttctcccagaaaaaatatgtcatatggcaggacgagaccgaggatgactgggatgaactggaaccgcctgccaccagggttcttaactggctcctgaggaccggctggctccgcaaggtggatgattacgccagcatgacggtcaacatcgtcattccggattacgccgcggtgatgattgaggcattttcacgtttattaggcgatgatgaggatgagacccaggtttatatccagaatgtctatgccattctattttctctgaaaaacgacccccgctccagcgtcagcctgctaaatacggctctcataaatacgaaaaaactgaacaagtcccttcaggacatgctgcacaatatggataagttctttggcagcctgctggaacaaaaaaattacgggaccctgttaaaggagcacctggaaggatacgtgacggaaatcgtcaataaaaaatatcatatattaaagacctcggacaatttttatctctacaagacagatattaaatcctggatagccgccatgcgggaggacagttcctggataaataaaatgtgcgcaaaaagcgcggcttcagccagaggccagaaaaaggcccccctgacagaatacgatattgtggagaagctggaccagctggagcgcgggttcgatgatatagaacaccgcatctccaacatggacaaggagcactcccgttatgtcaaggcaaccgtcacacgcctcaactacctgttaaaccaggaggacaacatgaaggggcttgtaatcaggcttttaaaccatctttcggaatacggctgcccggaagaggagctggcatctgtaagcgccaggatgaacctgtcccagatgaccatattgtcagaaaaatccctgtacaaacggcgtaagaccaaggcagactttacagaacagttaaaggatgaggaagaatccgaggaactgtccatggaggaagttctgaacctgaacaaggtcaggaaccgttacagccagaaggagattgaagcctttatagaaggcagcatgacagagggaaaaatggtggtggacgaacaaaccatacattcggaccaggactttgaaaaactgatactggcctatgactattccaccaggagaaagagtccttataaggtggaagaggaagattcggaaatggtgcactgcaaaggctatacctatccgcggctggtatttgtcaggagggcaagatag

SEQ ID NO: 42132 - DNA, 834 bp, Clostridium bolteae ATCC BAA-613
gtggaaaacatggaattggaaaacagcatgacagacatcgcgccggcggccggatacaccggaaacggcgttccttactacgacaatctgatgcagtcggagcagatggaagtgacggaaatcatccgtctcctgtggcgccagacctttatactggaacacaaatatgacaagcgcaccggaagattccagtacaacagagattaccgggtatgcagcaaacacctggaatttatgaagaattattttgccatcagcggagtggagctgcgcgaaaacagccagatgggcgtcatgtacatccagggtgaaactgtggtgggagacaagctgccccgcctggccaccctgtatctgctggtgctgaagctgatatacgatgaacagatggaaagcgtttccaccagtgtcaatgtctatacatctctgcgggaaatccacgaaaagctgggcaattacaggctgttcaagaagcagcccgctcccacggaaatccgccgggcagtgaccctcctgaaaaaataccaggttatagaacctttggatctgctggaggacttaaaaagcgaaagccgcatgattatatatccctgcatcaacgtagtgctcatgggagacgatgtgcgctgccttctttcctcctttgaggatgattcggatgaaagcggagtccagttgaaagctgatttggaggaggaagaaccggacgccacggacggaatgacggaggacggaatggcggaggatgagatgacgcaggatgaaatgacagaggatgaaatgacagaggatgaaatggcatcagaggaaggagaaccatggaacagaaaatag

SEQ ID NO: 42133 - DNA, 3393 bp, Clostridium bolteae ATCC BAA-613
atggaacagaaaatagcaaacgatcgttttctcgccctttccaggatatgtttgaataactggcactatataaccaaaaggaccctgtcctttaatgatgaaattaatttttttaccggacattcgggcagcggcaagtccacggttatagacgccatgcagattgtgctctatgccaatacggacggcaggggcttcttcaacaaggcggctgccgatgactctgaccgcagcctgattgaatacttaagaggtatggtaaatatcggtgaaaacaacgagttttcctatctgcgcaaccagaatttttcctctaccattgtgttggaactgaaacgaagcgatacgggccagtgccagtgcgtgggaattgtctttgatgtggagacagccaccaatgagatatcccgccgtttcttctggcacaaaggacccatgtgggacaatggctacaggggcgggaaacggaccatgtccatcgtggaaatagaagactatcttcaggcgaattacagccgggaggattatttcctgacctcccacaacgagcgattccgccgcatactctacgattcctacctggggggcctggactctgaaaaattcccccttctcttcaagcgggccatcccattcagaatgaacatcaaactggaggattttgtaaaagaatatatctgcatggagcaggacatccatatcgaggacatgcaggaaagtgttatgcagtacggccgcatgagaaagaaaatagaggacacatgtgcggaaatccaatccttaaaacagattgaggacagattcctaacctatgctgacaaggaacagcagatcgaaaaatgttcctactttgtgcagaaactggagattctgcagcttcagtcagaggtccgtaccctggctgacagggcaaagctggcaggagaggacctgaaaaagcaggttcaggccagaagttcagtggacgaacagattggcgagctgacccggcagagcgacgagctgctgcgccgtattgcctccacagggtatgaggagctgaaaagccagcttaagagcctgaatgaactgttggaacagctgggaaaaagcgaatccaggtggcagcagaccgcaaccgccttaaagcgctgggaggaagaggacatcacctccaaccagaccctttgggatatggaggaatttgaaaaccgcaccattgacctggagacattggaacgactgaaaaaaaacatggtatccatgcgtacagatacggaaaaacagcatcaggaagctgctgccgctgtcagagagctcaaaaagcaggaaaagcagacaagagatgaactggaaaaacttcgttccggcagcaaagcctatcccaaatacctggaaaatgccaggagctacatccagcgccgccttctggagaaaactggtaagagcgtggatgtgcatgtgctggctgatctgctggacgtaaagagagatgagtggcgcaacgcggtggagggctatctgggaaacaataaattaaatctggtggtatctcctaaatacgccagagccgccctggaaatctacggggaactggataaaaaggaatacttcaatgtggctgtgctggatacggaaaaggcatcccagaaccagccccaggtacaaaaaggcgccctctcagaggaagtgactgtgagggagtcctacttaaaaccttatatagacctgctgcttggaaaggtcatcaagtgcaataccatagatgaattaagggaatgccgtatcggcatcaccagcggctgcatgctctaccacaccttccgcctgcagcacatcaacccggataactacactaaatttgcctatatcggcaaggacagcgtcaggaggcgtatccgtcttctggagcaggaactggcgagcctggaggaaaagaaaaagcctttggaggaaacggccagggagtcccttagaatcctggccctcccctggctctcagccgaacccacggaatacatggactggctgaatgacataaacagctacaaagccaaggagcgtgaaaagaaaaaactgatacagaagctggagcttttaaaggagcaaaatgtagaccagttagaacgggaccgccaggcggttatcacgctctgcgacggcaaaaagagggagagggacagcctgaatgtgctgatccgtgacaaagagcgtgagatagaagggtgccggaataagtccattgacagccagtcccttctcacgtcaaaggaacgggagttaaagcagaatcctgactatgacaacgaactgtcagcctatctgccctccagggatacggtgcgctatgacagggaaaaagaaaccttcattgccaggtgcagcaaactgtctgaggccagggaagcagcttttcaggagcttctggccgtcaggaccagctatatcaggacttaccccaaccgcaatttcacggtaaacgccagagataacgctgcctatgaccgccttttaagcgacctgaaatgcgataatctggaagaatacaagcagaaagccacgcagcaggccaaatccgcggtagaacatttccgggatgactttatgtataaaatccgcagcgcaatccgggaggccctgatacgcaaggatgagctgaaccgcatcatcagccgcctggatttcggaaaggacaaataccagtttgttatcggccgcaacaaaggacctgacgggcgtttctacgatatgtttatggatgattcactggacatcaatccggccgacctcaattattcctatgaaaaccagatggacctgtttaccatagagcatgaaaaacagtatggggatttgatgaatgaactcatcagtattttcattcccccggaaaacgccaccccggagcagatggacgaggccaggcggaatatggataagtattcagattaccgcacctacctgtcctttgacatgcagcagcttatacagaatgaagacgaggtaatcaaaatacggctgagcaaaatgattaagaagaattcaggcggagaaggccagaacccgctgtatgtggctcttctggccagctttgcccaggcctaccgcatcaatctgccctccaaggtggagcgcaatccaaccatacgtctggtggtgctggacgaagcattttccaagatggatggggagaaggtggccagctgtattgaactcatccgcggccttgggttccaggccatcatcagcgccaccaatgacaaaatccagaactacgtggaaaacgtggacaagacctttgtctttgcaaaccccaacaaaaagtccatatccatccaggaatttgaacgggagcgctttgttgagctgatgcaggatatagaagatggggatgaatttgcggatacgttataa

SEQ ID NO: 42134 - DNA, 1179 bp, Clostridium bolteae ATCC BAA-613
atgaatgcaccgctggaatgtattatccaaaaatacgagaagagtactgtggactggaagaaaggtatgagcggaaaacgctctgtcatattcagggaacaggattttaaagagacaggaaaacgggactttatgaaccagcttatggaactggaaatggaagggctggtgaaggtcaaatggtatcagtacggtatcgaagcggagaaggcgtggtacagcctggaacagatggagactatataccaacgactgggaaaaataccgaagttcaagcgtatcaataaactgaaagaagaggtggaccaacagcttgctttgatacaaagccagtggatacgcagctattaccaatcctttctccaaagtctggataaaggagatgttcccaaagcactggataccccaaaacgggaactgctgtttacttgtttcaaggccatagattgtctacaggaaccagtctacaaaaggattttcagtaaaaaatatctgggtaaatccaaggcatttgaaaaacatctgcaatccaaagtcttatctgctgcgagggcttatctggacacggtaaatgatgacatggatgaccggcaggtactggatcagctgatgattaacggctatgcccaagagttagccgtgaaaggaaacctgattattgaactggcaggaaacaagataaatctttccctgtttcccagtggatttgtctttaataatcagacgctcagaagcgcatctatcccaccagagcagtccatttcaaaggtgattacagtggaaaataaagcgaattatgaaagcatgccctatgaggaagggactctaatcatatattcacacggatacttttctccggatgagcgtgcgtttctgattcagctggaacgggttttgtccggcattcatacttcctgtgggacggcctatctccacacaggcgacttggattatggtggagttaagatatttcaatatattaagaaacgcattttcccgaaactgtatccataccttatggatacacaaacgtatgatcagtatatggcctacggtgaacctatagaaaccagtaaactggaaaaactccagcggacagccgaaccgctccttcagcccctcatagacaaaatctgcgctgaaaaacaggtgatagagcaggaatccttcctgttttga

SEQ ID NO: 42135 - DNA, 1401 bp, Faecalibacterium prausnitzii M21/2
atgaagtttttcgaagtggttcccagtgaacttttctcgccgttggcttcgcccaaccgtattttatatgcggatgcactggacgtactgtacgcagcataccaagaaaacttgaaaatacgggaagatgtcttgtattcaatgctgcgcggcaggctggagcaggaactggcggatgctacgtttgaagatgaagacattgacgaagaggaactgagggatatctctggccgcgctcgttttttgatccgcaagctgtgtagtaaggggtggtttgagaaagaacgcggggacgactttgaagagtacatcacgattcctaattacagcagtcgcctgctagaactatttcatcaactcagggatgatagtccggctcgtggatattcctatgtgttcggaactttctcagtcttaaagaccgccgacgacagcaacaatgcttacgataaaatgacggctctctatagtgcctacgataacacaacggcgctgattagcttgttgcaaatggtctatcataatgtgaagcattattttcagacgcagatcgatatgcaggatgtcaaccaagtgctggctgcacactttaacgacttcggacaaaaggttgtggaggcatatatccgtccgctgaaaatcaaagattcagtgccgaagtatcgtgtgcccattcagtctgtgcttaggcgctgggaagaggatgataccttgctgatggcgatggcaaatgaagcattgcgtgataagcggggcaagacattggaagactgccgtgccgatctgctgaggaaaattttctggatcgaagaacgctatgacaatttagaaaaggactatcttgaggaaattgatacgcaggtccggcgctatactagggcagcaacacagaaaatcgagaacctgacgaaccgagatcaaagcgtgcgcggcaatttgaatgttttgctgacggcactgtccagaaaccgcagggcggctgagctggtggaccagatacaactggcatttcaattgtatgagcagtcttttttgtcagaaaaaagtctgtggtaccgtaagcgccccgaaaaacggacaaaaaccgcgtcggtgctgatacaagatgatcaggcaccgaatacggaagaacaggtcagagcggcacagttactgcaatcgaaatatggccgggcagcagtaaatgcttacgtgcagggatggctgggagacgctgacattcgttgctcggaggagctctcgcttgaagaggacaaggattatatcatgagtttactggcaatccttggaagcaaggatgcatctgccggttatgtggtccaggaactcgatggcattttttgcaaaaatggctattcgatcccgcaaatgcagatccggaggaaggagaagaagccgtga

SEQ ID NO: 42136 - DNA, 648 bp, Faecalibacterium prausnitzii M21/2
gtgaattttgattttgttaccaatgcaacggcaaaagaactggaacagttcaaatctgtctgcaatcagctgctcagccgcacatacattgtgcgaaccatctaccagccgggaaaaggcagggtggataacccagactatctttttctatcacggcactatgaggctgtacaggagtacctgagcctgctggactgggatttgcgcagggatgaactgaacggatacttttatgtgttgaacacagacgaggctaaccgttgcaaccttaataaaaaagaaacggcgattttgctggcattacggctgatctacgaagaaaatatggagcgtttgggcttggagcaggatgccgtgtgtactgtgcgggatgtgctggaaaaagtggtgaccgactatcccgtttttccggctaagccgaatatggaagaggtcaaacgcgcgtttacggtactggaaaaccattctgtgattcaaagactggaaggaaaattcaaccagggcagctgcaggatcgcaatattgcccaccattctctctgcggtctccagcgaaaagctgaacttggtggtgtctgttttgaaaaaggaggaaacagatgaagaagctgaagaagatcctgctgatcaactggctctatttcagtaa

SEQ ID NO: 42137 - DNA, 3384 bp, Faecalibacterium prausnitzii M21/2
atgaagaagctgaagaagatcctgctgatcaactggctctatttcagtaaggaactgattgaagtgggcgacatcaattttctgacaggcaagaacggcgccggaaagtcaacggtcatcgatgcactgcagatcgtactgctgggcgagaccaacgcccgcaactttaatcaggcggccaacgaaaaatcgcagcgcacactggaaggctatctgcgcgccgacatggatgataacagcccgtattcccgtcgtggtaaggacttttctacctatattgtctgcgaatttcaggatgagatggagggcagcagctttgtgacgggcgttacctttgactgccgcagcgatggaagttaccgtgatacattctttatttacacggggacactgccggaaaattgctttattgaacagggcgaggcaatggagacttctgcacttcgccgttttttgaagcagaactatgcacgggcagaattttacgatacccaaaaagagtatcgccgcaacatgcttgcaaagtggaacgtccacaacgagcaggtcttacggatgatgaagaaggctgtttcgttccggccaattgtggatatccaaaaatttattacggagaacatctgcgatattccggataaacccaatattgagctgatgcagcaaaacatccgggattataaacggcacgaattgctggcgcagcgtcagcaggaaaagctggatgcgctgcagcaaatcagcaggctgtatcaggagatgaaccaagccatagaccgctgccagatccagaagtttctggtacggtgggccgaaaaagaagctgcacagacagagatcgaccagagggaattggaacgaactgaatgcaaggagaaccttgcaaatgtgaatgagcaacgggaggagcttgagcagcagatcgaacagaaagaaacgcgccgcagtgagctggagctggcctgcaggcaaagcaacgttttccaggaggaagagcgtctgctcaacatggaaaaggctctgagagatgagcagaaaaagctggaacagggtctgcaaaatcttgaagtggagattaagcgggaagcacggcatttgcagagattctgtggggagatacaagaactggaaccggaagaacttctcataccggtgcaggaagcggcgaacactgtgcagaaagcatatgctgtatttactggtgacgagaagggattgtttgcccggcctgtggagttgtttgaaacggggcagcaggcagcggccgaattgtcggatgctgtccgcagtgcggctcataaaacagaggatcgtattgcagagctgaagaagcaagccgaccagaaaagtgcggtgcttgcaaatctgcgtaggaacatcaaagattatccccatgggcttctgctattcaaagaccggctggaaaaggatctggcggataaaacggggcatgcggttcccgtttatattctggctgatgtgctggaaatggcagatgagcgctggcgtggagcggtagaaggctacctaaataaccagaaatattatctgctggtggaaccgggacgttatcaggatgcacttaacatttacgaccggctgaagcaggaagcagagtaccgtgcgtttggtctggtagatatcggaaaactgcgggaaaaagaaacacttcgaccgctgcccggcagtctggcagaaaaggtggagacagaaaacaagctggcacgcagctatgtggactatcttctgggtcgggtgatatgctgcgacacggcagaacagttgcgctgctataagacggcaattacggcagagggaatgctgtatcagggctatgtggcccgcgcacttcggaagggctggatggaagacgccttcatcgggcggcgtgcggtgcagctccgcatcgaacatctggaaaaggaactggcctgtctgcaggaagagctgcggcattggcagccgctccagaagcagctgaccggcctgaaggagccgctttttacccaaagattcgtccgaatcgatgtggcgcaaaagcaggaggactaccagcgcgtccagatgatcatcaaggaaatcgcagaagtcaaaaatcagctttctcagctgaatttgttctggttggatgagcagcggcgcatcattgaacagttgaaagaagaaatccttgcattcaataaggaaaaagatgcgaaaaatgtgcaaaaagggaagttggaaagccgcatccatcagttggaatatgagatcttgccggaaaaataccaacggtatgaggccatcgaagatgttttgaacgaggagttcacgaaggaataccgagaaaccatcggcgttccccgctatcggcaggagcttgtccgcttgaaaaaagcagatgtcatccgcaagaactttggcgacagtttggcgcagagcacaaaggcgatggacggggctcagaagaaactgtttgcagcacgcagagaatatgcagaacggttcaaaccctgtgcattccagatcgaggtgatggataacaccgaatacgaggaagaacggcgtactctgcaggaaagcgagctgccccgatataaagaaaaaattcgggcggcacgggaaagcgcaatggagcaattccagaacgatttccttgccaaactgaaatctagcatcgaccaggtgcaagaacaggtgcacaatctgaacaaggccctgcgccaggcacaatttggcacagacaagtaccaattccgtgtagggccaaacccggattatctggattactataacatgatcacggcagatgaactgatggaaggcgaatccggtctatttgcactgccctttcagcaaaaatacggcccattgatcgaaaaactgttcagccagatcacaatggcagacgatacgcagatcaatgcccgtaaacagagcgaactgcaggagaatatcgtccgctatacagacttccggacgtatctgaagtttgatttggaaacgaccgatcagaacggttccaagcagctgctttctcaaacactgaatatgaagtccggtggcgaaacacaaacgccattctatattgcggtgctggcctcgtttgcccagctgtaccgcgtcaacgatgctacccgttttggtaatacggtgcgtctggtggtgttcgatgaagctttcaataaaatggatagtgaccggatcacggagagtgtactccttctccgaaagatgggactgcaggcgatcatctgtacgccgccggataaggtctcggacattatgcccattgcagaccgtacattattagtggacaaatccggataccggatgcatatcattccatttggaaaggagatgcagaatgaaggaagcacaggtgatcctgaatcgtctgctggataa

SEQ ID NO: 42138 - DNA, 1239 bp, Faecalibacterium prausnitzii M21/2
atgaaggaagcacaggtgatcctgaatcgtctgctggataagtttgaaaacagtaagcatctttctgaacccaacacatccagacgtcgggtaatgctgagcattgataaaagggagttgccggagtatcaatacgaagatgcggtggttcgggatgcttacaatattgcagcgcgggagctggagcagcaggctttggtgcgtctggaatgggcgagaaagcagagcgttctctcctgcattgtgctggatctggaacgggtcgcacagtgctatgaatgcgccgacagagtgcatccgcgaaaaaaggcagaagaggttgcaaacatcatcatgcagaagctggcagacaatcccgttccatggatcgcggcatggagggatgctgtatgtgctcaggtgcggaacagcatgaaagtgccgacgtattgcagggaaaacgacggtctgctgcaggagcttttgctcacgtttcaacggtatgcggagctgtccggcagtgtgacgatgcgtgcattcagcagccagtgttttcacgataccaagtattttgagcgaaatgtacgggagctgtttcttaccattgcacgaaagtacaatacccaactggcggcggcctgtacagaagcggaacttggtgagcgggatcagcttgcatttctgggaatctatgcccgcccggagctttacgaactctcgggcgattgcgcaatctgcttgaagaagggagaactacggctcagcgcaacagaaccttatggattggctttgcccagtacacttgtgtcagagattgtggacattgaactaaaaaacatctgctgcattacctttatcgaaaataaaacgaactatgatgaatatttgctggcggaaaaacagccggaagaacttgttgtttatcacggcggctttctgagcccgcggaagaaaaaactttttgaaaaactggctgctgcggcaggggaaactatgcaaattcgattctgggcggatattgatctgggcggtttttgtatgtttgaaaacctgcaaacggtgtttccacagcttgaacccatgcgtatggaagggcgctttgtggaacagtaccacaaaaatggcctgaagcggccggagcagtatctgaagaagctgaaggaagagcggaatgcgggaagacatacgctgtttgttgatgcaattgataagattttgcaatatggggtcacaatcgaacaagaaacatttctggagtag

SEQ ID NO: 42139 - DNA, 1431 bp, Faecalibacterium prausnitzii M21/2
atgcagctgtttgaactggtcagcccacggctgttccgcccgctggcggggcccaaccgggcgttttatgcagagcttttgctgctgctctgggaggagtgccgccatacggcagattacagcatttcccgcgccgaagccgtctcccgcgccgaggattattttgccgcgctggcaaagccgctggcgctggacgccgatggcgcgggcgatgaggacgagcagcccacccgcgacccccacacgctggcggtgggctttttgctgcgtctgcgccgcaccggctggctggaagagcagcccggcagttatgagagcgagccgacccttgcctttatgccggaggtcaccccgctgctggacgcgctggaagaaatactgaacccccgggtggtcacctacaccggcaagctgtataaggcgtggcagctgctgggcagcatcgggcaggaaaaaagcccctacgagaacgtgctgcgggaggtggcggcagaccttgagacgttgaacaagtccctgcgcgccctcaacgcttccatcgggcattatatcgaccgcctgacccataaccgcaccccgcaggaggtgctggaactgttcgaccagtacgaagaaaaagttgtggcggcggcgtaccaccgctttaaaacaagcgataacctgttcaattaccgcgcctatctggaagaagaactggacgactgcgagcagaaccagctgccgcgcttagcgctggattacgcccgggtggagcgctgcgcccccggcgaggctgcaccccgggtgcgtgcccttatccagcagcagcgggacgcgctggaagagatgagcaccctgatgaaggaaattgacgccagccacatccgctaccgcaagcgggcggtgcagcgggcacagtttttgctgctgagcgaccgctcggcgcagggcagcgtcaccgccctgctgcgccgctacgccgaggagatccgcagcccggagcagctgtttgagccggacgatggcccggtggcagcgcggctgcacctgtacccggcggcagtgttcggcgcaaagccgctgtatccccccgccgcgccccgcaccgaagcacctcttgccccggtgcgcaccgaaccccttgaccccgaccggctgcggcaggaacagcagcttctgctggactacgcccgccttgccgtcaccgaggaaaacgtggcgctgctggcgcggcaggcattggctgcccgcgggcaggtgaacgcctccacccttgtggaggaatacccgggcgactttacaggcattatcggcctgcacacctattcccagtcgccgcaccgggagtatgatatcaccatgaccggaaactgggtggagcgcggcggcttccggtttcaggattttgtcctgacccgccgcaaggaggtaaacacggatggcaaccattga

SEQ ID NO: 42140 - DNA, 609 bp, Faecalibacterium prausnitzii M21/2
atggcaaccattgatctgctggaagagaccgcaaactatctgctcaaccactgctttgtgctgggctgcgtagaggaacagcgggcaaaatatctgtatattcaggatcacctcaacgaggtgcgggcggtgttcaaaccgctgggctacgcggtgcttttgtaccccgcacccatgcaggcggcggcgctggtcaacgagcatgagggcagtcaggcacggctgctcaagtacgagagcattttgctgctggtgctgcggcttttgtacctgcaaaagcgggaaagccttgccgccagcgcagacgaggtgctggtgaccgtagaagaagtacaggccgaattgcaaaagatgaacctgccccgcaagctggatcagcaaacgctggaaaagctcatgcgcaccctgcgccggtacaatctggcgcggccggtgggacggctgtccgggctggacagccgcatcgaggtatttcccacggtgctgctggcgctgccggatgccgaccttgcggatgccgccgccgagagcgcccgcacccgcaccgagcttggtctgtacgagcgcccggagggcgcagacaccgaagcaggggagggtgaagcatga

SEQ ID NO: 42141 - DNA, 3300 bp, Faecalibacterium prausnitzii M21/2
atgatcgaactcaaacgcctgaaactgatcaactggcacaactttgaaaataccaccttcgactgcgcccgcctgacctatatgatcggcgtgaacgccgtgggcaagaccaccattctggacgccatccgctactgcctgaccaccaatcgcaacttcaatgcgctgggcaataaaaagagcggccgcaccctgcagggctctgtccacgccaagcagcgcggcgaaaacgcctaccgccgcccggggcataccgtggcgtatatcggggcggagttctgggacagcgtaaagcacaccagctttgtcatcgcggtgcgggtggagtccgaaggtccgatgcaggaactgcaccccggcgaccagacatggtacatctccgaggacggcatcacgctggaacagctgccctttatcgacccgcgcaccggtgcgcccagcgccaaggaggacttcaagcccgccgaagggcggctttcctacacccgcagccccagcgaagcgcgggacagaatatgccgcgcactgggcatcgggcgcgcagccagcccgctgggcaaaaagttcaacgaggtgttccagatgggcaccagcatggacgagatcccgaatttccgggagtttctgtaccagtacatcctcccgcagccggagctggacttggaagccttgcagggtgaccgcttggagctggaaaacctgcacgccgtgcttgcggaagcccagacccgcgccgatgcgctggacgagatcgtccgtttcggccgcgaagccaccgaaaaacagaccgaagcccttgtgaaccggggcgctgccctgctggcgcgggctgctgccgatgccggggaaaaggccgtctggcaggagcgggtagacgccggacgccgccagcaggaaacgctgcgcacccgctacgccgaagccaagaccgccgaagcagaagcccgccgcgcctacctgaccgcccacagcgccgccggtgccagcggcgaggggcgcgcactggacgccctcagcgaggagctggcacaccggcagaccgcactggatgccgccgcccgccgcgccgacaccgccgaaaaagccgccgaaaagaccggcaacctgctggcggtgctgcgccgcagcggctttgccgccgggcagaagatggccgacctgacccccgacaccctgcccgccctgaccgactggctgaccgcacaggaaaagccgctggaagaagcctattttgccgcccggcagcacaccgccgccttgcagcggcagcagaccgagaaacgcgccgagctggatgccgtatccggcggcaagtgggtgtacccccacggggacgccgccacccgggtgcgggacgccgtgaatgccgagctgaaaagccggggcatggagccggacgcccgcatcttctgcgagctgctgaacgtggaggacgaaagctggcaggactgcgtagaagcctgtctgggcgaccgccggttcgatatccttgtgccgcccgctcactacgccgccgcaaagagcgcttttgtggcgctgaaagagaaagtgggccccatcagcctgctggataccccgggtctgcgcaaggccaaccgccgcgccgacactgcccccgccgacagtctggcggcacaggtcaccagcgaaaacccgctggccgcgcagtacgctgacaccatcctgcgccgcatcgtctgctgcgacacccccgacacgctggaaaactaccccgacagcgccacccgggaccttctgcgccaccatcccttccggttggagcgtctgcgcaccccgcagcgctatatcggcttggaagcccgccgcgcccgcgccggggcactggcaggggagatgaacgcccttgctgaagaggtacgcgccgccgcacaggcagagcagaacctgaaagccgcatacagccagtaccagacccttttgcgcggcaccacgctggaagaacttgccgctttgtgggacgcccgcgccgccctgaccgccgcccgcgcggcggtggacgagcaggccgcaaagctggccgagtgccgcgagaatccgcttttgcagcagctgtataaagaggaagaggtgcgcgaggccgcatgggaggccgctcgcaccgccgtggagcagaccggcggcgatctgcgcgtgtgcgaaaaacagattgcctcctgcgaggcggagcagcagaaggcggtggacaccgccgaaaagagcgcacaggccgcagagagtttctttgccgcccacccgctggtggagccgctctcccgcagccgtcagcaggcgctgaccgggccggataaatccccccgcgccgccgcgcaggccgccgaaaaggcacaggccaagctggacgatgccctgactgtctacctgaacagcacgctggaaccggcgcagcgggaatacaaccggcgctacgtctgcgattatcctctggggcttgccgggctggaacagtaccgcgcccagcatgagagccttgtgcgcatcgatttggagcgctacgccgcccgcctggagcaggcgcagcgggactgcaaggaccgcttccgcaaggatatcctgttccgtatgaaggacgatatcttcaacgcccggcggcagttccgggagctgaacaaggtcatggagcagctgacctacggcgaggaagtctaccgttttgagctggagcccagccgcgacccgcagctggcggcgttctatcaggtcatcgtggacaagggcaaccagcagatgaccgagggcgactctctggataaccttgccgccaccgccgaccccgcctatgagcgtcaggtggatgagctgatggaaaagatcatggcggacgtggacgagaacacccgcgcccggcaggagggacgcaccgccgccggtgccaccctttcggactatgtggactaccgcacctatctggattacgatatcaaggtgaccaatcaggtcaccgggcagcaggcgtatctgtcccgcgtcagccgcgattcctccggcggcgagaatcaggcacccttctatgtggccatctgcgcaagccttttgcagatctaccagaagagcgaaaacagcatccgtctggtgctgctggacgaagccttcagcaagatgaccagcgaccgcatccgccctatgatggaactgttccgccgcctgcaattgcaggtgctgctcatctccaccgtggaaaagagcaccgccatccagccctactgcgatatcacctactccatcgtccgccacggcgatgccaacgccatcgcgccctttttccgccttgcggagaaataa

SEQ ID NO: 42142 - DNA, 1416 bp, Clostridium scindens ATCC 35704
atgataaaattaaaaagacctatgaaatcaaggacaagttggagaatacaaatgcagttacgcaatgagatcccagacacgttctggagcctgttccggtccgtgaaccgggagatatacattgatgcgctattatatatcaatgaagaataccaatataataactatttccttaccaaagaggcatgcatccagattctaggcgatatgaatgccaggaagcggtacgaacttcaatgggaagaaagcgagtctgaattcgatatgctggagacgccgtcatcccgtatcttgaactggcttcttcggaccggatggcttaaacggatagaggattataatacgctggtgaccaatatcgtgatcccggactattccgccatatttattgatgctttcgaacgcctcagttccgaggatatggaggagacagacatctatatccagaatgtctatgccacgttattttcctttcagaacgatgcaagagccaatctgggcatgcttcgcacggctttggtgaatacacgcaggcttaataaggcgctgcaggatatgctccataatatggacaagttttttgcacggctcttggatcaaaagtcttatggcgatcttctaagagagcatctggacgggtatgtggaggaaatcgtgaggaagaagtatcatatcttgaagacttcggacaatttctatatctataagatggatattaagaagtgtctgcgcgatatgcgggaggatgaagcgtggatagagcaggtaagagaacgttcaagggccatgggagatacaggggaggatgtattggaacttctggatctgatcgagaggggattcgatgatattgagcataggatcgccaacatggacaaggaacataccaaatacgtccgcgcgacggtaaccaggcttaactatctgcttagcggagaatcggatacgaaaggactggtcgtaaaacttctgaaccgaatgtcagagagcgcggattatgatgaggtgctggcaaagacgggggagaagatgaatctctccctgctggagatattatcggagaagtccttgtataaaaggcggaaggggcgaagatactttatcagccagatggagccggatgaagagattgcggaccttgacaaggaagatgtgctgaagcttaaccgcatccaggtacgctataccaaggaacagattgaggccttcattgaatcccacatggatcagaacgatattatggatgcggcacaggtagatataacggatgaggaatcctttgaaaaattgatcttggcctatgattacagtaccagagggagcagcaagtacatggtgctggaagaagagccaaagatgatagaaaaagggccgtataagtatccggcgctgaagtttgtaaggagaagattatga

SEQ ID NO: 42143 - DNA, 645 bp, Clostridium scindens ATCC 35704
atgatagactattttgaacagctaagccaggaagagcaggaggatatcacggaggtaatccagatcctgtaccgccagacatttctgctggagaggaagtatgacaaaaggtcggggcgcatgcagtatgtgcgggagtatcggatatgcagcaagcatctggaattcttaagggcatattataaagttgcgggcattacattgaaagagaatgcccatatgggcctgatctatatccagggggaggctttgtggggagagaagctgccaaggcttgcaaccatctatctgctggtattaaaactcatctatgatgagcagatggcgtcggtatcttccagcagttatattgtcaccacgttgggggcggtcaacggaaaggcaggagacttccgggtgctccatggcctgccttctcctacggaaatgcgccggaccatcgcgcttcttaagaaatatcagatcatagagccgctggacgttctggaggaattgaacgagcacacgaggcttatcatatatccctgcattcacgcggtgctgatgggggatgacattaaggaactgttagagacatttggcgaggaggagaacattggagacgaagcagccattcaaagcactttcgaggatatgcctgaataa

SEQ ID NO: 42144 - DNA, 3210 bp, Clostridium scindens ATCC 35704
gtgatcgacgcgatccagatcgttctgtatgccaatacggatggccgcgggttctttaacaaggcggcggcagacgattctgaccggagcctgatcgagtacctgcggggcatggtaaatatcagtgagaataatgaatcccagtatcttcggaataagaacttttccagcaccatcgtactggaactggaacagaccaataccagagaaaagcagtgcgtgggcgtcgtatttgacgtggagacggctaccaatgagattagcaggctgttcttctggcatacgggagaacttttaaataaccattaccgcacggaaaaaagatgtctgacgaccatagaaatgcgggagtatctgcaaaggacgtttccgccggaaggattctactgcggcccgagcaatgagagattccgccgccagctctatgacatttatctgggcgggcttgacatggataaatttcccaggttatttaaacgggcgatcccgttccgcatgaatatcaagctggaggactttgtaaaagagtatatctgcatggagcaggatatccagattgaggaccttcaggagagcgtcatgcagtatggacggatgcagaacaagattgaagagacgcaagaagagatcagaaggcttaatctgattcgggagcagtatgaggaattctgcaaagagcaccgggaggtggaagcctgcacgtaccagattgaccggctggaagaactctggctggaagcaaagatccaggaatgccgggataagtcgctggggcgccagggggagatcggcaaacaggaagcggttaaggaacagctggaatcacaggccagaatcctacagaaggagtatgaggatattattctcaggatcgccgacagcggatatgccaatctggagtcagaactggctggccttaatgagacgcttgagaggctgggggccagcaaggcacgctgggggcagacagccgaccgcctcaaagagtggaagcagcaggatgtgacgcccaaccagtccatctgggatatcgacaaattcgcggacggaagcatttccgaaggggaacttgagaggctcaaagagagccttctggatatccaggaagaattagaagagcagcgccgggaggcagactcggacctgcgcaagatcaagaaggaagaaaaggatgccagagaggaattaaaggaactgaagcaggggaagaaggcgtatcccagggaactggaagaggccagatacgaactgcgcaaccgtcttcacgagcgatgcgggaaattcgtcaacgtacagatactcgcagaccttctggatattaaggatgagcggtggcacaacgcgatcgaaggctatctgggcagcaataagctgctgcttgtggtggaaccgggatatgccagggaagccatggacatctaccaagggatggacagaaagaaatattaccgtgcggccgttctggacacggagaaggtcatggaggatgggcaccaggcaaaggagggctcccttgcagaggaaattgtggcaaaagagccttatgtcagggcttacatcgactttttcctgggaaatgtgatgaaatgcgaatctatagaggaactgcgggagcaccggatcggaatcacgccggactgcgtcttgtatcacagctaccgcctgcagcatatcaatccggataattataccaggcgggcctatatcggagagacgagtatgcgaaagcgtatccgccagttggaggagaagtgccagcatctccaggaagagcgtctgcctctgcaggagatgctggaggaaatccgaaagactatgcagctggaaatgctgatgcagccgatctccgattatctgggctggctgtctgatatagagcagattccggcaaaagagcgaaggaagaagcagatcgtagagaaaatgcagcgcttaaaagaggaatccgtggatacctggaatcgtcagaaagaggaaatccagcggcagcaggaggataaaaaagcgcagatcgatcaggtgcagaaggacatctggaacaaccagaaggatattgaacgattccgggaggaacttatacagtccgagtccgcattggtgcagcagaagcaaaagactgtggaaaaccctgaatatgagcaagaattccaggagtaccttgcagggaagaaatcatccaattatgaatatctgaagcggcagaggattgcagagcgctatccgaagcaggaaagggaggagcaggcataccagaaactggtggatatccgaggcgaatacctgaggaattatccaaaccgtacctactccgcggcaattaagaataacgaggcttacgataaactgctgaacacgctgcagtgcgacgatctggaatcttaccgggagtcggcgaaagaacaggcgcgccaggcggtggaacattttaaggatgactttatctttaagatacgaagcgccatccgggaagcctaccagcgcagggacgaactgaaccgcatcatcagcaggctggacttcggaaaagataagtatcaatttgtaattaccaagaataaaggggccgacgggaaatattacaagatgttcatggacgattcgctgcagatcaatccaagccagctgaccaataccatagacaatcagcttaacatgttcaccatggagcatgaggatcagtacggggatctgatgaatgaactgatcaacatcttcatcccgccggaaaacgcaacgaaggaagaactggacgaggcgaagaagaacatggacaagtatgcggattaccgcacctatctgtccttcgatatgcagcagatcgtaaaaggcgataaagatatgaccatcggtcttagcaagatgatcaagaagaactccggcggcgagggacagaatccgctgtacgtagcgcttcttgccagtttcgcgcaagtttaccgtatcaacctctcgcccaaaatccacagaagccccaccatacggctggtcgtactggatgaggccttctccaagatggatgcggaaaaagtggccagttgcatctcgctgatccggggactcggcttccaggccattatcagcgctaccaacgataaaatacagaattacctggaaaatgtagataagacattcgtgtatgccaatccgaacaagcggcatatatcgatacaggaatttgagaggaaagattttggggaactgaaagattga

SEQ ID NO: 42145 - DNA, 1239 bp, Clostridium scindens ATCC 35704
atgtatattgtagataaaattataaataaatgtgaaaaaagcagcagggattggcgaagcggtgcctccgggcgccgtacgatacagattatgcagtcggattatgacagatgtgggaaatcagtgctgataagcgaagtgaaggaattggaattccgggggctgatcgagattgaaaagtgggtaaccagaggaagcgatgtagatataattgcttttcgggtggaaaagctggacaaattctatgaattagccaaaagcgagggaagaatggtctggccgaaacaggaacgggttgattattatagagggatgctggaggcagaacttgggaagggtatagaaaagaattggatccgggagtattacagataccttatatctagactggataaaggaaattttccaaaagatgtggagaaattagaattatatacttgctgcctcagagggattgacgaattggaggagcctgtatataaacgcatattcagcaaaaagtaccttaacaattcaaaaaaatttgaaaaggaggtgcagggccatctcatatctgtagcaaagaagtattgggatgagatcgaagaagatatggatgacaagacggtgctgtcgcagttactgctcgaggaatacgctcaggaactggaaatgaaagggcccctcaggctgattatcgaatcagggggtaagatgcaatcggaagaaggaacagagatagaaggagagacaccgccagatcaagaaatagatatatctgccttcatttatggcgttacattaaacagtgcgatgctgaaatatagcagaatcgcgcctaagcagccggatatcagacgtatcattaccatagaaaataaggcaaattttgtatctgtgccctatgatcctcacacattatatattttcagccatggatacttttcgccaaaagaaagggaatttttgaaaaaattggcgtatattttgaacgaagaggatgtgggatattatcacagcggcgatctggattacggcggtattaagatatatgaatatattaagaaacgtattttcccggaattaaggccttatctgatggatgtagagacttatgacaggtatttggaatatggagaggaagcgccggaaagtgtcctgaagaagataaaaacggtgggattgccggagtttcaagggctgataggccgtatgctggagacggggcttatgattgagcaagaaagttttttgatttaa

SEQ ID NO: 42146 - DNA, 1485 bp, Clostridium sp. SS2/1
atgataattatagtccgatttcggacttatgtcaattattatttcataggaaatcactttacgaggtcattcgaatcagttaaaataaagagtcagagaataaagtacaaccaaagaaggaagttacctatgaaatttgcctatgatatcccagattcattctggagtttatttcgttcgatgaacagagaactttatatggaagccttgctgaagatcaacgaagaatatgaatataacaattattatttaagtaaagaagtatgccttcaggtattagaagactggaacgaaagccagcggatctggttatctcctgaagaatttgaatcagaaaatgatgcaagccagacaccgccaaacaggatcttaaactggctgatcaagacaggctggttaaagaggatcgaagatttctcaacattaaccaccaatatcatcattcctgattacgcagccgtatttttaacagcatttgaagaattagtcaacccatcaacggatgacacagagatctatatccagaatgtatacgcaacactgttttcattctggcatgataagaagatgaacttagccatgttaaaaacagcgtttgttaatacaaagaaattaaataaagccttgcaggatatgttacacaacatggaccatttctttagccgactgctaaaacagaaatcatatgaagaagtgctggcagaacatttggaaggttacgttgaggaaatcgttgagaagaaatatcatatcttgaagacaaatgataacttctatttatataaaaatgatatcaaacgatgtttaagagaaatgagagaagatattccatggatggaacaggtacagaagaaagcagataaagaaaaaggcgaagatgtgctaagcatcatcaatgcgatcgaacgtggatttgatgatattgaacatcgaatttccaacatggataaagaacattctaaatatatcagggcaacagtaacgcgtatgaattatatgctgaatggagaatccgacacaagaggtctgatgatccagctgttaaagacgatcggggattctaaggacagcgaggaaaagattgagaaggtcggacagagtatgaatctctctcattttgaagtgctttcagagaagtctttgtataagaagagaaaacgaagagattttgcaagtcaggtagaagaaaagcagcaggaagaattatcaagagaagatgtcctaagattaaataagattcatacaagataccaacaggctgagattgaagatttcattgaatcttatatgcaggatgaccatatggaagttaaggatattgatatcagggatgaagagtcctttgagaaattaatccttgcctacgattacagtacgagaagaaacagtaaatataaagtgatcgagagagacgataaattgattgataatggaagttaccgctatccggcattaacttttgtaaggaggaaaccgaaatcatga

SEQ ID NO: 42147 - DNA, 657 bp, Clostridium sp. SS2/1
atgataccgtattatgaagaattgaatgacgaagaaaaaaatgcggtcacgaaagtgatccgtacgttgttaaaacagacatttgtattagaaagaaaatatgataaaaagagcggaagacttgtatacaataaagaatttagaaccgttgacctgcatcaggaatttttaagagaatattttaagatttcaggaatcgaattaagagaaaatctgcatcttggagtcttttatattgaaggagaaactttgatcggagagaagatttccagattatcaaccatttatcttctgatcttaaaattattatacgatgaacatatggcagaggcttcatcgaatacaagtgtgtatacatcattaggagaaatccatgaaaagatcaatgatttccatctgatgagaaccttgccatccatcactgagatgcgtcgttccatcgcattattaaagaaatatcagatcatcgaaccactcgatgtattagaagaattaaatgaagagacaagaatgatgatctatccatgcgtgaatgtcgtgttactaggagatgacatccgcagattgatcgaaagtttcagcaaggaggaagtagacagtgagtttgacgaagacgaagcagccatttctggcattatcgaagatatgcctgaataa

SEQ ID NO: 42148 - DNA, 3216 bp, Clostridium sp. SS2/1
gtgatcgatgcgatgcagatcgttttatatgcgaatacagatggtcgtggattctttaataaggcggcagcagacgattccgatcgaaatctgatcgaatacctgcgaggaatggttgcggttggagagaaagatgaagttacttatttgagaaataaaaacttctccacaacgatcgttcttgaatttacacagacagaatctgacgaaaaagaatgtctgggagttgtatttgacgtagatacagcaagaaatgatacatccagattatttttctggcacaaaggtggcattttagagaatgcttaccgtacggaagaacatgcgatgacaatttcggaactccgcaaatatatgcagaaaaacttcaaaaaagaagatttctattttggaacaagcaacgagagatttagaaaacagatgtatgacatctatcttggcggtcttgatatggagaaattcccaagactgtttaaacgcgcgatcccatttaaaatgaatatcaagctcgaagattttgtgaaagaatacatctgtatggagcaggacattcatattgaagatatgcaggaaagcgtgatgcagtatggaagaatgcgtcagagaatcgaagatacattaaaggaagcaaagagcttagaagagatcaaagaaagtttcgttaaattcaagaccaaaaaagaggaacaggattattgtcagtaccgcatgaacaaactggatgtcctgaaattaaaaacagatattcatctattacagcaaaagattgaagatggagagaaagatctaaagacacaggaagagaatgaaacagttcttgagaagaaactagagaaactcgccaaagaatacgatgcattagtagcacagatcgcaggaagtggatacgatcagatcgcaacaaggaaaaaggatgttcaggagttgttaggacagttaaatcattccgtacagcgttgggaacagacatcaaaagacttaaaaaaatggtgtgatctcgatattacgccaaatcaggcaatctgggatatcgagaaatttgaacagggagatatcacagaagatgatctaaaccgattaaaacatacattggatattttaagaaaagaaactgaggaagaacgacaagataatgcgtctgcactaagaaccttaaagaaacaggaaaaatccatttctgatgagttgaaagaactgaaaaagggtaacaaagcgtatccaaaagaagttctggatgcaagatatgaattacagacgaaattaagcgaaaaatgtggtgattttgtaaaggtaaatgtgcttgccgatctgttagatatgaaagatgagagatggcataaagcggtcgaaggatatttaggatcgaataaattaacactgatcgtggaaccaaaatacgtcaaggatgccatggaaatctatcgtgatatggatcagaagaaatactggagaatttcgattgcagacacacaaaagattgataagcaggacatgaaggttgaggaaaatgcgttatcagaagaagttcttgcagaacagtcttatgtgaaaaagttgatagaatccttgatcgggcgtgtgatcaaatgtgagacgatcgatgaattaagaaattgccgtactggtatcacaccagatggaatgctttataaaaatttccagttaaaacgattagatccaaaacagtacacaagaaattcctacattggagacaacagtttacgccacaggatcaaagaattagagaaagaaaaggacaagatctttgataaaaaagatccattagaaaaagaagttttaagtgctgtcgttattttggactatgaatatcttccacagtcagccgaagaatatctaaaacagcaggaaacactggaacgtgcgaaagaacgtcaggaagaatacgaagatttagaaaatcagctgacaaaattaagagaaggtgccttaaaaggtctggaagaggaaagagaccagaacaggttaaaacaggaagattgcaaacaagagatcaatgcaatgaaagaagcaatctgggcaacacagaatgcattaaaagaatgcagacagcagatcattgaccagaatgaagcattgattcgtgcacagaatgaattaccggcaaatggagagtacgagcagcagtttgcacaggagatcgagaagacagacacagaagactatgaacgtctcaaaaaacgtgcagcaaggaaatactatgatgccggaacgaagaaggaagaagaatatcgaaagcttgtggaagtcagaactgcatatttaagggaatatccaaaccgcacattctcagcagtagatgagaataatgatgtgtatgataagctttataaggaattatcatctgatcacatggaaatgtatcgtgaaaaagctgcaaaacaggccaaaacagcaatggaacatttcaaagatgactttgtatacaagattcgaagcgcaatcagggaagcttatcagcgcagggacgaattaaaccgcatgatcagtggactcgactttgggaaagataaataccagtttaagatcacaagaaatacaggagccgatggaaaatattatccaatgtttatggatgattctctgaatatcgatccatctgtcttaaatacaacgatggatgaccagatgaatctcttctctatggaacatgagaataaatacggggaactgatgaatgaattgatcgagatctttatcccgccagaaggtgcaaccggtgaagaacttgagaatgcgaaacgtgatatgcagaaatattctgattatcgtacgtatctgtcctttgatatggaacagattgtggatggtgatgaaaaactgacgatcggattaagtaagatgatcaagaaaaactctggtggagaaggacagaacccattatatgttgcattactcgcaagttttgcacaggcctatggaattcatctttcaccaaaagtacgaagaaatccaagcatccgtctagttgtcttagatgaagcattctctaagatggatgcagagaaagttgcaagttgtattgacctgatcaggaatctaggattccaggcaatcatcagtgcgacaaatgataagattcaaaattacctagaaaatgtagataagacttttgtatacgccaatccaaacaagaaaaatatttccattcaggaatttgagaaatgtgaatttgataatttactcacagaagaatag

SEQ ID NO: 42149 - DNA, 1371 bp, Ruminococcus lactaris ATCC 29176
atgcagtcacattatgaaatcccggatacattttggagcttattccgctcggtgaatagagaaatttatatagaatcactgctgtgcattaatcaggaatatgagtacagcaattatttcctgacgagagaagtctgcctgcagatcttaaatgatatgaatacgcagaagaggatcaggctggagcgtgaggagtcagagacggagctggatctgctggagactacttcttcccggattctgaactggctggtgaagacgggctggttaaaaaaaattgaagattatacttcactgacaacgaatatcgtgatcccggattatgcggcgatttttattgaggcatttgagaagctgtcttcgcaggagctggaagagacggatctttatattcagaatgtctatgctacgttgtattcatttcagaataatccgaaagtcaacctgaatatgctgcggactgccctggtgaatacaaagaagttgaacaaagccctgcaggatatgcttcataatatggataagttttttgagcggctgctggataagaagacgtatggtgaactgcttcgggagcatttggacggatacgtggaagaggttgtgcggaagaaatatcatattcttaagacttcggataatttttatatttacaagatggatattaagaaatgtctccgggaaatgcgggagaatgatgaatggatcgaaagcgtgcgtgcaagagcgaaagctgcaggggatgagaaagaagatgtgctggagatcctggatcagattgagcgtggatttgatgatattgaacaccggattgccaatatggataaagagcatacaaaatacgtgcgtgccacggtgacacgtctgaactatctgctcagcggtgagacggatacaaaggggctggtggtacagcttctgaatcggatttcggcagaggagaacggtgtaaagaaggaggagaagctgcggaagacagcggaacggatgaatctttcttatctggagatcctgtcagagaaatctttgtataagagaagaaagagtcggacggatttcatcagtaagatggaaacggaagaggagacggaagatctgaaccgtgaagaggtactgaagatgaaccggattcagatgcgatacagccgggcggagatcgaagaatttatccaggctcatatgaccggggatatcatggatgcaggggcaatgaaggatatgacggatgaggattttgaaaaactgatccttgcgtatgattacagtacacgtcggaacagcaaatatgctgcgttgaatgaagaagacaggatggtggagaacggcaggtatcgttatccggatctgaaatttatacagaggaggccctga

SEQ ID NO: 42150 - DNA, 645 bp, Ruminococcus lactaris ATCC 29176
atgatagaatattatgatttactaaatgaggaagagcaggatgatatgagagacctgatccagttattgctgcgtcagacatttctgctggaaaggaaatatgaccgccgggcaggaaggatggttccggtgagggagtaccggtttgcagaccggcatctggatttcctgaaagaatatttccggattgcggggatcacactccgacagaatgtgcatatggggctgatctatattcaggaagaagcattatggggagagaagctttcaaggcttgcaacgatctatattctgattctgaagatcctttatgatgagcagatggcaagtgtatcatcgagcaatcatgtggtggtgacactcgggatgatcaatggaaaggcaggagattttcatattctgaccgggatgccgtctccgacggaaatgcgtaagacgatcgcactgctgaaaaagtatcagattttagagccgttggatgtcatggaagagctggatgaaaattcgaggatggtcatttatccgtgtatcaataccgttcttgtgggtgatgatgtaagggaacttttaggtacgttcagtgaggaggaatacagtggagacgagacagcagttcaaggcactatcgaagatatgcctgaataa

SEQ ID NO: 42151 - DNA, 3204 bp, Ruminococcus lactaris ATCC 29176
atgcagcttgttctgtatgcgaatacagacggaagaggattttttaataaggcggctgcggatgattcagaccggtcactgatcgagtatctgcggggaatggtgaacattggtgagaacaatgagtcccagtatttgagaaataaaaatttctccagtacgatcgtgctggaatttacagaaacggaaagccggcagagtcagtgcgtcggggttgtatttgatgtagagacagctacaaatgagatcagccgtcttttcttttggcacaaaggcgggcttctggaaaatgattaccgggcagataagcggtgtctgacaacaggagagatccgggaatatttgcagagaaatttcagtacgacggacttttactgtgggccgagtaatgaaagattccgcaagcagctttatgacatttatttaggcgggctggatatggaaaaatttccacggctgtttaagcgtgcaatcccgtttaagatgaatatcaagctggaagattttgtgaaagaatatatttgtatggagcaggatatccatattgaggatctgcaggaaagtgtgatgcagtatggaagaatgcggagcaagatcgaggagacgctgaaggagatccggcatttggaagagatccgtgacagatatgccgtgtatcagacccaggtgaaggaagttgaaaatgatcagtatcagatcgaccggctggaaatcttacgactggaggcgaaactgcaggaactgctggataagatcaaagagagtcaggaagatatcggtcggcaggagcaggcaaaagcagaactggagacaaagcagcagacagtccagggacagtatgaggaagtgctgttaaggatcgccaacagtgggtattctgcgttggaacagaagcttggaaatgtgaatgagatgctggagcatttgcagttgagccgtgcaaaatggcagaggacagcagcagggcttgcagcatggaaatcaaaagatgtgactccgaatcagacgctttgggatattgaaaaatttgaaactgtggcactggatgaggaaactttgaagcggcttcagacaagccttgtacagattcgggaagaactgggggaagatctgaaggatgcagaagcaaagttaagagtcattaagaaagaagaaaaggatgcaagagaggaattaaaggaattaaagcaggggaggaaggcatatccgaaggaagtggaggaagcaaaatatgagcttcgtacccggctgcaggagcgttgtggcaggcttgttccggtacagatccttgcagatcttctggatgtgcgagatgaaaaatggcataatgcgatcgagggatatatgggcaataataaacttctgctcgtagtggaaccgaactatgtaaaagatgccatggaaatttatcagggaatggataagaagcggttttcacgggcagcagtgctggatacagagaaggtcctttccagtgataaaaaggcaaaggcaggttctctggcagaggaggtgctggcgaaagaagagtatgtccgggcgtatattgatttcttccttggaaatgtgatcaaatgtgatggaattgatgaacttcgtgaacagaccatcggaatcacagcagattgtatgttgtatcaggggtatcgtctgcagcacatcaacccggaaagttatacaaggcgggcatatatcggtgaaaccagtatgcgtcagagaatccgcagactggaggaacgttgtgatgctttacagcaggaacgtcttccgctgcaggaaatgaaggaagaaattcagagggtactgacattagaagcactttcccaaccggcagaggagtacatgagctggaagaaagagatcgatgaaattcagaaaaaggaaagagaaaaacggcagatccaggaagagatgaagaaactccaggatggagaggtttcggctctgaaagctcagaaggaagatcttttgcggcagcaggcacagctcaggcaggagctggaggagctgatcggaaagatttcagagagcagaggaaatgcacagcgaaatcagaatttttatcagaccgtggaaaccgaattgcaggacagacagaaagaatttcacgaagatccgcagaaagaagaaggattccgggcctatctggatacgaagcgttctgtaaattatgagtacctcagacagcagcggagtaaagaactggacgcagttgaagttgagaaggacaaggcatacagtcagcttgtagacaggagaaccatctatctgaagctgtatccgaaccgtacattttctcctacgattgaagagaatacaccttatgaaaagctcctttctgaactgcagtgtgatgagctggaagatttcaggctggcggcaaaggaacaggcaaaatcagcggtagaacattttaaagaggatttcatttataaaatacgaagtgccatcaaagaagcctatcagcggagagatgaactgaaccgtatcatcagccggctggattttggtaaagataaatatcagtttgtcattacgaagaataaagggccggacggaagatattataaaatgttcatggatgattcgctgagcattaatccgtcccagctttcagattctatggagaatcagatgaacctttttaccatggaacacgatgaggaatacggggatatgatgaatgagctgatcaatatctttattccaccggaagatgcgacaagggaggaactggatactgcaaagaagaatatggaaaaatatgcggattaccggacgtatttatcctttgatatgcagcagatcatccacggtgaaaaggatatgaagatcggactgagcaagatgatcaagaaaaattccggtggagagggacagaatcctctgtatatcgctctgctggcaagttttgcacaggtctacaggattaacttgtcaccgaagatccgcagaccgtccacgatccgtcttgttgtgctggatgaggcattttccaagatggacgcagagaaagtggcaagctgtatttctctgatccgtggacttggatttcaggcgattatcagtgcgacgaatgacaagatccagaattatctggaaaatgtagacaagacgtttgtctatgcgaatccgaataaaaagcatatttcaatccaggaatttgaaaaagttgagtatgaccagttgaaggttgaggaatag

SEQ ID NO: 42152 - DNA, 1224 bp, Ruminococcus lactaris ATCC 29176
atggagtatctgttgcagcttttgatcgaaaagattgaaaatagtgagaatcagtggaaaccgggggcgaatggctggaagagtctgtcaaataaagcgggaaatctgtacgatgatcggaagcatctgaagtcggatgttgtgaaagcggctaaagacctggagaagacaggacttgtgaagattgaatgggtacagggctatcgtgagcaggatattcaggcgatccggtaccggcaggaggatattccggcattgtataaactgtaccgggaaagagtggattctgatttctgtgcaagagcggaattagtacgaaaatatcaggaagaaattcgggcagagctacagggtttgaggactccgtggatcagagcgtattatgaaaagctgttgcaggaatcggaaagtggcagagcaaaaaaagcaactctggagaaggcatggaaacttttcaggaaaagaagagcctgctggcgtgggattgatgaattggaagatccgatgtataagcggctcttcagcaaaaaatatttaaaagatacaaagatttttgaaaatgaatttcaggattttattgtttcaacggcaaaaatatatgcgaaggaactgctggatgatgcaatgaatgattcggagattctgtcggttctgctgatcgaggattatgcacaggagctggctttgaaaggtccgctgcatttgaaatgggaggacggaacggagattcataatgaagactggcggtatggaaatattctgaacagtgatacactgcggtatgcacagatcgccgggcagcagccggaaatccaaagggtcattaccattgaaaataaagcaaattatatgatgatgccttgggaagagcatacgctatacatttttacgcatggatttttcagtccgaaagaatgtagatttttacagtctttaaatcaggtgcttgagcatacagaagttgaattttatcatagcggagatcttgattatggcggaattaaaatatttctgtatattcagaagaacattttccctgaattgcaaccgttgatgatggatgtgcagacttatgaaaaatatcggaactacgcggaaaagatagaggacacaacgttggaaaagctgaagaaactgcagattgaaaatccggttctcaggcagctggcggagaagctggcaagggaaaagaaagggatcgagcaggaaagttttttgttgtga

SEQ ID NO: 42153 - DNA, 1521 bp, Bifidobacterium bifidum NCIMB 41171
gtgggtgatatccgacgggagatggaacggctgaggccggtctatgaaaccggcgtgctgagactgctgctccgtcagaattcgatgatgtacgtggcgctgctccgcgcggccttcgacccgttgaccggcgagctgccccgtgagaccctggaggaaagcttctcgcaaagcctgtcccggctcgtcgactccggcgaataccagctcagggaggatcagaccatcgcggacgcctcccggcgcatcctcgccgacctgacccgtgagggcgatgacgattacgcatggctcgccaactcgcatgacgccgcatcgcaccggttcctgtaccgtctcaccgcccgcgcccatcgtgcgatcgaggcgctgtcgcggcttgaggatgactcccgcacgctgtcgggcgcgcaggcgaactcgatcatcatggagatcgagcatgcgcgcatgcagcttaccgccgaccccggcgagcgcgtggcgttgctcaaccgggagatcaaggcgcgcaaacacgagatacgtcagatacgccacggtcagcggcaggcggcgctcaccgaatcgcaggtcgaggacgtgattgcagtgattcacaacacgctgcgcggcgtgcccatagacctgcgtgaactcgtgctgaccgaacgggacaacggtgacgcgctccgccgccgcatgcaggcgggcgacatgagcgtcgacgacatcctgacctcgtaccacgacgaataccgcaggtccttcagcgaatccgacagcggaagacgcttcgaggacgcgttccaggtgatcatcaccgacgagggacggcagcagatcgatgcggccctgcgcgacatcgcccacacgccgtatctggccggcgagtccggcgtcctgctcgatcaggtgcgtgccgagctttcgcgcatctatgacggcatcgaggcggtgcgtcgccagatgcgcgtatccgacgaggcgatcagccgtctggtgcgacagcagaccgatacccgataccgcacgatgctcggcaagctcaaccgtctgtatgcccacgtcaacgccgacgcgaaggcgcatcagggtgatgatgcgagaccgtaccggaccgataccgcggccggcaggttccctccgctgccgtcgcgccccgcgcgcccgatggtacgaacgaccaccccgggattgtccgtcccgcagacaccgggcgatgcgaccgcgcccgacctgcgttcgatgatcgacaacgggggaccgcggctgcggcgcatggccgcgctcatcctcgaatcgcccgtctacgcggacgacgggaacggcgccatcgacatcgtcgccagcttcaacgggctgccgaaagccgagcggaaggaaagcgagctcgtcggtttcctgggagagctcggctgcggggacggagccggcgtcgcatggcattgcatatcggcagacggaagcccgagggactggatcaccggcccagtgctcgcacaagaggatgaattgcacgacatcgtgaaggaggactga

SEQ ID NO: 42154 - DNA, 906 bp, Bifidobacterium bifidum NCIMB 41171
atgggtgcggcggacgtcgaatacgatggcgcggacgcggaaggcgcggtcaacccatacgccctgttcgagggcgacacgggcgacatgaccgccgacgcgcgcatggtggcgatcatgctcaaacgcgagcgctacatcagcggacgtttctatgacctggcgctcgacaaccgcgcggcggtcatccgttcgctcaacaacgacctgctcgatctggtcgtcaacgagcactaccgcgtcatgtacgccaccgcggtgagcgggccggacatgacgctgcgcgcgctcaagacccgtgcgagcctcaaacgtgaggaggcggcgctgctggcgttcctgcgcatccgcgtgctcgaatacgagaacgcccacgtcgcgccggacgaatggctggtcagcttcgaggagatccgagcggcgctcgccaccggcgccgggtacctcgcctcgcgcaacgacgaggagggcgtgctcaggcaggtgggcgcgatcgtgtccgtcatgtgcacgtacggctatctcaggcagctcgacgatgacgagacgatgtaccgcatcacgccgctggtgccggtggtgctggaccgtcagctggcggacagctggctcgcagtcgcggaccgggacgacgatgacgagccggccggtgacatggccccggccggctcgcggtctgcagccggcgatacgtcgaacgccgatgcgagcggcgccgatgacgatggcgattcggacgacgcgggacccgacgccgaactgttcgaggctccgctgttcgatgacgacgccgatgcggacgccgccgagaacatcaagggcgccgatgatgccaatggcgcgaacgacagcgacattgacgacgagaccgcctcggacggcggcactgcacgggaaggggagtga

SEQ ID NO: 42155 - DNA, 3585 bp, Bifidobacterium bifidum NCIMB 41171
atgagcggcaaggacatgcagatgatcgccgaccgatggatgatggaaagcaggaggctcgtcaactggggatcctatgagggctaccatgagttccgtccctccacggactcgcaactgccggtgacgttgctcgccggcgcgagcgaatccggcaagtcgacgctggtcgacgcgcagatatcgctgctctacccgaccggcacgcccttcaacaaggcgtcgaattcggggcgttcggaacgaagcgactacacctacctgcgcggcatgatcggcgtgggaggctccgacggcgtcgacgaaccgatgtacctgcgcggccgggacgagtccggcgtgccccggtccatatggggcgcgatcgtcgacacctaccgaaacttcaccaccggtcagatactgtcctgcggcaagttcctctatctgatgcccggcgacgggcgcggcgacgtccgacggctgtacctggcatgggacaagccgatcgacccgcgccgcatggacgtgttccgcgagtcgccgttcacgcccacgcagctgaaatccacgtatccggggtgcgtcaccttcccgaacgccgaggcgttccacacccacatttgggatgtcatgggcctgagcgcggaggcatgccgtctgctggcccgcatccagtcggccgacgccccctcccgccttgacgacatcttcaaacagggtgtgctgggcgtgcccgaggcgctggacctggcccgtgcgaccgtggaggattacgagcgttacgacgcgaacttccgaagcatggaggaaaagaccagacgcatgggcaagttgcgtgccattaccgccagctatggcgactacgagtcggcccgtgacgcggtccactcgttcgacgcggtgaacccggccacgaagtccggctcggcgacgatccgagcatgggcgatccgccgcatgatcggcgaggtcaacgaacggcagccgctcgaccggcgtctgcgtgacgagcgacgcagtgaggcgcgggctgccggcaagcgcatcgaaagcctgcgcacccgcattgacgcggtgcgcgagcgcatgcgaggcctcgacggcggcgacctgacacggctcgacgcggaaatgcggcaggcggaacgcgcgctggcggacatcaccgccggcagacagcgcatcgggcgcatgttcgaggcggccggcgaggagttccccaaagacgagcacgcgtgggacgagcggcgcatcgaggccgtgacgttcatgcgctcatatgagcagcgcaagggactgctggacgacatgcgcaaccagacgtacgccgcgcacgcgtccgtcaagcagacgctgcagcggctgaacgacgattacgaacgccagaaatcgcagcgcacccgcatctcccgccagatggacgagacccgcgccatgctgtgccgggccaccgggctgggcccgagcgaactgccgtacgtcgcggagctcatggacgtgcgcgaggatcaggagcattggcgcctcgccatgaacgccgcatacggatccatggcccagaccatcctcgtcgacaagcgccatgagcgtggattcgcagccaaggtcagcgccatcgacccgcacgccatggcgcggcgcacctggcagttcgtcgacaccgaacgcgggggagccgggaacgggcccggcggcgcgaacacgggtgcgaccggcgggacggacggagaggtgtggctgtcctcgaagctgcgctaccgcgaggattccccgttcgccggctggctgcgcgagcagaccagctccgagcgtctcgacgccctgtgcgtcgacggcatcgacgactccgaccatgccgtgcggcaggtgcaggccgacgggcagatcaaatccggcaaacgcggccagcatggcatcaaggaccgtcagcaggtcatcggattcgtcaacgaaagctatttggcgcaactgcgcacgcgcatccaggacgcgcaacgccaatgcgacgagaccgcgcaatcgtacgcgagcgcgaaggaacaggccgaccgcctgcagcgagagcgcgaactcgccgaccagctcgcatacaccgcatgggagaagatcgacgagaacagcgcgaaggcggcgatcgccgacatcgaacgcaccatcgcctcggtcaggaacaatcccaagctcgccgaactcgacacgttgcaggagtcgctgtccaaggagctcgaccgctcgcagcgccagcgcatcgacatcgaacggcaggccgagctcgccgatcaggcggtgaacgcagcgcaggcatggctcgacgagcatgccgcgcagccgcagccgcagacgcggccgctcgacggggaagcggcggacatttcgccaaaagccgtcacgaacggacggactctcctgacggacgaggtggaggaggcgctcgccgaatcatatgagcagcgtctctccggtctgggggatgcgacgacccgcgcccacatgatcatcggcgcgggggcgccgcagcgtatggctcagggggataccttcgccgaccgtgtcatcgccggcatcggcaaggacctggaggcgcgcgtctccatgctcgaaggtcgtgcggcgtcggcccgcaccgccgtcgaggcgcggatgggcgcctatatcgagatgtatgcgggcggtgacgatacgatcgccgccagcgtggacgactaccggtattaccaggacgagttggaaagcctttcgaagctcgccaccgtcgaagccaccgccgtcgaataccacaactgcctcgacaagctgctgatgagcttcctgaccatcaaacgcgcgatagacaccgacgccggagacatccacgaccagctggaacgcatcaacgcgatgctggacggccagcagttcggcccgcgccacggcagcctgtccctgcacgcggacgtgcggcgccccgagcgcgcgttctggtcggccctgacccgcgtgatcggcaccctcaacgaccgcaaggcggcacagacggacgacgatcttgacggggcccggtgcgcgttcgcgtcctgcgccgcgatgatcgacatgctgcgccgcgagatcgggcagatcagggacgtcaacggcgtgaaaagctacggcgcccgcaacctcgacccgcggtgccgatcctcgttctacgcgctcgtgcgccactcggacgggcaggtcgaacgcatcacctcgaccggcggacggtccggcggcgccctgcaggagctgacctcgttcgtgtacggcgcggcgctgatctacctgctcggcggcggaatggacaacaagctcaagccttcctacacgacgctcttccttgacgaggcgctcatcaaggccgacggccggtatacgcggcgcgcgctgtccgtactgccgagactgggtttccaggtcatcgtctccgcccctgaaagcaagacgggtgagatactggaggtctccaccaaggcatacgtgacccgcaaggaccccgacaccggctacaccacgctgcacgaagccagactggacggcatcgatgagacggaaggcgcagatgagccggaaggtaccgtcgagtcggatgacgccgccgaatag

SEQ ID NO: 42156 - DNA, 1620 bp, Bifidobacterium longum subsp. infantis CCUG 52486
atgcgggagctggaacggctgcgaccggtgtatgagacgggcgtcctgcggttgctgttgcgccagaacgcgatgctgtacgtgtcgctgctgcgttccacgttcgacccgctcaccggcgagctgccgcgcgagaccgtggaggagcggttcgcgcaaagtctgaacgctctggccgacgccggcgaatatgcgccgcgcgaggaccagaccttcgccgaggccgctcatcagatcctcgccgacctgacccgtgaaggcgaaggcgactacgcctggctcgccaactcgcatgatgcggcctcacaccgattcctctaccgtttgacggcccgcgcccaccgcgccatcgaggcgctgagcaggctcgaagacgaatcacgcgccctgtccggcgcgcaggccaacagcatcatcatggaaatcgagcacgcgcgcatgcagctgaccgccgaccccggcgagcgcatcaaactcctcaaccgtgaaatcaaggaacgcaagcacgagatcaaacgcatccaacagggcaagcagcatgccacgctgagcgaagcccaggtggaggacgtgatcgccgtgatccacaacacgctgcgcggcgtgcccatcgacctgcgcgaactcgtgctcgacgagcgggacaacggcgacgccttgcgccggcgcatgcaggccggcgacatcagcgtggacgagaacctgacccgctaccacgatgaataccgccgctcgttcagcgaatcagacagcggccgccgcttcgaggacgccttccaggtgatcatcaccgacgagggccgccagcaaatcgacgaagccctgcgcgccatcgccaaaaccccgtatctggccggcgaatccggcgtgctgctcggccagatccgcgacgaactggcccgcatctacgacggcatcgaagccgtgcgccgccagatgcgcgtctccgacgaggcgatcagccggctcgtgcgccagcaaaccgacactcgctaccgcacgatgctcacccgcttgaaccgactgtacgcgcgcctcaacgcggatgcgaaaacccatatgggagacgcctcgcgcccgtacgacacggccacctcggacgcgctgttcgcgccattgccgatgcgcccggccaaatccatgacccgcgccaccgcacccggcctgagcgacctcgccgccgaagccccgcagccgactccggtggccgatctgcgggacatggtcaacagcggcggcccccgactcctgcgcatggtcagcctcatccggcgcaacccggtgaccgttgacaggtccgatgacaggcccggcgcaaccctcgtggacatcgccgccagcttcaaccggctgcccgaaagcgaacgccgcgaaagcgagatcgtcggcttcctgggcgggctgggagccgtaagcggcaacgccatcgccgacgagccgtccactgacggcgtcggcgtcggggtcgacagcgacatcgccaccgagccggctccggcgcagcgcggcgatactgcgacctggcattgcgtatcgatcgacggcgagccccggaactggatcactagaccggtgctggccgacatggacgagctgagcatcattgtggaggaaggatga

SEQ ID NO: 42157 - DNA, 675 bp, Bifidobacterium longum subsp. infantis CCUG 52486; identical to SEQ ID NO: 41629

SEQ ID NO: 42158 - DNA, 3549 bp, Bifidobacterium longum subsp. infantis CCUG 52486
atgatgcaggcgacagacgtgcagatgatcgcggaccggtggatgctggaatcccgccgactcatcaactggggctcctatgagggctaccacgaattccgcccctccacggaccacaagctgccggtgaccctgctcgccggcgccagcgaatccggcaaatccacgctggtcgacgcgcagatctccctgctgtacccaaccggtacgccgttcaacaaggcctcgaactccggccgctccgaacgcagcgactacacctacctgcgcggcatggtcggcgtgggcagcaccgaaaccggcgacgagccgctctacctgcgcggccgcgacgagaacggcgcaccgcaacccgtgtggggcgccatcgtggacacctatcgcaaccagaccaccggccaggtgctctcctgcgccaaattcctctacctgatgcccggcgacggccgcggcgacgtgcgccgacagtacgtggtctggggcaagcccgtggaccccaggcgcatggaccaataccgtgacgccccgttcacgccggcccagctcaaagccacctaccccgactgcctcacattccccagcgccgaagcgttccacacacacatctggagcgcaatgggcctgagcgaggccgcctgtcgactgctgcacaagatccagtccgccgacgcgccctcccggctcgacgacatcttcaaacaaggcgtgctcggcgtgcccgaagccctggacctggcccgcaccacggtcgaggactacgaacgttacgacgagaacttccacgccatggacgagaagacccgccgcatggacacgctgcgcggcatccaacaggcctacggcgaatacgccgccgcacgcggcaaggcccgcgccttcgaaccggtcaagccggccgtcgacggcacggtaccggccgtgctgcgcgactgggcattggcccgcatgcgcggcgaagtcgccgtccaactgcccgccgaccgcgccgaacaacagaacagcgaggcggaagccaagctgctgcgccgccgaaccgaagacctgcacacccgtctcgacatgatccgaggccagatgcagggtctggacggcggcaacctgacccgactcgaactcgaactcgaccaggcccgccgcaccctcgaagacgtgcaagccaaccgaacacgaatcgaacaaacgttcgcatccatcggcgagacgctgcccggcgacgaacaggcctggaacgaacgccgcatcaacgccgtgaacttcaaacgcgaatacaacaaacgagacggcgaatgcgaggaagccctcaccgccgccatcaacgcgcgggccggcgcacgcggcgacctcgaacgactgcaacgcgacttcgaccggcaacgctcccagcgcacccgcatctcccagcagatggacgaaacccgcgccatgctctgtcgcgccaccggactcacccccgccgaactgccgtacgtggccgaactcatggacgtgaacgaacacgaggaagactggcgtctcgccatgaacgtcgcctacgcgcccatcgcccagaccatcctcgtcgacaagcgccacgaacagggcttcgccgccaaagtcagcaccatcgacccgcgcaccatgccccgacgcacctggcagttcgtggacaccgcacgccactacgacgacaccggcgcgcacgcgaacatactcaccggagaacaggacggcgactggctgtccggcaaactgcgctaccgcgacgactcgcccttcgccgactggctgcgctcgcagacccaggacgaacgattcgacgccctatgcgtcaccgccatcgacgacaccgaccgcaccaaccgtcaggtgcaggccgacggtcagatcaaatccggcgcacgcggccagcacggcaccaaagaccgcgcccaggtcatcggattcgtcaacgaaacctacctcaacgcgctcgcagcgcaggtcgacgccgcccgcaacgcgctcagccaagccgacaccgactacacggccgccaaaacacagtccgataacctccaccgcgaactcgaactggccaaccagctcgcctacacgtcctgggagcgcatcgacatcgccggcgcgcaacggaccatcacggacacgcaggacgccatcgcatccatcaaaaacgatcccaagctcgccgaactcgccaaacagcgcgacgaactgaacgccgaactcgaccgtgtggaacgccagcgcatcgaatccgaccaggccgcggcccgcgccggcagcgccgtcgaagcggcgctcatctggctgcgcgaccatgccgacaccggcacgacggacgccgccggtgccaccgccgacaatgacgatgacgccgcgtccggcccgctgccggacgaagtcacggcggcgctcgccgaatcctacgacaaccgattcgccggactggcggacgccgccatgcgcgcgcacatgatcatcggcgcgggcgcggcaggaacgcaggcgccgggggagagcttccccgaacgcaccatcgccggcatcggcaaggacatggcctcccgcatcaacctgctgaacggccaggccgatgccgcacgcaccggcgtcgaatcgaaaatgagcacctacatcgcgctctacgcggccgacgatgattcgctgaccgccagcgtggaggactaccggtactatctcgacgaactcgccagcctcacccagctggccgcggttgccgccaccgacgccgaataccggcgctgcctcgaacagctgctcaggagcttcctgaccatcaaacgcgccatcgacacggatgccagcgacatccacgaccagcttgaccgcatcaacgccatgctcaaaggccagcagttcggtcccaagcacggcagcctgtccctgcacgcggacgtgcgccgtcccgagcgcaccttctgggcgcagctcatccgcgtcatcggcaccctgaacgattggaaatccgccgacgtcaacgattccgacgcctcgcgcaaggctttcgcggcctgcgcgccgatggtcgggctgctgcgcgccgaactcgcgcaggtcaaggacgcgaacggcgtgaaaagctacggcgcccgcaacctcgacccgcgttgccgctcgtccttctacgccatcgtgcatcatgccgacggcccggatgaacgcatcacctccaccggcggccgttcgggcggcgccttgcaggagctcacctcattcgtatacggcgcggcgctcatctacctgctcggcggcggcctgaccagcgagccctcgtacaccacgctgttcctcgacgaggcgctcatcaaggccgacggccgttacacgcagcgcgccctcacggtgctgccgcgcctcggattccaggtcatcgtctccgccccggaaagcaagaccggcgaaatcctcgaggtctccaccaaggcctacgtgacctacaaggaccctgacaccggcctcacctccctgcgcgaggccgtgctgcatcagaatgacatggacgatgaatcatcgtcggatatattgaaggatgacggggttgccgaatga

SEQ ID NO: 42159 - DNA, 1185 bp, Bifidobacterium longum subsp. infantis CCUG 52486
gtggccggcatgaaagacatcgctgcgatcaccacatgcgtgaagaaacatatgcgttcacatatgtacgacatcgaaccggcatggccatttcccgtgccggtgggattgccggaccaagcatttttggaaaccaatgcgattgcggtgcatgacaacaacaatgagatacggcaatgggcaagcaagaatggttgcgaaatcataaccaagcatcgcaccataggcacctctgtcgagctgatctccaaagtcgtcgttcctgacgaatcaatagccatgcatgtggttggtcgtacgctggcggcggaatgtcgcgaagcgcgccgccgcatagcatgtctggttgctgcttgtgacgttgctccggaaacaatcgaatcggccgctcgcatgacaggccatgaacagcctgacgacttcgatctgcttgtcagcgcagttcgatatttcaggcatcatgacgtgaccggtatgacgccgcgacagattccattgacaggattcagcggcaaatggctgaatgagtcaaaaaccaatcgtcgtaaggccatttgccgactgctcggtgtcgaaacgttgggtctgtcaaaacggccgaccgaactgcggttccgttatctcgatccggtccgcgacgatgctgagctcgaacgcatcatatggtgtccgtgggaaggcgaagcgttatccggcattaaatatgctgtcatcgttgagaacaaagacacgtatcagactatgccgccgattgcgcagggcatctgcatatggggttctggtcgcgctgtaagcgatgctgtacctgcggttcctgcactgcgtgacatgcgtatcgtgtattggggtgatatggatgcggatggactggaaatactttcgacattacgtgaatcaggtatcgaatgcgactccatcctgatggattgcgatgcatacgatcggtaccacagatttggtaccgatcgtactgaacgcagcgcgaagattgctatgcgggagcctaagccgacgcccggccttcaatcggcggagcgacgtctttatgaacgactgtgtgctgacaaaacaatcgcttatcggcgtatcgaacaggaacgcattcccatgcgtgatgcagttgacgaattacgcaagcttggcatccccgtggagtccattgaaaatcaggatttgccgatttag

SEQ ID NO: 42160 - DNA, 1380 bp, Clostridiales bacterium 1_7_47FAA
atgatacttatgaatgagataccggaccggttttggagcttattccgctccattaaccggtctacttatattgaggcactgttgaaaatcaacgaggaatacgagtacagcaactatttcctgagcagggaaatgtgtatccagcttctgggcgaatatttttccaggaagaagtatgtgctctggcaggacgagaccgaggatgactgggacaccctggaaccgcccgccacacgcgtcctcaactggcttttgaggaacggctggctcaggaaggtggacgattatgccaatatgaccgtgaacatcgtcatacccgattacgcggccgtgatgattgaagcatttgcaaggctggcaagcgatgaggaagatgagactgaagtatacatccagaatgtctatgccattcttttttctcttaaaaatgacccccgttccagtataaccctcctgaatacagcccttgtcaataccaagaagctgaacaaatcccttcaggacatgctgcacaatatggataagttctttggaagcctgctggagcagaagaattacagcagtctgttaaaggagcatctggaccgttatgtggaggaaatcgtcaataaaaaataccacatcctgaaaacctcggacaatttctatctgtacaaaacagatattaagcgctggatcaccgccatgcgccaggacgaggaatggaccaggcacatgtgttccagggccacgggtttctttggccgcaggccgcccgatgtgacggaggcccaggtcatggagaagctggaccagctggagcggggctttgatgatattgaacaccgcatcgccaatatggacaaggagcatacccggtatgtgcgcgccacggttacacggcttaattacctcctgaaccaggaggacaacatgaagggccttgtgatccagctgctgaaccacctttctgaatatgactgcacggaccaggatgtacaggtaataggcgggaaaatgaacctgtcccagctaaacatcctgtcggagaaatccctgtataagaaacgcaggacaaaatcagattttaaggaacatctaaaggacgaggacgtgtctgaggaactgtccatggaagaggtgctgaacctgaacaaggtaaggaaccgttacagcaaaaaggaaatcgaggacttcatcgaggacaggatggaaaacgggatcatggaagttgacaaggacacggcgcgcagcgatgaggagtttgagaagctgatcctggcctatgattattccaccaggcagaaaagcccgtacacggtggaaaacccggagcctgagatgatacataacggcaggtacagctatcccaggtttgtatttgcaaggaggaagagataa

SEQ ID NO: 42161 - DNA, 807 bp, Clostridiales bacterium 1_7_47FAA
atggcccttgaagaaggcattgcctattatgatacgttgctgcaggaggaacaggcgcggctcaccgcgtccatacgcctcctgcttcaccagacctttatcctggaacacaaatttgaccgccgttccgggaggttccagtataacccggatttcagggactgcaacaagcatctggaattcatccgcagttactttgctgtcagcgggattgaggtcatggaaaatacccagacaggaatcatctatatccagggcgggaacctgatgggggataagctgcccaagctggcaaccctgtacctgctggtattgaagctgatttatgatgaacagatggaaagtgtgtccaccagcgtgaatgtgtataccaccctcagggagatacacgaaaagctggggaattaccgcctttttaagaaacagccctcgcccacggatatcaggcgggccgtgacactgctgaaaaagtaccagatactggaacccctggatctgctggaggatttaaacagcgagagccgcatgattatctatccctgcatcaacgtggtcctgatgggcgatgacgcccggcagctgctggctttctttgacgaaagcgcggaggatgagggcgtacaggtaaaggcggatttggatgaggtggaccgggaacgtctgatacagccccccggactggacgacagaggagatgaggacgatggaacagatgaatatgggtcagatgaatatgaatcagttggaaccgaaccaggcggaaatgagccagatgaaaatgaaccagacgaaaatgaaccagattga

SEQ ID NO: 42162 - DNA, 3378 bp, Clostridiales bacterium 1_7_47FAA
atgccccggaagcggacggagaataaaggccgttttctggccctctccaggatttgcctgaacaactggcactatatcaataaacgtatcctttcgtttaatgaggacatcaatttctttaccggacattccggcagcgggaaatccactgtgattgacgccatgcagatccttctgtacgccaacacggacggcaggggattctttaacaaggcagcggccgatgactcggaccggagcctgattgaatacctgcggggcatggtgaacattggggagaataacgaattttcctatctcaggaaccagaatttttcctccaccattgtcctggaactgaagcgcagcgacacaggggaatgccagtgcgtgggaatcgtgtttgacgtggagacatccgccaacgacatttcccgccgctttttctggcacaaaggccctatgtgggacaatgcataccgcacagggaagcgcaccatgtccatagcggaggtggaatcctatctccaggaacatttcaacaaggaggaatgctttgccacctcccacaatgaacggttccgcagggtgctgtatgacacttacctgggcggactggattctgagaaattccccctgctgttcaaacgggccatccccttccgcatgaacataaaactggaagattttgtaaaagaatacatctgcatggagcaggacatccacattgaggacatgcaggaaagcgtcatgcagtatggacgcatgcgcaaaaagatagaggacacctgcgcggagatagaggaactgaaccgtatccggcaggcatacggcgtttaccaggaaaaggaacaggagctggagaaatatgcctacttcgtgaaaaagctggaaatcctggaccttcagtcccaggtcaggacactggccgaccggctgtccttggcaaaggaggacctgaaacgccaggaggatacgcgaacagcagtggaaacccagattgcggacctgaccgaacagggggacgatctgctgcgccgcattgcctcaaccggctatgaggacctgaaaaagcaggcggaggccctgaaccagcttctggagcgcctgggcaaaagcgaggccaggtggcagcagaccacccagtccctcaaggcatgggaagacgaggatatcacctccaaccagaccctctgggatattgaggaatttgaaaaccgcaccattgacaataaaaccctttgccgcctgaaggaatccattgcctccatgtgcgcggacacggaaaagcagcgccaggaggctgccgctgagatcagggacctgaaaaacagggaaaaacagacaaaagacgaactggaaaagctgcgttccggcaacaaggcatatcctaaatacctggagcatgccagaagcttcctgcagcgccgcctgctggaagaaaccggaaagggcgtggacgtccatatccttgccgacctgctggatatcaaaaaggaccagtggcgcaatgcggtggaggggtatcttggcagccagaagctgagccttgtggtccctcctaaatatgcccgtattgccctggaaatatatggggaactagataaaaaagagtattataacgcagctgtcctggacacggaaaaactgtcccaaagccagcccacggtccttgcgggcgccctatccgaagaggtgtcggtgcgtgagtcctatatccagccctacatcgaccttttgctgggaaaagtaatcaaatgcgccaccacccaggaactccgccagtgccggatcggcatcaccgacagctgcctgctctaccacagcttccggctccagcacatcaatcctgaaaactacagtaagtttgcttacatcggcaaggacagtgtgaggaagcgcatccggcttctggagcaggagcttaagtccatggaggaacagaaaaagcctctggaggaaatcgtacgtgagtgccagcgcatcctcagccttgagcgccttggcggtgagccggaggaatatctggaatggttaagggatatgggcgcctggaatgaaaagcagcgtgaaaagaagcagcttctgtcaaagcttgagaagctgaagacccaggacgtggaccagctggagcaggagaggaaggcggtggtaagcctttgcgacggcaagaagcgggagcgggacgggctgatgaacctgatccgggacaaggaaaatgaaatcagccggtaccagaatacagccatcagcctgaatgcggccctgacggatcaggaacggggctgggtaagcaacagcgggctggacacggaactggccggatacctgtcggccaaggaccatccaaggtatgaccgggaaaaggaaagctacagcacaaggtgcagccggatttcagaaagccgtgacacggccttccaggacctgatgaccgcaaggaccgactacctgcgccgttatcccaaccggaatttcccggtgaaccataaggataaccaggcatatgaccacctccttaaaagcctgtcctgcgaccatctggaggaatacaggcagaaggcagctgaccaggcccgggccgccgtggagcattttaaaaatgacttcatgtataaaatccgcagcgccatacgggaagccatgctccgcggggacgagctgaaccgcatcatcagccgcctggatttcggaaaggacaaataccagtttgtcatcgggcgcaacaagggtgcggacggcaggtactatgatatgttcatggacgaatccctggaagtaaacccgtcccagctgacggattccttcgacaaccagctggaccttttcaccacccagcacgaaaaccagtacggggttttaatcaatgacctgatcggcatcttcataccgccggaaaacgccacgccccaggagctggaggaggcgaagcgcaatatggataaatatgcggattaccgcacctatctgtcctttgacatgcagcagctgatccggaatgaggatgaggtgattaaaatccgcctgagccggatgattaagaaaaattcaggaggggagggccagaatcccctgtatgtggcccttttggccagcttcgcccaggcataccgcatcaacctatcccccaggatggagcgcaatcccaccatccgcctggtggtgctggacgaggcattttccaaaatggatgccgaaaaggtggcaagctgcatcgagctgatccgcggccttgggttccaggccatcatcagcgccaccaatgataagatacagaactatgtggagaacgtggacaagacattcgtgtttgcaaatcccaataaaaagtccatttccattcaggaatttgaacgggaccgtttccaggaactggtaaaagatttggaagaagaatag

SEQ ID NO: 42163 - DNA, 1359 bp, Coprococcus comes ATCC 27758
atgcagttacgttttgaaattccggagagtttctggagtctgtttcgttctgtgaacagagagacatacattgaggctttgatggcgatcaatgaagaataccagtacagcaattatttcctgaccagggaagtctgtattcaggtgcttcgggatctgtatatgaagaaacagatcgaacttaaacgagaagaagatgagactgagtttgatatgttggagactccgtcggcaaggattctgaactggctgatccgaaaaggatggctgaagaaaattgaagattataatacattggtgacgaatatcgtaattccggattatgcagcaatatttgtggatgcctttgagcggctttctacggaggacctggaggagacagagatctatatccagaatgtctatgcgacattgttctcgtttaaaaatgatccaagggtgaatctgaatatgctccggacagcacttatcaataccagacggctcaacaaagcactacaggatatgctgcataacatggataaattttttgcaaggcttctggaacagcagttttacggggatcttctgaaagagcatctggacggatatgtggaagagattgtccggaaaaaataccatatcctgaagacttcggataatttttatatctataagacagatatcaaagaatgtctgcgtcagatgcgggatgatgaggaatggatcgagaagatccgtgagcgtgctcgtgcaaccggagatacgggagaagatgtgttggaacttctggatatgatcgagagaggctttgatgatatcgagcaccgcatttccaatatggataaggagcacagcaaatatgtgcgtgcgacggtgacaagactgaattatcttctgagcggagagagcgacacgaagggactggttattcagctcctgaaccggatggcagaggatgactatgaagaggtcattcaaaagacgggggagaagatgaatctgtctttggtcgaaatcctgtcagaaaaatctctttataagcgaagaaaaaaccggaaggattttgtaagtcagatggcaccggaagaagaagtggatgatctggacaaggaagatgtgctcagattgaaccggatcaagcgcagattcagcaaaaagcagattgaagaatttatcgaagagcatatagagaaagatgtgctggatacagaaaaactttcccttacatcagaggaggattttgaaaagctgattctagcatatgacttaagtacccgtaagaacagcaaatataaaacgctggaagaggatgcggagacgattgaaaagaacggataccgttatcctgcactgaagtttgtaagaagacatttatag

SEQ ID NO: 42164 - DNA, 627 bp, Coprococcus comes ATCC 27758
atgatagaatattttgagcagcttacgcaggaagaacaggaagatctgacagatgtgatcaggcttctctatagacagacatttcttctggagaggaagtttgacaagcgtgcgggcagactccagtatcagagagagtaccgtatctgcgaaaagcacattgattttctgaaaatgtatttccagattgccggcattacgttatgcgagaatgtacatctgggtctgatctatattcaggatgagatggtctggggagaaaagcttccgcgtcttgcgactatttacatattattgctgaaactgatctatgatgagcagatggcattggtttcgtcgagcagccagattgtgacaaccttgggggcactcaacggaaaagcaggagattttcgcgtgcttcgcagtatcccgtcaccgaccgagatgaaaagaactattgccatgctgaaaaaataccagatgatcgagccattggatgtactggaagagttaaatgaaagtacaagacttctgatctatccgtgtatccatgcagtattgcagggagatgcggtgagagaagttctggaatcatttggaagcagccgggaagaagaggaggagactcttggaaacattggataa

SEQ ID NO: 42165 - DNA, 315 bp, Coprococcus comes ATCC 27758
ttggataacaggcagccgttctgggcgatttcaaaaatctgcctgaacaactggcattatatagacagaaaaatactgactttgagtgaaggaatcaattttttcaccgggcattccggaagtggaaaatcaacggttatcgatgcaattcagattgtactctatgctaacacggacggacgtggattttttaataaagcggcagcagatgattccgaccgtaccttgatcgagtatttgcgcggaatggtaaacatcagtgaaaataatgagtcccagtatctgcgaaataagaattttccagtacgatcgtaa

SEQ ID NO: 42166 - DNA, 1401 bp, Tyzzerella nexilis DSM 1787
atgagtataaaaaacagaattccaaaggagttttataaattatttaacagtaagtacgtcgagtattttcagcggattttgattgcactttatgagcagtcggcaagttcgtattcattgcttggacttacagaagaggaatgtcaggacacgatcgagatggagatttctacatttacgatggattttagtcaaagtgacctggaggaagagggagaacttctcacgcgggcgaatatggcgtcagtgatgcttcgaaagctggaagagtggggatggctccgaaaggattatgacgaatctctgaactgctatgtcgtttcatttccggattacagccagatgttcacagagttatttggcaggctatataatgaagaaagcagtatggagcgtgagagtctgttgacgatatacagccatctgtttacataccactcttctaaggaaaaggacaatgagattttgaaaagtgcgctgcagtcttcgaaggcattgcttcagatgctctcgaatatgcaagaaggaattcgtggattttttgaggaaatgacgaagcagaagacatttcttggaattcaggaagtgcttgtgcaggaaatgaataatacagatagccaaaagtatgcgattttgacgacaacggatagtttttaccggtataaagaagaggtgaaagagcttattgatcagaatctgatgggaaatgaggctagaaagcaggagttgcttcagaggagaaaagggctggaggcagattcttttgcgtggagaagaaatgaacgtggagtacagagctgcgatgaggcaatggagatcttgtttcagatcaatcgggagtttgacgggattgagcgcagatacaatcgtctcattgatcaaaagagagtatttgcaaaacgtgcggcggctcgtatccgatatattttggcggagggtgatgtggaggaagaccacacaaaagcgctgatcaggctattaaatatgagcgaccgaaaagatgagatattgaaaaaacttggtgaacgtatgggcatgacagagcgttttgcagtgctgaaagagaggagctttgcaaaaccgagagatgcgaaaaagaaagcgtttgaaccacaggaacttgtaaagacgggacaaagtgaggaacagttggatgagtttgttgtaaaaccattatatacaaaggcacagattcgggaatttcgcagacaaaatgaggtggatggagcatttcaggtgacaaaagataccgttcacacagtggaagatttagagaagcttttatttgtatggcaggaagccactgagattgcgcaagagacagaagagattgtgatcggagaggaatttacgacagaggaaggcttgcagtattcaggatttacaatcaggaggaagtaa

SEQ ID NO: 42167 - DNA, 639 bp, Tyzzerella nexilis DSM 1787
atggaacaatatttagaaagtttatctgtgacggaagcagaaaaattaaagaagactatcttgagtctgtttcgccagacgtgtattttgcaggaaaaatatgacccggttacactggtcccaagtgacaacgagcagtttgcaatatgcagaacacatcgcaactttattgaaaactatctttcggttctcggatgtgaattgctgtatgattcacaggagcgcattttcaggcttgtcggagaaggcgtggaggcggaggtcctgtcgaaggagacaacgattattgttctgctcataaagatgatctatcgggataagatcatgggaaagggacttgctgcgacggtgacaaatttagaagaaatcagagagtacgggaagaatacgaatcttttgaatcagaaacttccggacggtgaatggaagagcgctttggcgattatgaaaaaacatcagattgtggagtatccgggggcgcttcgtgatcttgaggacgatacaccgatttatatttacagcacgattaatttatattgcagttcggcgttgattaacgagctgattgaggcgtacagagaggagaatgcagaggatgaagcaggcaaagaagatatttacacgaattttgatgaataa

SEQ ID NO: 42168 - DNA, 3405 bp, Tyzzerella nexilis DSM 1787
atgaagcaggcaaagaagatatttacacgaattttgatgaataactggggcggaattgaccatcaggtactttgtctgaatgaatatgtgaatctgttcagcggaaaaagcggttccggaaaatcatctgtgatggatgccatgcaggtcgtgctatatggaagtgtcggaaatgatttcctcaacagagcggcagatgacagcgccaataaaagaagtgtgttaagctatttgcgcggagagcaaaaagatggtacggcgaaccgtgagaatcaggatttttatgcccatattgtcttggagatacaggatacagggcggaaaagttacacatgtatcggagcagttttcgaagtcggaaaaaatgatatggacctgaaacggttccgttttttcagccatgccggaaaaattccggaagatgagtatgttactgtgtctggaattccgtattcaattgcacagattcagaaactggtccatgaaagagaacagtcagaagatgcgaaaagcagaggaaatgtcaaccggatctatccgtccagagaagcgtatctgaacatcgtaaatgatattattttcgggtacgtagatgcaggtcggtttaaaacaatgcaaaaaagtgcgatcgcgcttcgcatgacaaagggaacgagtcagtttatcaaagactatatgtttccgaagagcaaggaagatacgatcactgcgatcagtgaacagcttgcggcttaccgggagataaaagagcgggtcgaagatttggaaaaacagattacccttttagaggaggtgcaggcacatgacagaaagcttacgcttgcaaaggcagagcaggtaaagacagaaacgcttttacggattttggagattgaaaacaggcgggtacaacttttgtcaaagacggaggagttctcaaatacatgtgagaaaatcgcgcaattcgaagaacagataaaagatctcgagatgacattgaatggaaaacgagaagaactgattggggtgcgcacggaacttcgtgccagtgattttgagaaaaagaaagaagaccttacaaaattgcaggagacaatccgtctgtgcggaaatgaggcaagagagtggggagaattgctcaagcgactgaatcgttggaatgagacagacggagtctgcgagtatgtcagtaacccgctttgcaatcttctggaagaaatcgaagagagaaatatcacagaagagaatgtgaacggactgaaaaagcgactgaaggaaacgtatgagagtatcaaatctgaggtggaagagctgaaggcagagcgacgacgtgtggaagcggactatcaggaacagaaggagatgcttgaggatttacaaaatgacaaaaagcattattccaaagaagtgaaagtggtcaggagaaaactgcaggaagaattgtcagcaagatacggcagaaccatatcggttgaagtgtttgcagatttgttcgacattacagacgaggcatggcgaaatgcaattgagggaagacttggaagaatcaaatacggtcttattgtggagccaagatatgctttagatgcagcgaatattttccggggaatgaagaagcgagaatacgagacggtggatttgatcaacacggcagcaatacagcgggatgagccgcaggcgatggatgagacgctgtatgatgcggtaaagacggacattccatatgtagatttttgcctgaaacgttatcttggacatatcaaaaaatgtgagaccgtggaagaactgcatgaggtcaaagacggtgttactcaggattgctattcatacagcaattacatgttccgacatttgcgggagaaagattacagatatcagacaatcggcagaaaggtttccaaaaagcagatgcaggaactggaggaaggcgtatacaggctgaatgtggaactgattcgtcttggcggggaaatctcagagcttgagcaagcggaggattttgagcgtctgcagacatatgattacgagaccatgctgcagaaatctaatgcggcaagccggctgaaagagtactacgaagaagaggcgcgtctgtcggaagaaatccgagaacttcaggcaggtacaagagttgcagagcttcagaaacaggaacagagtctgaatgagtccattcgaaagctggaacaagagaaaaatggggtacagaaagaggtgacaaattattcggcgacaaaaggaaagcaggaacaggatataaaggaacgcacagaatacctggagaagcttgaggaaggatttgtcccgaatgcagaactgaaagagaccgttcttgcggtcattgacaaaggaaatgaataccgttttgagagagagcagaaaaagacattcgaacagctgcgctcacaggaagaagaggaattcaaacaaagaggagatgcgagagagcaattcaataaagcatttccatcgtatgatttcagtccgttcgagaaagataataccgcctatgatgagttgttggaaaactgtaagcagaattttgagccgaagtataaggcggagtttgacaaacagtatcagcttatctatcagatgctgcgggaaaatgtgattgcgacaatcaacagtgagattaaagaagcgaaacgacaccgccgagagatcaatgcgatgctttctgaaatccgtttttccgacagtatttatcagattgacattttgccgactgacgatgaaaaccgacagttttatgagatgctgacggcggaggaactgaacatgaaagtgatcgaccgagacatggaaggacagttaagttttggtgaggatgccttttatcaaaaatacgaggcgcagattaagcgcctgactgacaaattcatgccgccgaaggaggacgagccttctgcgagagaaagacataaacgagatatggaaaaatatgcggattaccgcacgtatttgaaattcagcatgtacgagcagaccgaggatcaggacggaaatataaaaaagaattacgtggatgatatggcggggcgtgattccggaggagaaggacagaatccgaaatatgtggcgctgctggcgggatttgctatgctctatcatcaacagacaaaccgtgacaccaaaatacgtcttgtacttttggatgaagcattttccaagatggataaggagcgaagcgaagtatgccttgcatatgcgcgcaaactgggactccagcttgtcgtgtgtgtgccggatgagagactgcagtcacttgtacagaacgtggactgcgtgtacgcattccgaagagccaacaatcggatttcgatgattcatattgacaaaggggcatatttgcggatgatagagggagaagcagatgaagaagaaaacagtgacgctgtcacagtggctcatcgaacagaatga

SEQ ID NO: 42169 - DNA, 1200 bp, Tyzzerella nexilis DSM 1787
atgaagaagaaaacagtgacgctgtcacagtggctcatcgaacagaatgataccgaagcatatcgtgcaggaaaacttgcagggaagaaacatccgaaagtagaccaaaaactgattgatgcggtcggtgggatgcaaaaccttatccgtcaggcaagagtgcttgaacaggatgaggcacttggcaaaagcgggatgattcaatttcggtggcgtaatttaggaagtgacatctcacagattgattatgaggttgccgcaattccattgctttgcagaaagcttggtgtgaaagatgttcgggaacaccaagcggagttgataacacgggtacaaatgtggaaaaataaggtcagcgagtgtgagtgggtggaaaactattatgatacgcttttgagcaggcttacacttggcaaaaaagtctcagaagcagaagatgagaaattgtttttgtgtctgaacgcagtggcagcacaacaggaatttatttgggagcgtgtgttcagcgccagagtgttccacaattcgaagacatttcagaatgaatataagaacagcattgttacgattttgaaaaattgttctccgtactacgaggaggaaatagacgcagagacgcttctggcagcacataatatccactcctatgcgcagacactggagtggaaaggctgtcttgaatataggttggataatggtaatgttgtggatacagacgaaaacacttatggaacagtgattaattctcagacgatggaacacgccagcgtgacagacctttccggatgcaaacggattatgacaattgaaaataaggcaaattacgagagtatgattttctcagaagaaacgttgtacatttattgtcatgggtatttcacgccaaaagaagtgagatttttaaagaaaatcccggagcttgctgacgcagactgcgagtttttacactggggagatatggattacggcggaatcagtatttttcagttcatcaaaaagaatgtattcccagagttgaagccttataaaatggatcgaaccgcttttgagggagctttgaaagacggtgcaggcattgtgctggaacatgagacaaggaagaaactggaagcgaaagatgcgggtctgttggaagagttgaaacaggtgattttagagacaggaaagacgatagagcaggagctggtgagagggaaatag

SEQ ID NO: 42170 - DNA, 1281 bp, Roseburia intestinalis L1-82
atgagggaggataacgagacggaggaagatgaggagaccgcattgccggggcgaattttaaactggctggtgcgtacaaaatggcttagaaaaattgaagattatgaggcaatgactacaaatatcgtcataccggattatgcggcagtgatgatcgaggcatttgaaaaattagcggacgaaccgttagatgacacggatctttatatccagaatgtttatgcgactcttttttcttttaaaaatgaccaccgcatgaatcttaccatgttaaaaacggcgcttgtcaatacgaaaaagctgaataaggcattgcaggacatgctccataacatggataaattttttgagcgtctcttaaacaaacagtcctacgatgaacttttaaaggagcatttagagggctatgtggaggaagtagtcagacgcaaataccatattttaaagacgagtgataacttttatatctataaaatggacatcaaacgctggctgaaagaaatgcgggaagatgatgcctgggtggagcgcatccggcagaaacagcgcatggagcagaaaaatgcaggaagcaggtcttctgtacttgaaccgcagcggtcagaagaggatctgccatttttacatgcgagaagaaacagacaggaagatgtgttggatctgatcgaccagatcgagcgtggatttgatgacattgaacaccggatctcaaacatggacaaagaacacagcaagtatatccgtgcaactgtgagccggttaaattatctgctcagtgatgagacagagcgtcacggtatgctgatcctgcttttgaacagacttggagcggctgagacggaaagtgaacagagtgagatgttaaaagaagtggcggggcacatgaatctgtcatcttttgatgttttgagtgataatcctctttataagagaagacgccgcagaaaatttgaggatgatctgcaggaagaagaggaagatgcagagctttccagggaggatgtactgcgcttaaacaagattgaacaccgttatacggcaaaacagatcgaagagttcatcgaagagaagatgacagatggtattttagaaacagaacatatggatatagcggatgatgagtcatttgaaaagctgatccttgcctatgatatcagtatgcgcaaaaacagcagataccgggtacaggtggagaatagtcagattcagaatggcaattattgttatccgaaaatgacttttagcacaaagcaaaaatcaatagaaagtgaacagaattaa

SEQ ID NO: 42171 - DNA, 705 bp, Roseburia intestinalis L1-82
atgtttgaaggttacgaagagttaaatgcgcaggatgtggagcggatgcaggaagtgataagaacattgctctcccagacatttctgccggaacgaaaatatgataaaaaatacggacgcatgatgccggatcgcatgtatgatttttgcgacaggcatttggaatttctgacggagtattttgcggttgcagggataaaactttgtcaggatacggagcttggcatcatttatttagagggagcagacggaatcggtgagaaactgccgaaacttgcgaccatttatctgttgctgttaaaactgatctatgatgaaaaaatggcggctgtttcttccagtgtaaatgtaataacgacgtttggagaattaaatggaaaagcgggagaattccgtctcatcaagggaccgtcatcgatgacggagatcaaaagagcgtttgccattctgaaaaaatatcagatggtagagtttctggatgtgtttgacgaacagcttgaaaatacgaggatcatgatctatccgtgtatcaatttagtattgatgagagaagatgtgaacgggcttcttggcagtttttccgatgaggtaaaagataacgaggtagacgggcaggagaatctggagtggagcagtgaggaaacactttcagaaaatgatatgacggatgaagaaagtgatcttgaaccagaagaaatgaatgtg

SEQ ID NO: 42172 - DNA, 3366 bp, Roseburia intestinalis L1-82
agacagaagatggaacagatgaatcaggcatataaagtttttaccagaatctgcctcaacaactggcattatattgaccgcaaggtgttaggcttaaatgagagcatcaacttttttaccggacattccggcagtggaaagtccaccgtaatcgatgcgatgcagatcgtgctttatgcgaacacggatggacgtggatttttcaataaggcggcggcagatgactctgaccgaagcctgatcgagtacctgcgtggtatgatcaacattggtgagaataatcaggcagagtataagcgaaacaaaaacttttccacgacgatcgttcttgagatggaacagacgatcacaaaagaaaaagaatgtatcggtgttgtgtttgatgtggagaccgctaccaatgagataaacaggctgtttttctggcataagggcgagctgatcccgggggattaccggacagagagccgtgcaatgacgatcggtgaagtgcgcagctatttacagcagaatttccccaaagatgagatgttttacacttctaataatgagagattccgcagaaacctttatgatgtctatttaggcggactggatatggaaaaattcccgcgcctgtttaagcgtgcgatcccatttaaaatgaatatccggttagaggattttgtaaaagaatatatctgcatggagcaggacatccatatcgaggacatgcaggagggggcgatgctttatggcagaatgtgccgtaagatcgaagccacgatgcaggaaatcgaagaattaaagcagatcagtgcacagtatcaggtgatggaggagaagaaaaaagaactgttaaactgccgttaccggatggacaaactgacgatcttacagttagagcagaccatagaggaaatgcagcagcgtgtggaaaactggaaaaaggatgtcgtactgcagaatgaaagtcttacagaattgcttcaggtaaaagaaaattatgaaaaagaatacggcgagatcaatgagcagatcgccggaaccggttatgcaagattagaagagcagttaaagagtttggaagaaaacctaagccttctggagcgaagtaaaaacaagtgggatggtatctgtgcaaggttaaacggctgggaagatgtagatattgtttcgaaccagatcttatgggatatcgagaagttcaaagaaggcacgatcaccggagaggagatcgaacgtttgaaacgaagcctggtcgaagtacagaaagaggcagaaaaggacaggcaggaggcttcctcggagatccgttccatgaataaagaagcggatgtgttagagaaagaactcacagagttaaaacttggtaaaaaagcatatccgagagagttagaacttgcgagatccgaaattgcaagaaaactttctgaacagaccggaaaaaatatccaggtccgtatttttgcagatctcattgatattaaagatgaaacatggcgtaatgcgatcgagggttatctttcctggaacaaacttgcgctgatcgtggagcctgcctatgtcaaacaggcgatggaagtatacgaaacactcgacgagaagcgtttcttccgtgtatctttagtggatacggaaaagctgatgcaggaggattggcgcgtaaaagacaatgcgcttgcggaagaagtagaagcaaaagagccatatgtgagggcatttgtggacttcttactcggaaatgtcatcaagtgtacttcggtggacgaactgcgccagtgcaagatcggtgtgacggcagactgtttattataccagagttatcagttacgccgtttaaatccagacaattataagaaacatgtatatattggtgaaaagagtaagaaacagcgccagaaggaacttgccgccagccttgagaaattagagcaggacagagcggaatataaggagcgtgagacagaggcgagaaatatccttgcccaggaatttttaaatgatacggttgaggaataccagaacctgatcttagatctttcggagaagaaggaaaaagaaaaacagaaaatcaaaacagaaaagaagatggcagagatcggtgccggtactgtggaaaccttaaagaaacaggcggaggagatccacacaaaacagaaagagttagaagcaaaaattgatgatttaaaataccagatccggaaaaaagaagatgccattgaaaaggacggcaatgatttcatcacaagaaatgaagaacttcttgcgaaaaaacgggaactccgcggttccattgaagcggaggaggcatttgaagcctacattgccgggcagaaaaataagaagtatgacagcatgaaagcggcgacgcaggaggatatgaatcaggcggcggtgcagtgcacagagcagaaaaataagctggtcgatgtccgcatgaattatctgcagaatcacccgaagcgtgatttttcggcgagtgcggagaacaatgatgattatgataacctgctgtcggaactttcctgcaatgagttagaggaataccagaaaaaggcagccgagcaggcaaaggcagcggtagagcattttaaggaggattttgtatacaagatccgaagtgccataaaagaagcatatgtgcgcagggatgagttaaaccgcattatccgcaacctgaactttggtaaagaccgctatcagtttaaaataacaagaaataagggagcagacggtgcattttatgacatgttcatggatgaggatttagagatcgatccgtcctcacttgcgtcgccggtggaacatcagatgaacctgttttccatggaacacgagaacaaatatgggatgctcatgagcgagttgatccgcatctttatcccaccggaaaatgcatcccagcaggagcttgatgaagcaaaacagaacatggtgaaatatgcggattaccgtacctacctctcctttgagatggaacagatcgtggagggggacgaaaggcttgtcattggtcttagcaaaatgatcaagaaaaattccggtggagagggtcagaacccgctttacattgcactgcttgcaagttttgcacaggcgtaccacatcaatctgtctgcaagactgacaagacgcccgacgatccggcttgttgtgttagacgaggcgttttccaagatggatgccgagaaggtggcaagctgtatcgagctcatccgcggactcggtttccaggcgatcatcagtgcgacgaacgacaagattcagaactatattgaaaatgtagataagacatttgtttatgcgaatccgaataagaagagcatatcgatccaggagtttgagaagaaggatttttcacagctggttgtggaggaggagtaa

SEQ ID NO: 42173 - DNA, 1497 bp, Corynebacterium glucuronolyticum ATCC 51867
atgttggctgtggcagacgcactgagactggtgcgggtgcgggaagaatcccccgcttggtcgctgctcgcggccacaaacgcgccggtgatactggcggtgctcgcagaagtcttccgcggagacaaccgcacgctgacgggaacagaacttttcctcgccgtcgacccgctgcttgtcgatatccgcgaatccaccggcctcccacttcccaagtccgcggtggcctacgtgggggactgggtgaaagccggctacctcgttcggcgcagcccccaaggtgaaacagaagaattttacgaactctcctcagacgcgcacgtagcactcgactacatcgccgaaattgtggaaccacagcgcgtggtcacaggctcccggctaggaaccgtatacacggggctcagcgatctggcagcagacaccgacccggatgagcaggcggcaatcacccggctggaagcacagcgtgatcagctccaagaacggatcgacactatccgtgaacggggtatcagcgtcgtcgacgacgaccgggccgtggaaaaagcccgcgaggtgctgtcactcgcgcgggtgctgcccacagactttgcgcgcatgcgcacggatgtggaaaaagtagacagcagcctgcgcgaatcaatcgtggaatcgacgctcaacgccggagaagtgctagacaacgtcttccgaggagttgatctcatccaggaatccgaagccgggcgggcctttagagggttctacgaggtgtttctcaataacgaacgctccgcacggatcgacgcggtcatcgattccgtcatggaacgcccatttatgcaaaaactctccgttgaagaacgcgacgaactgcgcagtctcatgcgcatcctcgacgaatcctccggccaggtgcatgactccatgacggggctttcccggtcgctgcgtaggtttgtgcagtcacgcgaagcggaatcccagcaggcgctcatcacctccatcaacgaggcaggacggctcgcaatgagagttgggaaggcgggaatcgcctccaacgcaaagatcggtgaggagctcgagctgaccacccggctaccgcagtccattgcctcctggaacctctacgatccatccgattaccgcatcgaaagtgaccttgttgaagcggaggccggaaccattgacctcgaggcgctgcagcggcgcatccgagaaacagaaatcgactggcaggagttgtctggcaacatcaacgcgcttgtcacacgccgaggccaggccacgatcgctgatgtgctgaccgaattccccgccacgcaggggctcgccagcgtcgtcggtttaatcaagctgggtgcccgtcatgggcagcgcgccgatggcagcgaactccttcggtggacatcggcaaccgggaagaagagacaagcacgcgtaaatcggtgcgttttcaccgaatgtgtgccggagacatatcactcgcggatctttggaggtaaccatggatga

SEQ ID NO: 42174 - DNA, 603 bp, Corynebacterium glucuronolyticum ATCC 51867
atggatgagcagattcacctgacggaaacagacacaggaacgctcaccctcagccagagaaaagctctcgtcaagctgatcaagggaccgtttatcaccaccacaaccccagcagaccgagaggacttccgcgtgatcgtcgagtcacgcacgctgctttcgcagcagctcgataacctcttcctgaccctcgtcgtcgatgaaacggcgggagtcgcctacaccaaggtatgggatacagaggtcgacggtgcccgcacgctcctgcgcgcaaagccgttgaccttcgtagagacggtcatcatcctgcacttgcgccggcagctggcaaaatcgaacccaaatgagcgcacgattgtggaaaaacaggaggtcttcgaagccaccgccccctaccagacggcgcagggaactgaccacacgaagcaggagaagcatttcgacacggcatggaactccctagcaaaggcgagagttgtcactgagacatcaacacccgggcgctgggaagtgtcccacgtcctgcgcgtggcattttccagcgacgagattaaggccgtgaccgcaagctttacccaccttctggaggattcccatgactag

SEQ ID NO: 42175 - DNA, 3357 bp, Corynebacterium glucuronolyticum ATCC 51867
atgactagcaccatcgccccaggccagtaccgcctcaccaccctgcaggtgtacaactggggtacattcaacggtctccacacggtcgacgtcgcgcgcgccgggttcctcatcttcggcccctctgggtcgggcaagtccacgcttatcgacgcggtttcgaccatcctgggttcccccggacgtcaccgttttaacgccgcagcaaccgaatccgggaagaaatccggccgagatctggtcacctactgccgtggtgcgtggcaaaaggaacacgacgcggatcttgatgatgttacccgatccttcctgcgccccggaccgatgtggagtggggtaggtctccacttcagtgacgacgacggcggggagatcactgcacttcgcatcatgtgtctgaccgccaatacgacgacgcagtcggaggtgaaaaacctctttctgcttctccccggcaaggtgagtctcgtcgactgcgaggagcttggcaaacacagcgtcgggcaagccgatgccaagaaacagttcccggacctcatcgccatcaatcgcaacctgtcacccttttctgcagcgttgcgcaaacgcttggggatcgcggatgaaaaggccatcgagctgttgcaacgcacacaatccgcaaagaccctgggcgatttgaaccagctcatgcgggacttcatgctgccggagcccgcgacattcaagatcgctgacgatgctgccgagaacttcacggagttaaagacggcgcatgcaacggtggtgacagcccgcaaccagataaacaagctccgccccatccgagacagcgcagataaacacgcggagctcacgaaaacgattcgtgactacacgatggatctggatgccgtccccgtatacgccaacacccagcggctcggcttcgcccggtcggatctgcgtacgaaccagggggaactcgacgatgcccaggcaagcctcgaaaccgtgcaggaaaaagcggcggagctggccgagagggtgacgaacctccacgtcgcgatcaggggagaaaaagacgacggaattacggccgcagaacaccgccgtgacaagctccgcgacgagtgcgctcgcgtcgaaaatgaagcgaagaagttctttaccgttctgtcggaactgactccgttccaacccgccagccaagaagacttcattaacctccgcgtacagctggaagaagagattgcggacattgaagcaaggcaacagacctacggggacacccgcaccgatatctactcccgcctcagtaccctcaaacaggcaatcgaccagggggaaaaagatatcagaatggcggagaagttccggtccaacatggatcctcggcttcttcgcgcccgagaacgcatctgcgagatcacaggaattgcccgaggatccttgccgtttgtcgctgacctcattcatatcgccccagcttttgcgcagtggcagcccgcagccgaacgggtcatgggagggtttgccaggatgctcctcgtccccgacgagttttatccccaggtcgcagccgctgtggacgccacgcatctcggcacaaagctcacctaccaggacattgatgcgaagctggcatccctgcggccgcaagctatttccgcgcggagcctagccgccaccatcgtcgttgaacatgggcgctatgaaggctggatccagcaccagttatccacccgctttgatcacgttcgcgcggaatcgatcgaggagtttcgctcccaccggcgcgcagtcaccaaagccgggcagcttcgcgacggtagccgccacgtcaaagacgatcgctcccgtatcgacgaccgttcccggtgggtactgttcgaaaactcagatgcccgcatcgacgtgctcaccgcccaacagcgccagcggaaaaacgaactgaacgccgtggcggaggaacaaaaacagttcgaatccaaggcaaaagccgatgcggcccgcatcgtcagcgccaggcgggcgctggagacagaaaaatttgcgcagatcgacgtttctggggcccaaaacttgctggacgaggcgcaaaaagacctcgatgccctggtagacaacaacgatcggctagccggactacaagcagagctgcggaccgcgcttggtttgacgaacctccaggagacagagaaggccaacctgcaacagcggatcggtgttgcccgggaccgcgtatcggaggcaacggctacaatcgagcggctgacaagtcagctcgcgggtgccgagccacttccaccggatgtcgaaagacggatcgccggtcggatgaaggcgtacgctcgtgccatcaacgcgtccaatatcgatgccgcaacgattgaggtggagaggaaaatacgggcagacaagtccgccgcagaggggcagtgctccaacctccacaactcgatcaagcttgcaatgaaccgttaccttgatgcctggcctgagcgtcagggtgatctcaccccggaagttgaggcgctgggtgattttctcgcagagctgcaacggttggaggatgacgatcttccccggtttgaatccaatttccgcgagcttctttttgaccagacgaacacccatctgggacggttacgtcgagagatcgccacggcggcgagctccatccggaaagaaatcgaccggctgaacgagtcgctgacccttgtggatttctaccccggtcgcacactgcagattgaagtccgtgagtcccaacctgcggaagcgagggactttgcccgcaaactcgccgcggcagtcgacggcactcttgaaaacgacgaaggtgctgcagaacagcgcttcgagcggttatctgcggtcatcgaggatctcgtagaaagcgatacgacaaccgccaggcagcgtaaacttcgcctagatacgcgctggcacgttgcgttttacggagtcgaggtggatgccgacggcaatcgcggtgccgtctacgactccgccgagggactctccggtggacaggcgcagaagctttccagtttctgcttggcggcggcactccgtttccggctcacgggtatgggggaaccgccggcgaaagcgaggaaatcccgcgtggtcatcggcgaggatgtctatccccactacggcacgattattcttgacgaggccttcgaccgcaccgacgcggaattcacccgtacctccatggaggtttttgatcgctttggtttccacatgattctcgccacaccggaaaagctcctgcaaccggtggaggactatatcggcggcgtgcttatggtggagtgcccggaccggaagcactcccagacggctgccctcaccatcgaggaagctgagacgtatgcggacgattaa

SEQ ID NO: 42176 - DNA, 1116 bp, Corynebacterium glucuronolyticum ATCC 51867
atgcggacgattaaggatgtagaaaaacgcgcagcaaccttctatcggaataacagcaccgattggctggctggtaacttttcaccacttgcaataaacctccaaccaccgacagcccgcgacgttgacaaagacggcggagaggcattccgccggtggaaaggggagtgggcgagtcactgggcaccggtggaatacgcggacaagcgactgggagtgtacggcgtgtactcggtgcccacccgccttgtcatcgattcaccggagatggcagcacgcctagccggcaccacacaccagtgggagcacctcgtcagggtgctggagctccttgtcgcagatttaggggaggagtttcccagcactacggtgcgggaggtgctggcccgcaaagccacggcgtgggaaacgtggagcgatgtgactgtcgaccaattcgtcgccgttacccgctggctacacacccacaacgcgtcagcctattaccagcgtgaacttcccatcatgggggtggataccaaatggttggaaaaccacggaggactcgtgcgcgcgttagtcggcgaaccggtattcaaaccgaagcccgtcatggtggagctgcggagcctcgatccggaggtgccggtaatcggcgggctcgatcacgtcagtgccgaggccgcagcactttctggtgtaccagtcggttttgcacaggttgtgattgtggagaattacaccacctttattgcactgccgcagttgccagagaccctcgctgtatacggtggcggcttctcggtttccgagcgaatcggcttcatcggtgcaaacgtaccggtttggtattggagtgacctggataccgccgggtttgccatgctcacccgcgtgcgctcccgcctgccccaggtgcgatctgtactcatggatctcgacaccacgctaagtcatctccccttttccgtagaggaaacgcagacaacggccgtctccgaagagctgctacacgcagacgaacaggcgacactcgccctgctccgcgagcgtgccgagggttcctgcttgcgcatcgagcaggaacgcatcgggttcgcgtgggcggcgcaaaaactgcaggaactttcctggtag

SEQ ID NO: 42177 - DNA, 1497 bp, Bifidobacterium angulatum DSM 20098 = JCM 7096
atggaacgtctccgcccggtatatgagaccggtgtgctgcgtctgctgatgcgtgccaattcgcagctgtacgtggcgctgctccgctcctcgttcgatccgctgaccggggaactgcccagggaagtcctcgaggagcgtttcaccagggcactgtcgcaactcgtcgaaagcggtgactacgcgttcaaagacgatcagacgctgcccgatgccgcgcatcgcattcttgtggagctttcccgcgaaggcgatggcgactatgcatggcttgcgaattccctcgacgtggcctcgcaccgctacctgtaccgtctgaccgcacgcgcacaccgggcgatcgaggcgctgtcccatcttgaagacaccacgcaggcattgtccggcgcccaggccaacagcatcatcatggagatcgaacatgcgcgcatgcagctcaccgccgacccgcataaacgcatcgaactgctgaaccgcgagatcgaggaacggcagaaggagatcgaacagcttgaacaggacggggctgtggaacagctgtcgtccaagcaggtcgaagacatcatcaacgtggtgcacaacacgttgcgcggcgtacctatcgacttgcgtgaactggcgctcgcggagcgcgacaacggcgatgcgcttcgccgccgcatgcaggccggcgcgatgtcggtggagaacatcctgagcgcataccacgacgaatatcgcaggtccttccgcgaatccgacagcggcaggcgtttcgaggacgcgttccaggtcatcgtcaccgaggaaggccgccgcgagatcgacgacgccgtgcgcgatatcgccaaaaacccgtatcttgatggcgagccgggcgtgctgctcaatcaggtcagggccgagcttgaacgcatctacgaaggcatcgaggatgtacgccaccagatgcgcgcctcggacgaggcggtgagccgtctggtgcggcagcagaccgatacgcgctaccgcaccatgcttggcaagctcaacgcgctgttcgccaagatcagcggcgaggcgaaggccaatccgaacagtgcctccaggccataccataccgataccggcgccgtgcagttggcggtattgcccacgcgcccggcaaagccgatgattcatgcggccccgccgagcctgcaggagcgtgaaagcgttccgacagtggattcgccggatctgaaagccatgatcgaggtcggcggtccgaggcttcggcacatgatggatgtgatcagacgctcgccgcgcatgcttgccgatggcagggtggatcttgccgccagtttcaatgcattgcccgaacgggaacgcagggaaagcgagattgttggtttcctcagcgcgctgcatgcgcaaagtgacgcgcagtacgtgcaatggcattgcgtatctcttgacggtacgccgcgagtgtggcgcaccaagccgatcgcggcaagcatgcagaccctcgacgaaatcgtgggggaggagtga

SEQ ID NO: 42178 - DNA, 1029 bp, Bifidobacterium angulatum DSM 20098 = JCM 7096
atggctggtggaaccggtggaacagatgaccgacacgatacgaccaagcggagcgaagtgaacaatcagaacggaaacgccatggaatacgaaccgaacgagataacggacaatgcggcgggcggcgcggacgcgcaagctgcacaggcggtcgatctggatcgtcccgccgaagctgttgccaacccgtatgccttgttcaacggggacaccggagacatgaccgtcgaagcgcgcatggcggccatcgccctcaaacgcgaccgatacatcagcgacgatctgtactggctggtgcatgacgatatcagcatccgcgaatccgtcacgcgttcgctgaacaacgatttgctggagttgaaggagaaccgcaagtatcgcatcatgtacgcagctccggtcaatggcgcggagaccagcatccgatcgctcaaaacgcgtgcgagcctgacccgtgaggaggcggcgatgctggcgttcctccgcattcgggtgctggaatacgagaacacgcgggtcgagccgaagggctggatcgtcagtcatgatgagatccgtgccgcgctcaccagcggttcgggctatcttgcctccagcaatgacgaggaaggttcggcgaagaagatccgttccacgatttcccgtctgatgacctacggatatctcgatcaaggcgacggtgacgacatgtatctcatcacaccactggtgccggtggtgctggacggcgacgtggccgatcagtggcttggggtctcgacggatgatgccgccgaaagcgatggcatcgacgaggctgtggcggacggacaggcggacggctccgataaggccatggacgatgccgatggcacgaacgcgtcggagtcaccccgaaacggagacgatccctacgatgcggatgaagcgcgtgatgcacaagcggatgtcgtcgcacagcaggaagccgtggatctgtgggtctccatggggacaggcgcatcggatgccgctggcatggcaggcaatgagcacgaggagaatctgtga

SEQ ID NO: 42179 - DNA, 3498 bp, Bifidobacterium angulatum DSM 20098 = JCM 7096
atgactgacaacgatatgcatatcattgcggaccggtggatgctggaaagccgtcaggtgattaactggggatcatatgagggctaccacgagttcaagccgtccatgagcgacaagatgccggtcaccctgcttgcgggagccagcgaatccggaaagtccacgctggtcgacgcgcagatctccctgctgtacccgaccggtacgccctacaacaaggcttccaattccggtcgttccgagcgtaacgattacacctacctgcggggcatgctcggttccagcgacagcgagaacggcgagaccccgatctatctgcgcggccggagcgaagacaacgccccgcaggccgtgtggggcgcgatcgtggacacgtatctgaaccgtaccaccggggcggtgctttcctgcggcaaattcctgtatcttgcgtccggcgatggtcgtggcgaggttcgcaggcagtacatcgcatggaacaggaaaatcgatccgcgcaagatggatcgcttccgcgatacgccgttcactgccaccatgctgaagaaaacgtaccccgaatgcgattccttcccgaacgcggaaggcttccatgcgtacatctggcatgaaatggggctgagcccggaggcttgcaggcttctgcacaagatccaatccgcggatgcgccatcgcgcctggacgatatcttcaaacagggcgtgcttggtgtgcccgaggcgttggaactggcccgtaccaccgtcgacgattacgaacggtacgacgagaacttccgcagcatggaggagaaggccaagcgtatcgccaaactgcgcgacattcagaaccaatatggcgaatacaccgaagcattgcaggccaggcgtgaattcgacgcggtcaacccggacgatgaacagggcaatgccacgctcggtgcctgggcgtactcccgtatggccggcgaagtgcgttccggtctgccgatcgcacagcgcaaatgcaaggagtacgagcgcaagcttgaggccgcaagccgggaaagcagcgacttggagatcgaactgaacgaggtcagggagcagatcagcggcatcgacgacggctcgctcgcacggctcgaaggcgatctggaacgtgcgcgcagggacgccgaggagacacgcaaacaacgcacgagcgtgcaagcccgcttccagcaggccggcgaaaccatgccgaacgatgaggaaagctggaacgccaagcgtgacgccatcgcccaggcgctcgactcctacgatatcgacaaggcgcagcgtgagaaccagcgtgatgcgatgtatgacgaggtgcgtgactgccgcaaggagcgtgaaagcctgcaggccgacctgaaccgtcagcgcaatcagaaaacccgtatcacgcaggccatggacgaggcacgcgccatgctggccgatgcggtggggctcgatcccaagcatttgccgtatgtggccgagctgatggacgtgcgtgaggattccgaggcctggcgtgtggcgatgaacgtcacctatgcgccgatcgcgcagaccattctggtcgacaagcgctacgagcagggcttcgccaagaaggtcagcggcatcgacccgcgtctgatgatccgccgcacctggcagttcgtggataccgaagcctcgtacgacaccgcgagcaccaaggggtggatgtccagcaagcttcgcttcaaagccggttcgccgttcacgggctggctgagggaacaggtcgcgtcggaacgcttcgacgcgaaatgcgtgcagaccattgacgacgataaccgtgacgaacgccaggtgcagacggatggccagctgaaatccggtgcgcatggcttccacggcatcaagaacactcatatgatcatcggtttcgtcaacgaacggtatctgaccgagttgcagcgcaagcttgagaaggccgtcgagcagctggccgaggcgacgatccgtcatgaacgcgcgaagcgccaggtggatttgctgcgagaccagaaggaactggcgaacttcatctccgatatggattggagcaaggtcgatgtggtcggtgccgagcatgcggtcgaagacatcaagacacgcatcgaggagattcgcagcaatcccgaactcgccaagctgacggcgcggcgcgacggtctgctcgctcaggtcaatcaggccaatatggccaaggcgcaggcacaggtcgacgtgaacagcgcctcgcatattgtgcaggccgagcaggattggcttgacgcctacggcaaggccgagttcgacgattcgcggttgccgagcgtattgtccaaccagctcaccgacatatacgaggcgacctatggcatttcctccaacgtgaaccgtgcggagatcatcaccgcgaatgtggtcggcggcagcggcgtattcgccgaccgtgtcctgcacaacatggccaatgagatccgcaagcgcatcacgtcgctgaacgatcaggccggtgtgatgcgtgccaacgtcgagacccgtatggcggattatctgggctcctacgctcccgacgacaatatggtcactgcaagcgtggaggaataccggttctatgtcgaggagctgaaaagcctcgacatgctcagcacgcggaaggccacggacgaggaatacgtgaacagccttgaaaagctgcgcatgagcttcatgcagatcgcccgtgccgtcgataccgataagaaacgcatcgacgagcagcttgaccgtatcaacgcgatgctgaaggggcagcagttcggcccacgtcacggcagcctgtcgatcagcgccgaagtacataatccggagcatgagttcgtgggactgatgaagaacaccatcgccgatctgaacgattggaaacaaagcgatcaggggaatccggccgccacacgcaagcagttcgagcgctgccgcgcgctggtggagcgattgcgacaggagctcggccaggtgcgcgacgcgaatggcattaaaagctatggtgcgaagaatctcgatccgcggtgtcgctgttcgttctacgcgctggtcaagcatgaggacgggccggacgaacgcatcacctcgaccggcgggcgctccggcggcgctttgcaggagctgacgtcgttcatctatggcgcggcgttgatctacctgcttggcggcgatgtgaccggtcaaccgacctacaccacgctgttcctcgatgaggcgctgatcaaggcggatggccgctatacgcagcgtgcattgggcgtgctgcccaagcttggcttccaggtgatcgtgtcggcgccggaaagcaagacggccgagatcctcgaggtggcgaccaaggcgtatgtggcgtacaaggatgcgtccaacgggcgttcctatctgcaggagatcacctccgacgagatcacccggcttgaatccgagatcgcggccgatatggacggcgagacgggtgaagggcggactgacggcgacgccgaaagcggggacggctcggacaggtag

SEQ ID NO: 42180 - DNA, 1212 bp, Bifidobacterium angulatum DSM 20098 = JCM 7096
atgtcatcaaggaacgccggcagtgtaacggagcgtgagaggcggcttgcggcacgtaccgagcaatggcttgtcggaaaggtcgaggactatctggacaagcaacggttttcggcgaatccgcagtggccgtatgagttcaacgtcaaacagccgtcgaagagcgagctgatacgggattcggacacctgcatcgcccaagcgagggccattcggtcatgggcgcaatcctacggctgccggtatggcgagaagtcccgttcgctgggggcgtattgcggcaccacgccattggtgacgcgcgtctgcgttcctggcgagcatgaggcgctggaaatcgcgggacgtcaatgcgcgcaccggtattgtgctacgcaacagcggttttcgtgtcttcgcggggaattcgatgtgtccgaggatgtgcttgccgcggtcgtatacaagctcaaagacatggacgatcttgacttcgaactggtctgtcaggccgcgcactatttcgcacggcatgacgcctccggcatgaggccgcgcgctgtggcgattccgggattctccgccaaatggctgggcggcaagggctctgtgcgtcgtaaggccatatgcctgttgctggggcgcgagtcgcttgacttcgaagagcgccctggcgagatccgcctgcgctatcttgattcggcccattgtggctatcccgatctgtatgtcactcagccgtggcgtaccgccgattgcgcgaggttcaggtatgcggtgattgtggagaacaaggacacctatcaggagatgccgcagatcgatgattgcatctgcgtcttcggttgcggaagggcggcgaatcgcatggtttcgctgcttccgtggcttgccgatacgccgcatgtcgtctattggggtgacatggatgccgacgggcttgagattctttccggcatacgtgaatcgggaatcgactgcgattccatattgatgaatatggacgtctataggcgttaccggcggttcggcaccgaatatacggaacagggcaggaggatcgagccgcgcaaagtgggtgcggtgccggggctgcgtgccgaggaacgcgaattgtacgaggcgctgtgcaccggcgaaggcgtggagtatctgcgcatcgaacaggaacgtatcccgatcgtggatgccgttgccgagctgtgcgcggctggtttcccgattgtcgtctga

SEQ ID NO: 42181 - DNA, 1458 bp, Pseudomonas coronafaciens pv. oryzae str. 1_6
atgagtttgtacgagaagcaagcgcgttatcgtcgtttgcatagtgaacagtctgcctggcgcttgctgcgtgcagattcggcaccgattatcctggcgttcatcgacagcctgtttgctgacgaacaagaggtgttgttcgcacgtgcaaaagccgcccttgaggcggagttgccgacctggcagggagcgtatggcatgcaagacaacgccaactcgcacctgcgcaactggatccatgccggctggatgcgtgagcatgatgaccacctgacccgtactgacgcctttcatcaggcactgcgatttgtcgagggtcttgagagcagggataccacgacatctgccacccacctacgccgagtccaagacgctgtacgagacctagcagtcgctctcaacccgagtgctgaagagcgtttgctcgtactgcgtgaacggatggcagaactgagtgaagaagtcatgcggctggaagcaggcatcgtgcccgagctatccagtgccgaacagcgtgagcgagtacgcggtgtctaccagatggcctccgggctaaccggtgattttcgccgggttgaggatgacatccgtcaacttgaccaaagcatccgtgttcagatgatcgaatcggaaggcggtcgtggcctggttatccagaaccttctggataatgaagatgcacttttgcagacagacgctggtcaggcgtttgacggctttttcaggctcctctgcgacgagaacaggagcgtagaattccgtgagcaaatccggtcaattttgaatcgtccgactgccagatcccacctgaatgcacaagaaatccgttttctcacacatctggttcgtgagctgagtagcgaaagtcagcgggtaatttcgatacgtcgccgcacccaggaaagcctcagggcatttgtcgaggctggtgctcagagcgaacgcagggcagtcgagcaggtgttgcgccaactggaaaaactcgcagtcacctttaaggatcaagacattggcccacgcacctcactaaaggtatatgtagccagcgggccattctcggttagctcgccatcgagcattcgactgatgcaaccgcaagccagcctggataccagcaaggtggttccgcaaagtaaccagaccactgtgagtgacaccattcttgagtgtttagaggctgttcagattcaggaggtggccgaagccatgcgcgacctgctgaaaagccaagggccgatgagcctggctcagatcgccgagttgcgccctattcagggcgggcttgaggagttggtcgcccttgtccgcatcgctaaagccattgaagcggtttccctcgagggcgtcgagcatctggtggtcgctgaccgacaaggtcagaccatacgtgccaaaattcccgtgctactcctgagcgccgaccagttcccggagaatttagagagcctccccctatga

SEQ ID NO: 42182 - DNA, 798 bp, Pseudomonas coronafaciens pv. oryzae str. 1_6
atgaatcgtgaagaccaaaacaacgatgctttggcaccgtcgctcttcgacacttaccgccaagtggcagtcactgccctggccgatacaggacaccgggaagaaggactggcaaagcaggaggagcccggcgaacttgacgaagtggccgtccaacctgaatcacaggttgtctacgacatcatgccagcggaggctcgtcgggccctgaggctgctattgaacacgggtgttgtgcgggcggaaaagaaacgcttggcttttgaagcgctctgccagcaccgagcactcatcgccgctcatttggccaacatgttgctgtgtatgacgctagaccagaaagcaggcattgctatccttctcgagcaggacttgagcgaatccgggttcgaggatctgacagacgaggatggctcaagcctagttggaaaacgcactatgccgctttacgacaccctggtgctgctggtgttgcgcaagtactaccaggagcgggaagtcattggtgagaacaaggtgatgatcgatgtcgacaccatcgccgaactcatgacccctttcttgaagctcaccaacagcagcgctcttgagcgcaagaccctcaatggctctatagctaagctgcgcgaaaagcgcctgctggcgaatgtgcgcggcgacggtgagcgattggaaatcaccccggtcattcggtacgtggtcaatgccgacttcctgaataccctgttaagcgagtaccagctgctggccgaacgggggagtgtgatgggtcaacaggaggtagaagacgatgtctga

SEQ ID NO: 42183 - DNA, 3390 bp, Pseudomonas coronafaciens pv. oryzae str. 1_6
atgtctgacacgaccaataccagctttggcgatctattctctacaggacagatccgcctagcggagatctcggcttacaactggggttccttccacgggttacacacggcagtgatcgaccctgaaggcaccctgatcaccggtgataacggtgcgggtaagtcgacgctcatcgatgcgcacatggcactgctcaaccgacctgggcaaacgtcattcaacatcgcagcctcgcaaggtgatcgttcagatcgcaacctgatgtcctatattcgcggcaattacgggacagcccacgacggttctcaaaccctcaacctgatgaagcgcgatggcgccaccatgaccgccttgcgtgccctataccgggccgacgacggctccgagataacgttggtttccatgttctggattcgccaagccggcgcctccatgactgacctcaagcgtttctacctggtaggtaagcggaatgtcagtctggaagtgctcctgcagcagtttggttccaacaacgtgcgccagctcaagcagtatgtcgatgacgacccaatgcttaagcacttcgacaacagtttttctgcgtaccaagagtatttcactaggctgctacgcatggaaaactccaatgcgccggcgctgctgcagcgtgcattgggtctgaagaagattgatgacctgacagcgctgatccgtgaactggtgctggagccaagcaaagttcgcgatctggctactggggttgttaaggaattcgacgatctgatcgccgtccacaatgagctggatacagctaagcagcaaaaggaggtgcttagcatcctgccagaccataaccggaactatgagagttccttggaggagcaagggcaggtcaactcagaggccactgggttgactgcattcttcggtgagcagggcaaccgactctggggaatgcgctgtgaagatctggatcgctcgctggatgacctgacgtcggacggtaagcgtttggctgaatcggtgtcgcggaatgaggagcgtgtaacctcgcttttacacgcctaccagcagcagggcggtgatcgccttgatagcctgcggcgtgaggttgaggatgcggagaggggcttccagaccacgaccaataaggcccatgactaccagaaggacactcgtgatcttgggcttgctgaaacgcttaccgcgagcgccgtgcgggacaacatcgcttcggccaaagctgtcctggttgatttacccgctcagattgacgatgcgaagaatgctttcggcgagtcgcgtggcgctctctcgggcattacccaacagataaagaacctgcaggcccagatcagtgaaattgagaagcggcccaactccaacattgacgccgcgtttcagcgcctgcgggacgaaatggttgagagcctgcaactcaacaaagatggcgtcgtatttatcggtgagctgctcgacgtgcgcagtaccgaagcgcgttggcgcggtgctattgagcgggcgcttgggggccaccggacaacgttgctggtgcccgaagacaagttccgcatggttaccggctgggtaaacagccgacacactggcctgcatgttcgtgtccaggttgtcagcaacaccgagcgcaacccggagttcctcggcgacgggttcctacgcaaactagaatggaaagaacatccgtatcgcgactggctaaagcgccatctggcgcgtttcgacctgcactgtgtggattccacagaagtgctcaatgataccccttactccatgacccgcgagggcctggtgcacatggaaaaggggcgttttgagaagaaggacgggacacgcgtcgacgataaaaagaactggtacctcggattcaacaacctcagccgactggcggcactccaggaagagggggagcgcctgcgggaaggcctcgattccgcccgatccgatgaatctgtaaaacgtcaggaaatggacatcctactggcctctgaggccatctggaaacgtgtggctcaaaccctgtgggatcaaattgacgtcactttggcaaagcaacacctggacaccctaaagaacgacctagcggccatcaatgctccggacagcgatctgagtaaggcgaaggcgctgcttgaactggctaaaaaagagctccaggaaatccgcaatgcgcaaaaccaaaatgccagagcggtcggtgggctcgagttggagatccagcaggccaacaaaagtcgtcaggtctcagcccttgctgccagtgcaggcttggcagacgctgtgcgccagtcattgtccctgcgtgttggcattcttaccttggaacatctggataaactcaatcaactggagaaaacccagcgagagttcctagatgatgcattgaactcgattggcaaacgagcgaatcactacaacggccgcatgatcgcgatcatcaacagcttcaagacaaagtggccgttggttgccaatgactggttgacgactatcgagggtcgccaggattacatcgactacctcgacaagcttaataacgagggtctgcccgatctggttgagcgcttccagcagcgtctaaacaacaataccacccagtccctgggccgcatgcaacgggccattgatgacgagcgtgaggacattcgggatcgtatcgccaccatcaacgaagtgctggagcgtactgagttcaaccacggcacgttcctgcggctgaaacatgaggatgaacactacgcgcatgtcaaagaattcacagccttactgggctcggttcttaagcatgcctcaagcgttgatcacgagtctcggttcctcgagctttgtagtctgatcagcaagctggaaaaggctaccaattcagccaccgccattaacctggagagtcaacgcctcttggattcgcgctaccgcatgacgttctatgccaacgaaatcgtgaaggaaaccggcgccgtgcgtgatgtgcttcgctcatcttcaggcaagtccggtggggagaaggagtcgtttgccggcatcatcgtggctgccagtctggcctatgtgttgaccccggatggtgctccgcacccgatgtactgcaccgttttcctggatgaggccttttccaacactgccgataaggtgagtcgccgcgtgctgcgggtgtttcgtgagcttaagattcacgtcaatttgattacaccctacaagaacctgaacctggctcgtgattcagcccgctctctgatcatcgccgagcgtaagatcgatggccatgaaagtcgcctgagccagatcacttgggatcaacttgaccagcaaagcgctgaacgccgggaagctaagcaaacccaattggccggggtcgctgaaggcctgggcattcagatggagcaactctaa

SEQ ID NO: 42184 - DNA, 1197 bp, Pseudomonas coronafaciens pv. oryzae str. 1_6
atgcgcagttgggggcgtttgccaaccgatgtcatgcgcgaggtcgagcgccttgaatgggataacgcaaccaatctacgggggcgactgcagggcacgcggcgctttccgatcagcttgacgcttaagccaccagcggctggcgatgcattgatggacattgaccacttccacaactgggtcaatgcatggcggcaatggagcaagcaaagtcaggttaagtgggtaacccgcaggtatcgagtggtgggtgatgtcgaggtaccggagcggcttgatctttcgaatgttaaagatttgattgaagccatcgggccggcagccgtccagcgttctcagatctgggcggcactcatggaaccccttctggcagtggatcgaaatctgtatgacaccctcattggccagattcttgtagtcgagcaaatgagtcatcgtgctgcccagcagatggcgaaggtgctgccacagttgcgtcagggtatgggggatgggtgttacctgcggggggtgcctgtacaagggattgataccaaatttctggaaacgcacacacctctgctgaccaccttgcttgatgtcatccacaatggggcactgtgtgaagccggtgggctggaggcctggctcggctgcctgcaaaccccgagcaactggctctatattcgacccttgtgtccagaacttaggcagcaaatgggtggcttctcagtattacagattcccctcgaagagtttttggcacgaccattacctggtcgcagggtgttggtcgtggagaacaccaagcccggctacgccttgcccgaacttccagacacggtcgccatctttggcggcggccggaacacccaatggcgtatggctccatggctcgccgagcgggatatagcatattggggagacatcgacagctgggggctgactatccttgctcacgccaggcaggcactgccagggattacggccttgatgatggatcacgaaaccttaatggcgcacatggatttttccgtggaggagccgcgctcaacgaaccttcctgctgtgggtttattgtcggaggagcgcctgctgtttgagtcgcttatcaaatccgcgcaaagcattatccgtttggaacaagagtaccttgcccagaattatgttttgtccaagctatacagctgggcgaagtgctgcaccacgaaatcgtaa

SEQ ID NO: 42185 - DNA, 1455 bp, Bacteroides sp. 9_1_42FAA
atggatatgcaagtagaagaaataacacaaatattacgagagtcaccaagcgtacgactcatcaaatcaagaagtgtggatttcttcttgtcttttgtcattgaggcgtttgagggacagtcggctataatgcaggaacgcttgcacatgctactggagaaccgactggatgagcaggaaaatgcgttggtggaggataatcttgaaatgacaagactaggggagtcgaacgaacagaaagcaaaacgactcatcaaagactggacagacaagggattcttgaccaactatcagaacgaagagggagaggtgatatacgagatttcgtcgcacacaagcaaactgatggattgggtggtgagcttgaaaaaagaggattacatcggtacggaatcgaagttcaagacgctgtttgcccaactgaaggaattggtggaatactcgaacgaggaccgcgagaagcgactggaactgctccgagccaaaaaaatggagatagagcatcagattcagcgactggagatgggcgaagaggtcgaggtgtatgaggactaccagatagaaccacgatacaatagcttgaataaactggctaaggagctgcttagcgatttcaaggaggtggatgacaacttcaaggggattatcaaagagatatatgagcgccagacagacaatgcggagaagaaagtattgctgaactacatctttgatgcgtatggcgaactgaaacaatcgcaacaaggcaagagtttctatgcattctgggaattcctgctctcggccgatctgcagaaagaatgggacgagttgactggtgcactctatgaaacactggagaatagaggcattgatgcgcatgacatgtttctcagggaaatgaaaaagcatctgtttgacgcaggcgagaaggtggcgaaaaccaacgatcgcatgagcgagaaactgagtcgcatcattcgccagaacggacagatgaatgcagaggtgacaaagcaggtgattaatgatataaagaaactgctcatcgaagccaccaaacagaaagagaaaccagaagcttcgcttgaatatgaaactatcgatatcaatctgccagtcgagcgccctctgactctggctcctataaaagagactgtgtataaggataagcctgatatggctgaactgagtctggacgacttggagcgcataggcaaactctacaatccatatcacatcgatcgtttggtgctgagagaccgcattaacaaggtgctgtacgacagacagcagacgacactagcagaggtgatagaacggaacgagggtgtggagaaaggtctgtcggaagtgtttggatacattggcgtgctgaaggaatataagactgtggtaaacgaagagcgccagcaatatattgtttttgcagaaaacaaaacgatatcaattcccgaaatcataataacacgatga

SEQ ID NO: 42186 - DNA, 585 bp, Bacteroides sp. 9_1_42FAA
atgaacgcaacaaatatacaaccatacagcagggctgtggtgaaacttctgaaaggcatcgtagagaaagacgatgtagtgtggaatgatgtactcgactaccagagcgagatactggactatatcagcgtgatggggctggaactcatcgtgaaaaaggatgagggttttgcctttgtcaagcaactgaaattggacgatgacaaaacgttgaacatgacgtcgagaaggttgtatggttttgaggtgtcggtgatactcatcgtgttgaggcagatactcgaagacttcgacagcaatccaacagagtcgcaggcttcgtataagtatgtaaccgccactgaaataaaggaagaggcggaactgttcctgcccaccaccttcaatcgtgccaagtttgagaaagaccttgaccgctatatcgacagcatcgtcagctttggtttccttgtggaagcaaagcatgctgagggcgagaaacgctataaaatacatcgcatcatcaaggagaaggtgacactggacgatctattggaattcaaaaacaaactgaacgactatgatgcagcagatgaatctctttaa

SEQ ID NO: 42187 - DNA, 3393 bp, Bacteroides sp. 9_1_42FAA
atgcagcagatgaatctctttaataccagtccggaagtggcaggcttcaagcttgactatttggaagtgtggaactggggtacattcgaccaaaaggtgtactgcatgaatacgcagggcaataactcgctgctgaccggtgccaatgcatcgggcaagagtacgctggtagatgctctgctcacgctgctagtgccactgaagcgccaacgattctacaaccaatcatcgggtgtggagaagaagggcaaccgtacagaggagtcgtacttctttggcaactatggcaatcagcagcaggagggtgcagcgagcactaccacgcttagattgcgagacaaaggggcacgttcggtacttcttgcatcgttctgcaatgtggacaaacgtgtggtgacgctgtttcaggtgcgctactacactggcgaggaactgaaggtgttgtttggtatagctcgcgaaccgctgactataaagcgcgacttttcggagtttgacctgcatggcgactggcgcaagcgactgacgaagaaatacaatacgaatgacacaagacgcaagatagagttttttgacggcccggttgcgtatggcgagaagatgatagccctcttcggaatgcgttcggacaaggcgcttacactcttcaatcaaatagtgggcgtgaaagtgttggacgatctagacagtttcatccgtacgaatatgctcgaggaagtgtcggctgaggaaaagtaccaggaactaaaggacaacttccaaaatctgatggaggcgaaaaccaatatcgataaggtgaaggagcagattgcccaactggaacctatcaatacattggcaaaggaactgatggcgatagacacgcgcatagctgaattggagcaagagaagagtgtggtggcctattggtttgctgcgcgaacggtggatttgtgcaacgaggagttggcgcgctgcaagagcaacttgagaaaactggaagatgagttgaaggcgttaaaggtgaagaagagtgagctggaacaagagcagacgcgcttgtcggtggctattgagaaggacgaggtgggtcagcagatacgtgagattgagaaggaaatcaatcagaaggtgaagatgcgtgataaccgcaaggccaaagccgaagaatacgataagctagcaaagacggtggagctgacacaaagtcctgatgcagaggtattcgatgccaatcgtgcgaccgccaaacacgagaaagatgctctgcaggtaaagattgacaggcaactcatggaagagaagcgtcaggcacaaaaccgtcaggatgaaatcaactgcacgatatcagagcgagtggatactatacgctatctgcagcagcataagaacaatatctctggtcgtgtggctgagattcgtgatgagatactggaggctgttggtgcaaccgccgaagagattccattcatcggtgaactgatacgtgtgaaggatattgagtgcgattgggagtatgccatcgagcgtattctgcacaattttgccttgagattggtggtgccagagaagtattacaagcaggtgaatgagtatgtgaatggtcataatctgcgaggacgcatcgtgtatcagcgatacgagggcacagagcctcttcgtgagtttgaggataggacattgaaggtggattcgttgctccgtaaggttgaatacaagtcaaagtgcttgtatttggattggcttgaggataggttatttgctgagttcaactatagttgtgttgattcgcttgcggactttaactatctgcaagagaaagcagtaacgaaagagggactgataaaagcgagaggtggtaagcatgagaaagacgaccgaccagagacacgaggcaaggaacactatgtgttgggctgggacaataaggagaagattgccatgctgcaggcggaagtacgccagttgcagcaggatgaaaaggaggtggcaaccaaagtccgtcgtatagaggcagatacaaagaatgctcaggagaagcgagaaacctactcgaagctgtttgataaatacgataaatttgatgatatcgactggtggtcgtgtgcactcgtcattcagcaaaaggaagaacagaagcgacaactggaggagaccaatgataaggtgaagatgttgcaggggcaattggagagggtgagaaaggaacttggtgcacttgaggagaagtttaatgaagctatcggtaacaaagcattattggaaaatcgtgagaatatactcaagaaacagagcaatgattgtgctttggctttggctcaaataggcgttgttgataccgatgcttttgagtcgcaacacacagatttactgaatgtggcattggtgggtttggacaaaatgcgtgacacgttacagagtgacatcaattccgctttgcggaaacaacgtgagacgaagggtagcaagagtggcgatttgaagaacctgatttatcgcttcaagaatcccactgaggaaattaccgcgaagtatcgcgattggcgttcggacgtgaaccgtttgcccgaagccgtggagtttgtgggcgaatatcagacctattaccaacgattgctggacgaagatctgcctgggtttgaatcgcgcttcaacaagtatttacaggagaatatcatcaacaaggtcagtgcattcaatatgttcttccagaactggcgccagtctatcaccaagaccatcgaccaattgaattcgtatcttgtgggcatcgatttcaaggatgctccaaagacgtatatccagttggtcgcagccaaacgattgaacgtggatttgaaggagttccaagaccttctgagcagtgcaatcccgaacatccatgagatgaattcgacaatcgatggcagcaggattcattttgaacagcatatcgaaccgctgatgtctcgtttacaagacgaatcatggcgaaagttggtgatggatgtgcgtggatggtacacatataaggcggaggagttttatcaagacgatgatcagaagcgtaacacctacgaggctatgggacagctgtcaggtggcgagaaggcgcaattgacatataccatcctggggtcagctatcgcttatcagtttggcttgactaagaacggactcgactcttcgttccgcttcattgccatagatgaggcttttcgcgcacaggacgaggacaaggctcgctatctgatttcgctctgcaaacagctccacctgcagttgctcgtggtgactccgagtgacaacatccacatcgtggagaacgatatttcgtatgtgcattatgtggagcgcaagggcgaccgttctgtactctataatatgcctatcagtgagtttaaggcagaacgtgaaaggagtatggaggtatga

SEQ ID NO: 42188 - DNA, 1155 bp, Bacteroides sp. 9_1_42FAA
atgataacggcagcagaaatacgtaagaagacagaacgcaagtatgtggattatttgcgttcagtggtcgctggctctgagtttgaaccaattgtgattccttgcgataagaaagcgagcgcatcgatggatgagtatcagcacgaactgacggacatccgttcgcaatcgaaagaggtgaagggctttggttacacgattgagtggaaaacagtgaaaacgaaagcattgggcgaacaggatctgcctgagcgtgtgttgttcaggagtgcatcggacgttgagcgcttcttgctgaagggtggtgaagtgtcacagtttcgcaaggatgtggcgatgttgtttaatgagtttccgcagcttcgtccatgggtggaacgctatccacttaaggtgatcgagaatgcttcctcttggcctgatttgttgaaagttttgcgctattttgtggcgaatccttgtcctgagttgtacattcgtgaattgcctattgaggtgcacaccaagttcattgagcgcaataagggagtgcttcgtgagttgctggatattgtcattgtagagcatgtctgttcggatgagaaggagttcgaaaagcgctttggattgcgatacgatgagccatgggtgcgcattcgtgtgttggaagcatcgattgcgagtgaatacttttctggtgtagacgatctgacgatgcctcagagtcagttctgtgcgttatcgttgcctgtgcagaaggtgtttgtggtggagaataaagtcaacttcctgacttttcccaagttggcaggaagtctgctgatttgggggcatggattcaccgttggcatcctcaagtctgttccattcatgcggcacgcttccctatactattggggcgacattgatgtacagggcttcgaaattctctcgcagttccgcagttattttccccagacgcaaagccttctgatggatcgcgctacctttgacacctattttgaaggcgacaaaggcactccaagcaatgtatcaaagcctctccatcttacccctgcggaagccacactgtataatcatatcaagtctcacaacctacgtttagagcaagagaaaattccgcaaaaatgtattgaaaatatattcaatagttcgttaaaaattagccaagtctaa

SEQ ID NO: 42189 - DNA, 1326 bp, Enterococcus casseliflavus EC20
ttggagtctctcttccatattgatgctttactacaagggaatatctatttttctcgagataaggttgttgatagtcttcagaaccatctatcttcgttgggggttacgttgaatgggttagagtatgcagatgagtatgaagaagaaataaagacattaagaatgctggtccaaagcattttaagacaactggaaaaaaaaggttggttgagagttaatttagaggaaggttttactcagcaagtttctttcccaagttatgtaaatagtttcattcaaatattgagagaaattaattcaaatcaatcggcctcttattcaagctgcgtgttttctacttattctgctttaaaaactggtttagaggatcctagtaatctacttgaagctctcgaatcagcttggacttctacaaaaggattacaacgggctattcaaaatgcttatttcgatttatcagaaatgtatacccaaattgttgatgatttatctacaagtgaaatgctatctcaacattttgatatttacaaacaagaaattattgatcaagtcttatttcctctaaaaacaagagattccctgcctcgttttaaaaatacaatcctgactttaatcactaaatataatagtgacgaggtaatcgaactattaattacacagaatttaaaaaatcaaattcaatcgatttccggatttgaattggaagctgagaaacaggttctcacgtatttaaatggaattgctgatttttatcgggatgtcagttttttgattgataagattgataataagaaaaatgaatatactgaaaaatcaattggaaaaattcaatatcgtttgcgttctgattttcagttaaaagataaaattgatcggttgattcatcaaattaaagcagataaagatactcaaacctatgatttagcaaatattgtggaatttcaactcattgatcaagagtccttgtttgaacctagaaagaagaaggaagatattagtaataaaactcgaaagaagattgaagtgtttaagaaaaaagaagatggttttgagcaagagcagtaccagttattaaaaaagctagctaatcctaggtactcttcgaaaaaggttgatcagtttattttagaattgctaaaggagaaagaaaccatttcaactttagactataaaattagttcttatgaggtgtttatcttgactattatgggagcgattcgtggatatgaagaaaatggaagcggttatatagttgctatcaaaaaggagtatgttcgcaatggctactataaattaccaaagctgatttttaaaaaggagaattga

SEQ ID NO: 42190 - DNA, 597 bp, Enterococcus casseliflavus EC20
atgtatgagttaaactttgttgaagcgtacgacaatttgacgtcggaggctgtgttaaaatttcaaaaggctgttactagattgttgaactgtacgtatattaatcgtatcaaaaatgatggacaaaactgggatgaagactatttattcatagaagaaaaatttgagctttttgaggagtattttaagtttggagggtacgaagtgcgtattaaccgcgatattaatgttatttccattcagggtcaattttcatctgctagaaaaaaattagataaggaaacaactctttatattttagccttgaggttattttttgatgaaaaaataaaagagtttaatggttcttcaacaattgttgttcgagtagccgaattcattgataagttattggaatatggtattaaggataagaaacctaatttacaagcgctgagtagatgtttgcgttatttatcaacagttggaattttagggaaaaagtcagggaaatgggaagatgctgataccctattcatcatttatccatcaattaaactgttgttgccgaatgaaagattagatgaaaaacttaaactgattgtgggagggcaatag

SEQ ID NO: 42191 - DNA, 3327 bp, Enterococcus casseliflavus EC20
atgatcaaattaaaaagattactcttaattcattggcaagcatatgattttcagcttgtcgaatttgaaggtattactctaattactggacaaactggagtaggaaaatcgactattattgatgcgttgaatgttattctgttgggagaaaagcaaaagcatattttcaataaggcagccaatgaaaattctagacggacattggaaagttacttgtatggaaaactcggagatgatggtggggatggatttttctatttgcgtgaggaaaactttactagttatttggtagcagaatttgaaaatgaagagacttgcgagtatttttgctgtggttttgtggcagattgtagttcagatcacagttctcctaatgtacaatggttgacaactaaatctaaattaccagctgattattttattaatgaagaagagagaataccttattcaataaatgaattaatttatgagaataattttaaaactgaaaatgaaaaggtcacactaattgtaactgataaagattataggaaaaaaattgctgggttgtttgggcaaattcgtgatgactatcgaagattattgaagcaatctgttagttttacccctgtgaaagacatagaaatgtttttgaccgattttgtaagtgaaacggaaagccctattaatgtagaagagatgcaaaaaagtattcgtcgttataatgatcttgaacaggaaagtgataagatcaaaagtaaggttgctaaactggaagatattaagagcgaattacaagggctggaaaaacgcaagttacttgagttacgccaagaatatttcattgaaaaggctaagctagatgcacttcaagagcaaaaagaaaattatcatatcgatgttgaaaactatcaacgacagattgaaaaaaatactcgggatatagctgattcttcaaaaagaatagatgtgctgggtgcaaaaaaagaggagatgcgagataagcgggattctctagttgttttaaaagataaagtttttttaaacaatcagataaagagcgtgaatgaacaggttcagacgattcaaaatcaaacagagcaagggcaagaagcaattgctttaatgaaatactttattagagtagtcaaagctttaccaattgagcttccgtctatcacaaatctagttaaagtatttgaaaaatataatcaagaacagaaattaattagtaaatttgttgaaatgaatgatttactggatcagatagtaaaagagcttgttagttacaagcatttcgttaatgagcaagagaaaaggcttaaatctaaagtttctgttcttttaaatgaggaggaaagattaaaaaaagggattaaaatggttccagagcaaatacgcgtgtttaaggaagcactacaaaaatatttgagtaactatgataaaaacgctcaggttgagtatttatctgatgtgattgactttaaacaaggtgaagagagttggcaaaaagcagttgaagcttatcttggggggcaaagatattatctcgtgattgatcctaaattttataataaagcattacaatactatcagtccgttcaaaagcaaaaagagatttatggtatcggaataattaacttagagaaattacagaaaaagcatttcaatgcaaaaaaaaattcactagcgcggaaattaaaaacaggtgatcagttagttcaagcatacattaattttcttttgggacatgttattgcttgtgaagatatttttagtttagcaaaattctctacttcaattactatagatggttttttatataaaggttttgttactcgtaagctgcaatttaaaaatttgacgatgtcaattggaagtactgctgttaaaaagcaactacttgatgttcaagaaaaactcaatggatgtcaagaagaattacgaacgctagaaaagaaactcactattctgaaagaagtagaaaattatcaaaaaaaagattcctattcatgtgaaatagttactgaatatgctgatagtgagaaactgaatcaaaaattagcagatttaaagacgttagaaaataagttgaataatttagatgactctgagcttgtagagttagatgaaaaaatcaagtgtttggataaagaagtaagcgacttaactgttcagattactaaaataacaacaaattcaaatactagccaagaaacaatgaatcaaataaatcagaccctccttcctcaatgtttagaaaaaatcatggcacaagaaaaaatttttcaaaccaaatttgaatcatgccaacaactaccaagttttgaagaagcgtatagagtggcagttaataaattagatattcttgtctatcaaaaatttattacaaattacgaaaataatcagaaacaaacacaagtgagtattaatgaattagaagaaaaaataagagaaaaaatgaatgattataatcaaatgtttactgaaaatttgtcaattaatcttaaacagtctaatctgtatttggaagaatacgaaaaatttacgaatagtgaattgccaaagtttgaattggatattaaagatgccaaagaaaaagctgtctatgaattcaggtatgaatttttaggtaagttaaaaagtaatattgagaatatacagcggcaagtaaatgaaattaatgacgctttaaagaatcgaaaatttggagaggacacctatagatttaaaattacagcggctagtaataataaagaatattatgaaatgattatggatgaaatgttaatggacaatggagagtggaatttattgagtgctgcttttgaaagtaaatatgctcaacagatagaagtgctattttctattttatctggaaatgacttggataatgggcaaagtaaagagagtagaattcaagctttttctgattacaaaacttatttgaccttcgatatgatagttacaaaaggagatagtacacaacgattatctaaaacttatgagcaaaaatctggtggagaaacgcaaattccattatatatatcattgttagcagcattctcacaagtttatcgagtgaataacacgcgtaggaataatacacttaggctgattataatggatgaggcttttaataaaattgacggagaaaaaatcaagcaatgtattcaaatgattaaaggcttcggtcttcaagcgattttttcaacaccgccagaaaaaatttctgaaattatggaagaagcagataaagcacttgttgtattcagaaatcaaaatcaggcaacattacgagagttttcatcattgtatgaaatgattggtgaaccttatgaagtatga

SEQ ID NO: 42192 - DNA, 1227 bp, Enterococcus casseliflavus EC20
atgaagtatgatgtgtatcttcttagtcaattattgaataaatatgaagcttctgtagggtttgtaaatggagttagtctaagacgtgtgctttataaaccggaaaaagatctcaaattaagtagaaaattagaagatcccattgaaaaaagagtgttttttaaagtgataaataaactaaaagaagaaaaggtaatcgattttaaatgggagaaatttgaagaaaataatttgattagtgaaatatggctaattacagaagaagcttctttggtaaatgcttatgcactttgtcaacgtgtctcaaaagataaaatagctactcaaagcattaaaatacttcgagagaaacagctaactattaagacaccatggatgcttgagcttttttcaattattttgggagaagctgacagcattgggaaaagttggaagtttattttatcacccaaacagacaagtgaagtttgtaatgtactagaattgctggatgattatcaaggaaccaatatagataagcgtattttgagtgtgaatttattttcggatagtaaatattttgagcaaaatgtccaaacaaaactgttaaagctaataacgcgttacttatttgattgtagtagtactttgaccgatcgagaaaagcttcaacaaatagggattggtttcgctccagaactcctatattttacaggccccgttgaattagttttgaaaaatggtgagaaggtcaattgtgaattcctgtcaaaaggtagctatttaggggctgatatgttggcagagatagaaacaatcaattgtttttataataagattgttaccattgaaaatttagctaattactattggtatatacaaaatgaaagagaacacgaaacttttattatttatactgggggctttttaactagacatcaaactttgttttttaaaatgcttaaaatagaagatctttctgaactgtatcattggggtgacattgatttaggtgggtttcgaatattacttcagattcaaaagatttggcctgaaattcaaccattaaaaatgaatgtagcgacttttgaaaaatattcaaatgttcgtaaaaaggttagtaatgaatatattcaaaaagttaaagctgcacttgaaaagaaagagtttgctctttttagagagtctttgataaaaattgtggaaacgaagcagattcttgagcaagaagcggagctatacttttga

SEQ ID NO: 42193 - DNA, 1443 bp, Mycobacterium kansasii ATCC 12478
gtggagtacgaggcgatcaattcgttgcgggagcgccacccggcttggcggctgcttcgtgccggcaatgccacgctgatcctgtccttcctcggggggtttttcgtcgaggacaaccgaggcgcctgcccagcgagtcaggtcgcgaccgccctggacgactacgtgtacgccctgaacacggagattcccaccgagaacggtcagcaacgctttccgagggacgctcggtcctatctggaggactgggcggccactgacgcggcgtatttgcgacggttttacccggcgggcgacgacgaagtccattacgaggtgactccggcgttcgagaaggcctacgcgtgggtcatgggccttaaaggcaggtcctttgtcggaaccgagtccaggctgcacacggtggtcgagctgctgcgccagatcgtgcacggaaccgaagtcgaacccgatgtccggctggccgaattacggcgccgccgaaacgaactcgacgccgagatcgccgccgtcgaggccggggttgttcaggtgctggacgcgaccggagtccgtgaccgctaccaacagctggccacaaccgcgcgggaactgctctcggactttcgcgaggtcgaagaaaacttccggctcctcgaccgggccgcgcgagaaaagatcgcggcctgggatgggtccaagggtgaactgctcgccgagctggtcggaagccgctcccagatcgctggatccgaccaaggccgcagcttccaggcgttctacgacttccttctctccgagacgcgccaagccgagctggccgaacttctggccaaggtttgcaccctcgagaccatcgaagccgaccatcggattcgcggtattcaccacgactggtccgaagccgccgaccgggcgcagcgcaccgtccggcagatatccgaacaactgcgccgcttcctcgacgaccagatttggctggagaaccggcgtgtcctcaatttggttcgggcagtggaaagttcagcgctggaactgcgcgacaacccgccgcccttcgggctcgagctggatcagccgggcatcgagattgcccttcccttcgagcgcccgctctaccaggtgcccgcagcggtcgcggtcgagagcaccatcccaccggcgagcgaggagatcgacaccgacctgctcttcgcgcagaccttcatcgaccaagcacgcctgatggagaccatccgcgatgttctgccggagaattcttcggcgctgctatccgacatcatcgcggcacaccccatcgagcagggtgcggcagagatcgtcggctacctggcactcaacgacgaggaggtgagcgtcgagatggacgacaccgatgagactctcctggaatactgcgaccccgccgacccggaaatcgccaagcgagcgagactgccgaaagtgacggtgcgacgacgatga

SEQ ID NO: 42194 - DNA, 579 bp, Mycobacterium kansasii ATCC 12478
atgagcaacgagcatgccaccgccagcgccatcatccggctgatgcaaggagtcgtctaccgcgagtcggacgaggacacctggctgacactggaacgcttgggtgccggcgtgcgagaccatttcgccaccataggtgtcgacgtggtagtcgatgacgccgaaggctatgccttccttcggtcccggccatccgaagatggcgacgatgcgctcccgcggctggtgcgcaggcgagcactgacgtacaacgtcagcctgctactggtgctgctacgcaagcggctcgtcgagttcgagacgaccggcagtgagggccgactggttctgaccaccgaccagatcgtcgagatgctgcgactgttccaggccgagtccagcaacgacgcacgagtcgtggaccaggcggagacgacgatcaagaaggccgccgaactcggcttcctacgcccattgcgcggtcaacgcgaccattgggaagttcggcgaatcctcaaggcctacgtcgacgcccagaccctgtcggactttgcgaccaagctgcgtgagtatgccggagcggtgaccagtgatgagtga

SEQ ID NO: 42195 - DNA, 3399 bp, Mycobacterium kansasii ATCC 12478
atgagtgaaacaccttctgccacagccgcgctcggggacacccgacgggtcggttaccgtctgcagcacgcggaggtgttgaattggggtacgttcgacacccaggtgtggcggttcagccctgccaccgataccgcgctgctcaccggtgatatcggctcgggcaagtcgacgatcgtcgacgcactcaccacactgttggtgccgtcccacaaggccgcctacaacaaggccgccggcgccgaggccagggaacgcaccctgcgctcctacgttgaaggccactacaagtcggagcggaacgaggccaccggaaaatcccgcgccaagggactgcgcgagaaccggggcacgtactcggtgatcctcggagttttcaccaaccatggctatgacgagacggtcaccctggcccaggtcttccagcagcgcgagagcaccggccagccccaccgcttcttcgtcgtcgcgacaaagcaactgtctatcgcgacggacttcgccgacttcggttccgacctgcgtgatcttcgcaagcggctgcgggccgccggagcagacatcttcgacgaattccccaagtacgcaacctcgttgcgtcgcctgcttggaattcgatcggagcaggccctcgagctgttccaccagacggtctcgctgaagtccgtcggcaacctcaacgatttcgtgcgcgaccacatgctcgaaccgagcgattcgaccgagcgcgtacgcgacatcatcgcccatttcgacgatctgaccaaggctcacgacgccgtcaagcgggcgcgcgagcaactcgaggcactcgagcccgtcgtagcgacaacggcgaagtacgacgatgcccagacgcagcgcgacgcccgggagcgcgagcgatccgccgtccggcttttcatcgcagagcttcggtcaaatctgctggccggcgaaatttcgcagttggaaaccgagggcgcggccctatggcgcgagcaggacagcgccaaagcccggcagcagatgctcacgcgcgaacgcgaatccctcatcgaggagcgtgcaaaagcgggcggcgatcgcatcggcgagctggaacgactggcgcgcgaggcgcgggatcaggccgaaacacggcgtcgcgcaaggactttgttcgacgtcgccgtcgccaccgcgggactgggagagatcgccggcagcgcggagttcgcagccctatccgctctggtttccaccgagcgtccccggctggcagccgaaaaacgagacctcgatacggcctgcgccgacgcgatcgggagagagaaggagctgcaacgcaagtgcgatcacatcgcgcaggagctcacgagcctgcagcagcgcaccagcaacctgcccgtcgagcaggttgaggtgcgcgccgagctgtgcgcggccctcgggctgacaccggacgatcttccttacgcgggtgagcttctcgatgttttcgacgagcacgcccagtggcggggagccgccgaacgcgtgttgcgcgggtttgccctctcactgctggtgccaccgcagcactacgacgccgtcgccggatgggttaacggtcgacggctgacgtttcacggcagcggcggaaaggtgaccggagccaagctggtctacgaaagagttgcgcggcaacgtgttcgcctacagcgctcggagcatgacgggctgctgctcgcggactgtatcgacgtcaaggacgggcagttccgcgagtacctcatcaacgaactcacgaaacgagccgacttccgttgcgcggcgagccttgaggagttcggcagccagcggcgcgccgttacccgcgagggccaggtgcgctccggtgagcgccacgagaaggacgatcgctatcgcatcgacgacccgcgtcgttgggttctcggctgggccaacgaacgaaagatcgccgcgctgcgcgctgagctcgccgagctggaagccgagcgcgatgcgaccgcatgcgagcaggccaggctcagcggattgcgggaagcgctgcaagaacggctggatgcgcttctccggcttgagggattccgcgactgggccgacatcgacgttgacgaggcgcagtcgcgcgccagcgacctcgaagccgaacgggttcggctgcaggccggatcgtcgcgtttggaggagatcgcccgagcgctcgaggacaacgccaaacaagctgaggcggtagcgaattcgattgagcaactaacgggcaggctggccaccaccgccgcgagggccaagcaagcagaactggacaagaatcgcgacgacgaactcgtcgcgaaccagccgcacggagcgctggcagccgcccgcgaatcgtacccagccctcgacgagcgcctgggaaagaaccgtccgaagcgggcagcggagtgtgccgagaccgagaacgcactggccgcggatctgcatcaacgtatcgaccggcttaacaaagaacttggcggctatgcccagagcctgatccagtccatgctcaaggtcttgacccggtggccggagcttcgcggcgacatggacgccaacgtcgatgcgcgccaagagtttctggcctaccgcgaccgcatcgcgaccgacgatctcccgcggttcgagagcgagttcaaggaacagctcaacaagaacgccatccaggagctggccgggttcaacaactggctacaccggcaagcctcggtgatcgacgagcgcgtcgagcggatcaacgaggcgctcggggcggtgccctacaacccgggccgcttcatccggttggaaaaggagcccaccaacaaccaggacgtggcgcagttccgttcggacttgcgcaacctgaccaacgacagtctcgcgctcgacggcgaccagtactccgagcagcgcttcctcgacgtcaagcggatcatcgagcgcttccgcggtcgcgatggctacgccgaatcggacaagaactggacccgacgggttaccgacgtgcgtaactggttcgtattctccgcctccgagcgcgacgtggaaaccggcgccgaatgggagcattacagcgactctgacggcaagtccggcggccagaaggaaaagctcgcctacacgatcctggcggcgtcgctcgcctatcaattcgggctggagtggggtgcgcagcggtcacgagacttccggttcgcggtcatcgacgaggcattcgggcgcggctcggacgtctcgacacgttacgcactggatctttttgcgacgcttgggctgcaacttctcatcgtcacgccgctgcagaaggttcacgtcatcgagccgtacgtgaaggcgatcggattcgtcgacaatccgactggaacattctctcgcctccagacgatgacgatcgaggagtaccggacacgacgggacggacgacggccatga

SEQ ID NO: 42196 - DNA, 1161 bp, Mycobacterium kansasii ATCC 12478
atgagcgccgggtggaccacgccaaacgacattgccgccagggtcagacgccggtgggacgacggatcgctgttacgtgcctacgccaacggtgatcggtttgatccgatcgaagtcgcgcttcgcggccccaaaccgtcgcaagtcggcgacgatcttgccgccgcccgcgagtgggtgggcgctctggatgccggccgtcgcgacgacagccgatacaccttgcagtggcaatcgatcggaggccgacagattggccgtaaccggctgcccgtccgcgcggtggtgtcgatggaccaggcctgggcgctgttgggcgtgacgacgttggttcgctgtttcgacgagcttttggttctcgcacaacaacatccgcaagttcggaagtggatagttgacaatccgcatcgtgcgctggcgctggcgcacgaaatgccacagctgatcgctgcctacacttggctggacactcaccgcaattcgaaccggtatctccgtgagatcagtgcacccggcgtcgataccaaattcgctgaaaggcaccgaccggtcctggcagcgatgcttgccgtttcctcgacagccacgggattcctggccggcattggcctgagatgcaagccgggattggttcggttgcggcccgcgccttcgttgggcctgccgcccccgctcaccgagctggcggtgcgttccgaggagttggcgcaactcgcggtgcaaccacgcgcagcggtaatcatcgaaaacgagatcagctatctgtccgtcgacgtcccggaacacggtgtcgtggtctgggggaagggtttcgaggtcgacagcgttggtcgactgccatggctggcggaagccgaggtgctgtactggggagacatcgacacccacggattcgccatactcgaccggctacgggcgtggctcccgcaagcgcgctcagtgctcatggaccgtgaaacgctgctcgcgcaccgcgaccgttgggtgaccgaagaccgtccggccacgtccgttctcacccgcctgacgcccgacgagcaggacctctactcggaactggtcgaggacgcgttgggtgaacgcgtgcgtctcgaacaggagcgaatcgactggcagtggactatacatcggctatcaggtgttatcagcgcggggatttga

SEQ ID NO: 42197 - DNA, 1416 bp, Clostridium asparagiforme DSM 15981
atgagactgaaagacagaataccgggagatttctataagctgttcgccagcaaatacagggacaattacatatgttttctgctggccatttacgaggagacgaccaggctttactcggcgctttgcctgacggaggcggagtgccgggccgtgatcgatgagtgcatggaggccgagggcctgattccctccgaggacgaggagttcgaggagggggacagtctggtttacagcccaggctccacccgctttctgtacaatctggcccagtgggggtggctgaagcgggatttcgacgagcggaccaacagctatttttattcctttcccggctacagcctgacctacctggagaccttccgcaagctgtggagcgaggaggaggatttgagccacgagagcatccgctcggtctacagcctgctgcacacctacctgacggaccgggagaaggacgtggaaatcctggcggacgccctaaacgcctccaagcggcttttgcagctcctgtccaacatgcaggacggcatgcgcagctattttgacgagctgtccaggcagaaggacatccgcggcatccaggaggtgctggtggacgagatcaataacacggacagccgcaagtacgccctgctcaccagcacggacagcttttaccgctacaaggaggcggtgaaggagatcgtgcaggagattctggaggacaacgaggcccgcagggaacggatggagcgggagttaaccgccctgcagccggagagcgcccaggctctgcgccgccgcaagaacatcgaccgcagccgggaggcggactcactggtatatgagacgctgcgggaattcgatttcatcgaggtcaaatacaaccggctgatcgagcagaaggccgtgttcgccgcccgggccaacgccagaatccgctacctgctgcgggaaggcgaggaggaggacgacaatctgatggcctttatcggcgtgctgcgccgcagcccggaccaggaggagattctggcaaagctaagggagagctacgctctgacggccctcagccgcgtggtgggggagaacagcttttacgccaggcgggatgagaagcgggcctttgaacctgcgccgccggagcttcccgccgccccggacagcagcgatctgacggactttgtggtgcgcccggagtacacccagaaggagatcgacgccttcatcctcaaaaacagccgcggcggggcgttttccgtcacggaggacacggtttccggcgttgcggacctggaaaagctgctctttgtctggcgggacgcggcggccggggacggcggcatgaggatcaccggcaccgacagcgatcccatccgcaaatttggctgcaaatacacaaaattcaccatggagaagagtgagaacagcgatgattga

SEQ ID NO: 42198 - DNA, 732 bp, Clostridium asparagiforme DSM 15981
atgattgagtacgtgaacagcttaacgccccaggaggcggaggaactgaaaagaaccatccgggatctgatgcgccagagctgcatcattgagaccaagtacgatacggaccgggactgtctgaaggacaatccccgctaccgggtctgcatgcggcatcgggaattcctgacggactatttcgacatcatgggctgcaccctggtgttcgacccccaggaccattttttccgcctgtccggcgacggggtggggctggaaaagttcagcgagaccaccacgctttttattctgctgatgaagctgatctacaaggaaaagatcatgggagaggggcttaaggccacggtgaccaacctggaggagctgcgccgccacggcgtggacacggggattttaaaccgcaagctgacggaccgggaggtctacgaggccgtctccgtgatgaaaacccaccagatgctcgaaatcccctgcgccatcggcgatctggaggacgacacgcccatttacctgtacaacatgatcaacgtgttctgccggggcgcggcggtcacggagctgtaccaaaggtataaaaagcgcgaggaggaggccgcggacgggctgctgcaggagcggctgaggctggaggagcagggcggggcggcccgggaaggagcgcccggtctgatccgggaagcagcgccggacgcggcccaggaaggagatacccaggatgaaaccctgtaa

SEQ ID NO: 42199 - DNA, 3459 bp, Clostridium asparagiforme DSM 15981
atgaaaccctgtaagaagatcattacccgcatgtgcatcaacaactggggcggaatcggccatcaggtgatggagttcaacgagtacgtgaacctgttttccggcatgagcggctccggaaagtccacggttatggacgcgatccaggtgttgctctacggcagcctgtcccagaatttcctcaataaggcggcggacgagaagaaccggcggaccgtgatgacctatctgcggggcgcccagaaggacggcacctccaaccgcggaaaccgggatttctgcgccaatctggtgatggagatacgggacacccaggacgagtcctaccgctgcatcggcgtggccttcgatgtgcgatccggggacctggacatcaacaagtacacatttttctcccacgacggcatgctggatcacagtctgtaccgcaatgaggatgggattcccctgatggtgaaggagatcgccgatctggtaaagaggcaccagaaggaccccaaaggccgtctgcggggggaggacatcaaccggacctaccccaccaacgacgcctaccagaccgcgctgtacgaccagattttcggctatatcgacggcaagcgcttcatcaccatggagaagagcgccgtggccttaaaaatgtccaacggtgtgggccagttcatcaaggattacatgttccccaagagcagcagcgaggccatcgagaagatcagccgccagctgggggattacaccgatatccgggacacggtgctggatatggagaagcggatcgacctgctggccgccgtgcgggagtccgacggcaggctgacggtggcaaaggccgccgtgctccagaacgagtacattttaaagcgcctgcgtctgacggccattgaggaggagctcacgcggctggagatcgagcggtccggcaaaaacctgctgcgggattccctggcccagaagcgggacctgttaaaagcggagatggaccggattcacggggagctggtggagaccgagtccagcttaaaggccagtgactacgggaaaatgaaggaacagctggcccagctggacgagaccatcgttctgttaaaccgtaactgcgccgcctgggaccgtttcgtggcatccctgtccaaatgggaagaaaatgaggccgtctacgatctggtcagcaacgccgcgctccagtccatggaggatttgcgggaccggaaggcggacgcggacaccctggacgccctgcggaccgccctcaaggagaccatggaggagatcaacgaggcccgggacaacctggcggatgagcgcagggatgtgaaccgcgagttgaaagagaaacgggaccggctggcggactggaagagcggccaaaagtcttaccgcaaccggcccggcttaaaggaggccaggcgggagctggaacaggccctgttccgggagaccggctctaaggtgagggtcagcatcctggcggacacctttgatgtgcgggacccggagtggaaggacgccgtggaggggcgtctggggcgggtgaaatacagcctgatcacgccgccggcattttcccacacagcggccgtgctgtttcgggagatgaagcaattcgaaaatgtggatctgctccacgtggccaatatcgtgagggacgggcaggaggccagggaaaacgccctctacgaggcggtggagaccgatgtagactatgtggacgcctgcctgcggcatttcctgggaagggtgatcaaatgccggaccgtggaggagctggagcaggtgcgcgacggcgtgaccgcggactgctactcctacagcaactacaccctgcgccacctgctcagcaaggactaccgggacaatgcctgcatcggcaagaccatccccaagtcccgcatcgaccagctggaggcggaggtgaaggctttagaggagaccggacgggagctgaccgggcggatcacggccctggaacaggcccggagctacgaaaatctgtcccaggagaacgattattatctggacctggccggggctgagaaggagcggaagaagcacgagctccgccgggaaaagctggcacgggagatttcggagctggagcagggggccatgcgggagctgcgggagcgcctggaggagacgaaaaagcgctacgccctcaaggaggacgagtacacccgggccgggaacgagttcgcggccgcggaacgggagctgggcaccatcgaggcggacctgcgcaaccagaaggcccagcacgcggaggcggagtacggctttacccccaaccaggccgaggacgaacggatcgcggagcgccttaagggccgcagcttaaacggctaccgggcggaggcggcccgggccctggagtccgccaagtctgatgtggagaactacacgggggagcgccaggcggcgcggatgaagttcaacctggcctacagcgcctgcggcctgacgggcaccgaggagtccaacaaaccctacgaggatttgtacgagcgctacagccgccagtatgtggaggagtataaggaggagttcgagcggaaatgccgggaggtgtaccgcagcctgcgggacaacgtgatcgccaccatccacggggacatcaaggccgcctaccggcaggtgcgggaggtcaaccgggtgctgggcgccacggcgttttcggacagcgtttacaagatcggcatcacgcccgcgtccaacgagaacaaccagttctacgagatgctcaccgccccggagctggacagcaaggtggtgaacgaggacgatgtggaggggcagatcagctttggcgacgacgtgtttgagcgcaagtatgagcgggaaatcagcctgctggtggagaagttcatcccggaccgcaccggggacgagcgggagtccgctaaaaagcgggcggagatggagaagttcgcggactaccgcaattacctgaccttcaacatgtacgaggtgaccgtggatgagagcggccaggagaaacggattcccgtggacgagatggcgggcaacgactccggcggcgagggccagaaccccaagtacgtggcgctgttcgcaggttttgccctgctgttcgcccaccagaaccaccgggacagccggatcaagatcgtgctgctggacgaggctttctccaagatggacaagaccagaagttcggtgtgtttaaattacgccagaaagctgggacttcaggtgatcatctgcgtgccggacgagcgcctgatgaccctggtgaaaaatgtggactgcgtgtacggcttccgcagatacaagaatcagatttccatgctgatgatcgacaagggaagctatctggatatgctggagggatcggatgagcagggaaacgaatcagagccagagcaggaaacggagcaaaggcagcagcgagagccgcagcgggaaaatgacgctgttggaatggatactgaaacagaataa

SEQ ID NO: 42200 - DNA, 1149 bp, Clostridium asparagiforme DSM 15981
atgacgctgttggaatggatactgaaacagaataataccccgggctggcggaccggcgtctcgtccggtgagcgccacccacagatcacccaggaggctattgaagccgtgggaaagcgggagctgctggaacaggcggccgtcctggagggaagcggactgatcgcggtggactggcgtgagatgagaaacgatatcgccagaatccactaccgcctggaggacgtgggccggatgtatgagatggccgggattcccgatccaagggaggcgctggcccgggcagggagtctggtgagacagtaccgggcgtgtttggagaatgaggatttcaagcccttttacgataaactgctggagcagatcgggaaagggagtctgccggaatacgttgagaacgaggacttttttcgggctctcaacgcggttgcggacaaccgggagagcctgtgggagacccagttcagcgcccgggtgttcggaaacgccaagtattttgggaagaatcttcggaaaccggttttgcgcaagctgtgccgctacggctccgctgtggaagacggcatggaagaggacgaggtgtttgccgagtacgggatcatgagctattcccagcagctggagtgcaaggggccgcttctggtggacacgccggaccgggaggggaagcgccgcctggcctccggggaaaattttcccctggggatggtgctcaacgcccgcacgctggcggcggcaagcccggtgggactgcctggcgtccggcggatgattaccattgagaataaagcgaattacgagtccatggagtacagtggggataccctgtacatttactgccatggattcttctcgcccaaggagcggcgtttcctgcgcagggcggaggagcttgcagggccggagacggaatttttacactggagcgatatggactacggcggaatccgcattttccggtttatgaaggaaaaggtgtttgcgcgggtgaagccgtttcacatggacgcagggagctttgagcgctaccggctggccggggcggggattccgttggaggagaagaagcggcagaagcttttggcccttgacgtgccggagctggagggagttaaaagcctgtattttacaatacgggctggaaattga

SEQ ID NO: 42201 - DNA, 1479 bp, Fusobacterium periodonticum 2_1_31
atggaaaaagtagatttgggaaattttatgtcttattcatatttaacttcattacgaaaaaatcatcctgcatggaaattgcttacatctcatcaagcaccatttattgcttcttttttttatgctgtttttttaaagccaaaacagagagaaattccagaaggaaaattagtctcacaacttgaaaattttatagatgaaataaattttgaagaaaaatcctcttttaccccacaagaaattttaacacaatggtcaaattcagattatgcatatctaagaaaatattatccgaaggataaagatgaaatacattatgatttaactccagcagctcagaaagctgttgaatatttaataagttttgaacagaaaagttttatggcaactgaatcaagactgagaacagtcttcaatttacttaaagaaattgttgaaaaatcaaatgaaaatccagaatttagaattcaggaattagaaaaacaaaaaaaagatatagaaaataaaattgaaggagtaaaagctggaaaaatagagatattaagccctatacaaataaaagatagatttttacaagcaatgaatacatctcatgaaatactttctgattttagaatagttgaacagaattttagaaatttagaaagaaaacttagagaaaaaattgtgacttgggattctggaaaaggagaactattacataatttttttgaagaagaggaaggaattcaagagtcagaacaaggaaaaagttttaaagcattttctgattttttatcttcaaatgaatctcaaaaagactttaaaaatttaatagaacaagttttaagtatgaaggaaataattccaattcaaggcagtttgagttttgaaagaataaaagatgattggatgaaaggaagtgaacatgttctagatactcttgctcttctatcaaaacaattaaatttatttataaatgaaaactcttatgcagaagaaagaagaataaaagaaattataaaaaatatagaagctacagctcttcaattagatggaaaaaatataaaaaattttatagaaatgaaaactttttatgctgatattaaatttccaatgaataaaaagttatattctatacctaataagatttttttagacgagcttgcattgaataatgaagagatagatattgatttttcagctttgtatttacaactttttatggataaaaataaactcaaagacagaataaataatttacttttggatagagaagagatcagtttaaaagaattagttgaagtctatccaataaaatcaggtttgacagagttattaacttattttgttttagctaaaagagaaataaatgctgaaatttattatgatgatttatttgagcttagctgggtttatgaaaatggggatagtcagtctgcaaaagtacctatgattatttttaaaaattcagaaaatgaggatgatagagatggataa

SEQ ID NO: 42202 - DNA, 594 bp, Fusobacterium periodonticum 2_1_31
atggataaaataaatatagatttatctaatgcttatatttctttattaaaaggtatagttataaaagaaaataaagaaaaaatttgggatactattttaaattatagaaatcaaatagaagattattttagacatttaggactgaaattaaggatatatgaagaagaaggatattgttatttacaacaagatgaagacgaggagctaaaagatttatttaaattagtaccaaaagtacagctgagtcttcatctcagcctacttctagcaactcttagaaaatatatgtatgaaagtacagcaaatggtgatgaaaaaattgttatttcaaaagaagaaatatttttaagaatgaaaagctacttaaaagaaacatcaaatgaagttaaacaagaaaaggaaattgaaagctatttaaaaaaaattgaagagatgaaatttatcagaaaattaaaacatagtgatgataagtatgaagttttaagattaatttcaagttttgttgatgcacaatggctagatgacttaaataagcatcttgttgagtataaagattttataaagaatgggggtacagatggagattctgaatga

SEQ ID NO: 42203 - DNA, 3375 bp, Fusobacterium periodonticum 2_1_31
atggagattctgaatgattttagtgaaataaagaagaatggttttagacttcataatttagagggtcttaattggggaacttttcaagggaaatggaattttaatcccaaagaggaaacaactctgttgactggagaatcaggatctggaaaatctactctagtagatgctttaacaactattttagtacctccatataagattaagtttaatcaagcagctgatgtagattcaaaggaaagaacaattttatcttatgtaagaggttattatggtcaaaaaagtaatgcagaaggaaaaggaaatatagaagcattaagagattataatagctattctgttatacttgctaatttttatgaacagactttaaaacaagaagtaggtttagcagttgttttttatttcaaagaaacaaattcaacaccttcaaaattttatattgtaagtgaaaaatttttaagtatagataatgactttatttttcgtttcaatgatatcaaaatattaagagatagtttaaaacaaaaatcatattctgtatttaatgattattctccatattttaattattttagtaaaagactaggaaacttgacagagcaatcaattcaattatttcaaaaaactatatctatgaaaaaaatgggagaattatcagattttattagaaaaaatatgttagaaaaattagatattgaggtttcaatagaaaaattaatccagcattataatgacctaaatagagcttatgaagccacagttaaagctagaaaacaacttgaaatgttaaatcctatttctgaaaaaggaaaaatatatttaagtgaaagggaagaaaaattaaaatttcaatcagcaatcgacagattggagatatggttagctaagaaaaaagataaactttatgaagaaaaaatttcaaatttaatggagcaaaagaaagaaaaagaaatatcttatgattcagaagataagaaatttaaagaatgtagaaaagagctagaaaatttaagacttgaaatacttcaaaatggtggagataagctacgagagtataataccaaattgaaacatgaaaaagaaaattttaagcaaaaagaaaaaagagtgaatgattattctagttttgctaaaaatataaatttaaatattccaaatagaatagaagaatttaataataatagaaaaatattagaaagaattgccaaagagaatggagaattaataaaaaaaactaatgaaattagggatgaaaaagttattgagaacagtaaaattagagatgaaagaaaaaatatagaggcagaattaatatctttaagggaaagaacttcaaatattccattaaaatatgttgagttaaaagaaaagattcagagagctttaaatttagaagaaacagacatatcttttgttggagaattaattgaggtaaaatctgaagaaaaagattgggagggagctattgaaaggtttcttcactcattttctttgacccttttaataaaaaaagaagactatgctaaggtagtagaatatgtaaataagaattttttaaatttaaaattagtttattactatgttgatgtaaaaaagacaaaatatgaattatcatacatagaaactttttctgttttaaataaaatagatattaaggcagacagtattttttcagcttggataaaaaaacagttatatgacagatacaattatatttgttgtgataatctagaagattttagagtaaataaaaaggctcttacaaaaactggacaaataaagtcagatagccgtcacgaaaaagatgacagagctgatattaatgatagaagaaactatattatgggattttctaataagaataaaataaaaatatgggaaagttatcttcaagaaaaagaaaacctattaaaaaatttaagttgtgatttagataaacttgatgaagagttaaagaaaatgaataatataaaaaattctatagattctttagaaagatttaaagattttgaagacttagatattttgaccagtaaaaataaaatagaagaattaaatgaaattattgaaaaacttaaaaaagataacaatattctaaaagatttagaaagcagggctgcctttttagctaaagaagaagtaaaattagaaaataaggttaaaaacttatcaagcagtataatagagttagaaaaggatttaagttatatcaataaagaatatcagcaaaataaatttgtttcagaagaagatccacattttttatatcttgatgactatgactttttaaaaaaacattcacaattttggaatgatttcccattgactttagagaatataagttcatttcaaaacaaatattctttatatttgaatagaagaatattagatttagaagaaaaattaaaattattagaaaaaaatattgaaagtttaatgagagaatttaaaagagaatatccaatagaaagtcaagattttgatgataacgttgaggctttaaaagaatataatactttcctagaaaaaatattgaaagatgaattaccaaaatatgaagaaaaattcaaaacagaattacaagaaaatatttttaggcatattatacattttaaaacaaatttagatatacaagagagaacaattaaagataaaataaaagaaattaatgactcattagaaggaatagactacagtaaaggaagatatattaagttaatacaaaaaagaactgttgataaggatattattgattttagaaatagtttaaatgatataaccactaactctatagacgataataatttaattgaagaaaaatttcttgaaataaaaaaaataatagatagatttaaaggaagagctaatgaaacagatagggataaaaaatggactgcttatgtgactgatgttagaaactggtttcatttttcagcaactgaatattggagagataataatgaggaatatgaacactatacagattctggaggaaagtcaggaggacaaaaagaaaaattagcttatactatattaggagcatctctagcatacaactatggtataaatacaaaaaatagaacttcatttcgtttaatcataattgatgaggcatttttaaagagttcagatgaatcagctcgttttggtttggaactttttaaaaaattagattttcaatttataatagtgactcctttattaaaaataaatactatggaaccttatattagacatgttggttttgttagctataatgataattcacatatatctacattaacaaatataagtttgagtgagtatatagagatgaaggaaaaaatgcaagggagaaaattagaatgggatggactgactttaaagaaataa

SEQ ID NO: 42204 - DNA, 1164 bp, Fusobacterium periodonticum 2_1_31
atgggatggactgactttaaagaaataaaaaatattattttaaaaaaatgggaaaaaggtgatatagcaagaggaaaattactttttccttggaaaataaaattaaaagttcctacttctaaagaaattctaagtgatatttctaaatttttggtttggagaaaggaattaaagaaaacagataagtctagtttaggttatggttataatataattgaaaaagaaataaaaaataaaatcttaggtaagaatcctattcctgcttacattgaaattgttagtatagatgatgcattgaaattaataaaaaaagaaaatgagatgaaaagaattttagagaattcttcttttatattagaaaaataccctaaacttcaaaaatggatagaaaaaaatatattcaagattttaatagaaaaaggcgaaataaagaagatattagcagttgttgaatacattttaaaaaatcctgttaaagatacttatctaagagaaataagcatagaaaatatagatacaaaatttatagaaaaccataaaaaaatgatttttagtatgttagatgaaattttaagtgatgattcatccttacttgaagaaaaactttcaattaagaaaaaacctcaattaataagatttagaatattagatgaaaaatattatattcatggattttctgatatatcagtccctattgaagaatttaatgaatgggaaaataatttttcaaatgtattttttacagaaaatgaaattagttttttgagttttcctagctataagaatgctcttataattttttctaaaggctataatgtacatgcttttaaggaaaataaatggttaaataagaaaaaactatattattggggggatatggacacgcatggttttaatatcttaggaatagcaagagaaatttttccagatttaaaatcatttttaatgaatgaagaaatattctttaaacataaagaattttgggttgttgaagataaaccttttcttgcagaagtcaaaggtttaaattacgaggaaagtctattttgtaaaaagttacaggaaaatatttggggaaaaaatttacgtttagaacaagaaagaattaacttttcatatttgaaagagtatctaaagaaattagaagctgattcaaatagttaa

SEQ ID NO: 42205 - DNA, 1470 bp, Stenotrophomonas sp. SKA14
atgaagcatcgcgaacgcatctcccgttaccgtcatctgcgcgaacagccccaatggaagctgctcgccgccgaccacgccccggaaatcatcggcctgctgcaggggctgctgatggacggcgagcgcacgctgtcgtcgtcggtgctcaacgagcgcctgcaacgcgcgctggaccagctcaacggcgacgaactgtcgcgcgacctgccgcgtaccgcgcaggcctacatcgcgcactggctggcccagggctggctggaacgccgcctgcccgaaggtgccgaccaggagcagtacgagctgtcgaccgcggcgctgcaggcgatccgctttgccgatggtctcgagcaggcccgcgtggctgccaccgagagccgcctggcgctggtcatcgaacagctctcgcagctggcggcgcagaccgaatccgatccggacgcgcgcctgtcggcgttgcgcgacgagcgtgaccgcatcgacgccgagatcgcccgcgtcggtgccggccgcgtgatcgcgctggacggcaagcgcgcgctggaacgtgcgcgccagatcatcggcctggccgacgaactgaccgaagacttccgccgtgtgcgcgatgacttcgagcagctcaaccgcgatttccgcgaacgcatcatcgacgatgaaggcgaacgcggcgacgtgctgtcgcagctgttcgagggcgtggacgtgatcggcgagagcgatgccgggcgcagtttccaggcgttttggcgcctgctcaacgacgccgaacagagcgcgcagctcgacgccgcgctggaagcagtgctggcacgcggcttcgcccgccgcctggaccgcaacgagcgtaatttcctgcgtggcttcaccagcaccatgcttgagcgtggtggccaggtacacgacgtgctgcagaacttcgcgcgcagcctgcgcggtttcgtgcagagccgtggctacctggaacagcgccgcctcaaccagttgttgaagcaggcgcagtccgaagcgctggcgctgcgcgacgagttcccggcacagcgcggcatcggccgtgacctgcagctgaccaccagccgcctgcgctcgtggtcgcagtggaagctgcacgatccacgcagtgcccaggtcgatggcaacgtcgaatacaacgatgcggccgcgatcagcctggagagcgtcggcgatctggtcgcttcgtccgagatcgacttccgcaccctgcgccgcgacctgcacgatctgctcgatgcacagccgcggctcagcatcgcccaagccctggcgcagcgcgaggcgccgcagggtcttggcagcgtcatcggctacctgtcgctgggcacacgcttcggcaacgtggtcgccggcgagcaggagcttgcgcaatggcgtggtggcgacggtcaggtccgtcgcgcccgcatcccgctggtttggttcacccaggagagacgccatgagctggcatga

SEQ ID NO: 42206 - DNA, 702 bp, Stenotrophomonas sp. SKA14
atgagctggcatgaagatcccatcgacgcaccacaggcagacgtggcggaagacgcctacgaggccgagctggtggcgagcgtggcgcagccccgccgtggcaacgacgtgtactacctgggcgataccgggcgcctgccgctggatgcacgccgcgcgctgtgccagctgctgatcggccccagcatcgaccagctgcgccacgccaagctgtggccggcgctgatccgcagcgaagccgccatccgctccgcgctggctgacctgttcctggaactggtgctggaccgcgacagcggcgtggcgttcacccgccaggccgacaccgaggatgtcgacgccccggtgctgctgcgcacgtcgccgctgaccttcatcgattcagtactgctgctgtacctgcggcagcagctggccgaggccgatgcgcgcggcaaccgcgcggtggtcgccgacgccgagatggccgaagcgctggccatctacgaaaagaacctgtccaccgaccgcgccggcttcaaccgccgcgtcgcctcggcggtgcagaagatgaaggacaaccacatcctgacccgcctgagcggccaggaagaccgccacgaagtctcgagggcgctgaagctgctgttctccgccgaagacgtgtcccagctttcggcggtctaccgccagctgcgcgaaaccccggccgccgaggcctga

SEQ ID NO: 42207 - DNA, 3381 bp, Stenotrophomonas sp. SKA14
atggctatctccaagcacactcccgccctgttcaacgaaggcctgccggacccgcgcctgcagcagttccgcatgcgccgcctgcaggtgcacaactggggcaccttcaacggcctgaccgaagtaccgatcgccgagcgcggcttcctgttcgtcggtcgttccggctcgggcaagtcgaccctgctcgacgccatgtccgcactgctgacgccgccggccatcgtcgacttcaacgctgccgcgcgtgaagccgagcgcagtggccgcgaccgcaacctggtgtcctacgtgcgtggcgcatgggccgaccagcaggacagcggcaccggcgaaatcgccacccagtacctacgcaagggcgcgacctggactgcactggtgctggagtaccgcgccggcgatggccgcgtggtcagcctggtgcgcctgctgtggatctccggcaacggcacctcggccggcgacgtgcgcaagcactacatgatcgccgagcgtccgttcgacatcgccaaggacctcggtggcttcgacctggacctgcgcaagctcaagcagaagctgtccgacctgcaccacttcgacaccttctccggctacgccgagcgcttccgcgatctgctcggcatcgacaacgagatggcgctgcgcctgctgcacaagacgcagtcggcgaagaacctgggtgacctcaacgtcttcctgcgcgacttcatgcttgacacgccgaagaccttcgacgccgccgagcgcctggtcagcgacttcgccgaactcgacggcgcacaccaggccgtggtcaccgcgcgccgccaggtggaaaccctgctgccggcccgcgcctactacaacgacctgaaggaaatgcaccgccagcgcggcgacgacgaagcgctgaagctcggcgtcgacagcttccgcgaaagccgccgccaggcgctgatcgaagcgcgcctgcgcgaaatggacgtgcgtgaccgtggcctgctcggtgaagaagcccagcgccgtgccgcactcgacaaccacaccgagcgcctggccgaactggaactgcagcgccgccagcagggcggtgagcgcatcgaggaactggaacgcgagcagggccgcgccgaagccgagcgcgaccgccgccaggccaagcgtgaccaggcccaggaagcggctcagcaattgcaggccgaactgcctggcgatgcccacggtttcgcagagctggtcgagcgtgcgcagaacgaactgcaggaccgccagcgtgcctcggcggcactggatgatgcgatcagcgatcgtctcggtggcaagcgcgacgacgagcgccgcttcggtgaagtgcgcagcgaacttgaagcgatgcagcgcacaccctccaacatcccggcgccgatgcagaagctgcgcgcgcgcctggccgaggaaaccggcattgccgaggcggcgttgccgttcgtcggcgagttgatccaggtccgctcggaagagcagggctggcagggtgccatcgagcgcgtgctgggcggtttcgcgctgtcgctgctggtcgacgacaagcactacaacgacgtcgccgagtgggtgaaccgtacccacctgggcatgcgcttcacctactatcgcgtgcgccgcaacgacgatgcgtttgcgcgcgaaccgtcggccaagtcgttgctgcacaagctggaactgcgcgagcacgtgttcgaaagctggctgcgacgcgagctgggcaagcgcttcgactacgagtgcgtggacgccaagcagctgcgcaacgtcgaccgcggcatcacccgcgaaggccaggtcaagcatccgggtgaccgtttcgagaaggacgaccgcagcgccgtcggcgatcgccgccgctggatcctcggcttcaacaaccacgacaaggtgggcgccttcgagcgcgaagcgcaggaactggccaagcgcatcgccagctgcgagaccgacatcgcgcgcctgcgcggccagcgcgaccgcgacaacgagcgccgcctggcctgccacgagctggtcagcatcagctggaacgagatcgacatcgccgccccgcagcagcgcctgagcgatatcggggccaccctgcgcgacctgcgcgaaggcaacgccgatctcgccaagctggccaagcagatcgatgccgtgcgcgccgacatcgagcagtcgcgccgtacctatgaagatgtccgcgtcgagcgtggccagctggtcaaggaacgcgatcgcctcgaccgcgcgcgccagcagagccgtgcactggtgctgccgagcctggcccaggcgcaggaggccggcctggccgagcgcctgcaggagcagggcccgctcagcctggaaacgctggaagcgcacatgcgccaggtcagcaacgcgctgaacgaacagttgtcgtcgtcgcagcaggacctcaaccgcatcgagaaccagctgatcggctgcttccgccgcttcatccagcagtggccggaggagtcgggtgacttcaccgtctcggtggcttcggccgaggatttcctcgcccgcctcgaacgcctggaacgcgatggcctgccgcagcacgaagagcgcttcttcgatctgctgcagaaccagagcaagaacaacctgctggccctgcagcgccacagtgcagaggcccgcaagtcgatcggccagcgcctggacgaagtgaacgccagcctggagcaggtgccgttcaaccgtggcacgctgctgaccatcgagctgagcgaccgccgactgccggaagtcggcgagttccacctgcagctgcgcgaggtgttgtcgcagcagcagaccgagcagcgtgagctggccgaatcgcagttcaccgtgctgcgccagctggtcaaccgcctgggctcgcaggaaggcgaggacaagcgttggcgcgagctggtgctggacgtgcgcatgcacgtggagttcatcggcgtcgagctggacgcggaaacgcgccagcaggtcgagatctaccgcagcggtgccggcaagtccggtggccagcgccagaagctggccaccacctgcctggcggcagccctgcgctaccagctcggcggtgccgacagccagttgcccagctatgccgcggtggtgctcgatgaagccttcgacaaggccgacaacgagttcaccgcactggcgatgaacatcttcgacaacttcggcttccagatggtggtcgccaccccgctgaagtcggtgatgacgctggaaccgttcatcggtggcgcctgcttcgtcgaaatcagcggccgccacgactccggcgtgctgctgattgagtacgacgaagaaggcaagcggctgaagctgccggagcgcagccgccagcaggccaacgaaccggaagaagccgaggcctga

SEQ ID NO: 42208 - DNA, 1458 bp, Corynebacterium matruchotii ATCC 33806
atgagcattgttgcgcgtactatcagcaatcgtcgtttagaagaaaaatcagcaatccttaagctgcttcgtagcccacttatgcccgttgtactggggtttgttgctgaacactttcctcctagcacgaaggcccggtcggccattgaaatctatgacctcctcgatgccgacctcaaaatgcttcgcgcagaaggcttggaattaccgcacgacccccaaacctacattacagactgggtaaaggccggctggttggtacgccgccccggcaatgcggtcacgggggaaaccatcgagcccagcgcgaccacgctcaacgccctagactcggtagagagttggcagcacccacattcggcggtgtcggcggcccgaatccattcgatcgcggactcgttggaaaacctctcgcgggagtcggacccggatatcaacacccgattggcgcagttggcagaggaaaaagaggcgttggagcaactcatagccgacaccgaacgggggtattttgaggtgctgtcggcggaccaaatctccgaacgggtcctcgacgtgctggagttggcgggcacgatccccgccgatttcgcccaggtgcgcaccgagctggaagaaatcaaccgcacgctgcggcgccaactgttagagccggaagacagccgcgggcagattttggacgatattttccgcggggtggacgtcatcgccgaatccgacgcgggccgtagattccgcgacttttataccgcgctgttagagcacaaaaaatcgacgcctatcgacgagtggatcaccaacatcctcaaccgggaaagcgccaaagacctcgacgccaccattgccgaccatcttcgcaggctcttccaagacctggagtcggagggctaccaggtgaacatgctcatgacggaactctcccgatcgctccgcgactatgtgcgcacccaagatttcaccgaaaaccgccgcatgctcgaactgctccgcgaaacccgggcactggcgggacgcaccatcgaacaccaacacttgggtcccctggtgcagctacacaccccactgacgcagatcggcatgaacattcattccatcgactccctggaaatgaagaacctgggcgaagaaatggtcgaaactctgcccgtgccgctcgaagaagcccacattgataccgaagctttgttcgaatcggtgcgtgccagtgagattgatttcgaagagctacgcagccatatcaccggcagtgtggataaacgcggccaggctaccatcggtgatgtgttacaggattatccggcaactcaaggtttagccagcgttgttgggctattgtattttgccatggccaatggtatcgccttggaatcgttggaaaccgtcacctgggatgataacggcacccccatgcaagcggtcatcaccggttggttgttcacccacgacaataatctctaa

SEQ ID NO: 42209 - DNA, 2142 bp, Corynebacterium matruchotii ATCC 33806
atgactaacaacactcccataaaccacaacgaccagaacgaggaaggcgaaggcaaacaccgcaactctggggaacacaactccttcccgttcattgccccacgagaaatcgaatcccccgcccccacacgtcaccgggcggaattagcgtacacagaccggtatttcgggggaagaaacgccaccggccgtaatgatgcgggcatagtcaaggcagacatagtggaggcggaaatcatcgacgccgaggtactcgacgtgcaattcgacgacgacaccgacgcaccccaaaccacccatgggtcgcgccgggcgttgcattactccgcccactcccctgccgacacggatactgacaccgccgatactgctgatgccgcaggtaacgttgttgacgatgccgaggtagagaccacggcggaatccgaatcgggccgcactgttacggcgccggaatcgcccgcaggtcgacgtttcaccggggccggagctaccgaggcatcggaaccacaacttgaagtgtcgcctgaggaaacctcggatgatgcggcggctgccgataagccgcgggaccgggcggcacaacctgatgcccaccgcaccacctccgaggttgatgctcacaccgacaccgacgatgacttggaccaggaggctgctgcgaccgacccggagggtagccccgccaccctgccgacgacagatgccggcgagaataccgcacccaccaccgggttgcggaatcccgggtatgccggatttgtcggggcaggctttgaaaaccggacgactgacgaatatgccgtcgatggtgacaccgatgatgccggcgaattgaccgacaacgacgacccccacggtgagtcggatcatggcgatttgggtgtcgacgccaccactccggtccgggaagcccgccacactcccctggagatccaggaggaggcccgaaaattggtgaactccatcaatgccgccgcctcgtatgaagacttcgacgcctacccgacccaaggtgacaatccccaagaagaattcctcgatgatgacgcggctgacctgagcgacgaagacatagtcgatgaggtcctcaccagcgccgacgccaccgcccccacaacagagcctgaagctgccgaagttgccgaagatgtcacggaggcagaggagtcacaggccagcgagccagcttcggcagcggtatccgcggcggcggaaacgctaacggaagccaacgacgagcccgaggatctgacccacacaaacctggccgaggaatccgaagaatccgaggaggaagaggcggagacagctgaggcgccggcggagggcgtcgacaagcacaaacctggccaaccaacgccggagcaacccgccacgctcgtgactcccccggcccagcccgctgccccaaccgcagcccacgccaccgcaagcgcagtaaccacaaacgccgcccctgtcgaaaccgaagatactttcgattggatggaggacgattatgtccacaccagcattggtggcgacaacctgtgggactccgacgccggcacgctcagcttcgactcccggcgcgccctcgtccagctgctccagggaccccttgtgcgggcggaacagcatccccccatttggaaggccatcctgagtgacgaaaccgcactgcggcagcgcctggccgacatgttcctcgatcttgtcgttgacgaggatgccggcattgcgtttacccgcatcgccaactccggcaaccccattcgggtgggcaaggagcattatgtggacatgccccacgtcctgcgggtgaaaaccctcaccattatcgacacgattgtgctgctggatctccgcacccggctggggctggcggtaccgggcgaacgggtcattgttgaccaggaagaactgcgggaaaatgcgtcacaattccgcgcattggacgaccgggatgaggcgactttcaatcggcggttcgatgcgtctttagaccggatgcgccgcgactatagtttgctgggggacaccgaaaccgagggtcgctacgaagtgtcaccagcactcaaacatattttcgacgcccagacagtggcgggaatcaaagcagagttcgaagagctcttagccagggaggaatccaagtga

SEQ ID NO: 42210 - DNA, 3366 bp, Corynebacterium matruchotii ATCC 33806
gtgataacgcaaccaacatacgatcgagaaatagttcacgccgatcaatggcggttatcccggattcaattagtgaactggggcacgtttgacggcatcgtggatatcccggtgtcgcgtcggggattcctcgtcaccggtggttctggtagtggtaagtccacgctcattgacgcgatttcggcggtgttggtgccgtcggatcggctgcggtttaatgcggcggcccagcacgaggcgcgccgcggcaagggcagagacctggtgtcgtatattcggggcgcgtggcggaccacggaggacccggatttgggcatggtggtggcgcagtacttgcgacccaaggcgacgttttcgattattgtgctcacctattcaaatgggatgggcttgtgccgcagcctcaccggcctgttttatttgaagtcgggtgataataatccggcgaatgtggtgcggctgtttggggtgttcccggagcaggttgttgaggcccaggcgtttattccgtttttggcaaagggcctggataagcggggtattaaaaaggaattttcttccgcaagttttttcgaggatcacgcgccgtttgcggaaatgttccggccactattggggatttccagcatggaggcccagctgctgctgcaacgcacccagtcggcgaaatcgttggataacttggatcatttattccgggagttcatgttggtggagccggacacgttcgcgtatgcgcggaccgcggtggaacagttcgccgacttggagtccgcatacgagcgggtgcaggatgtgaaggcgcaggttgaggcgctgagtcccctggagcaattgcacaagcaggtgcttacggcgcaagcggagattgcctccaccacatcgttgcagcgggcgctgccgtcggtggcgaatcagctgaagattgcggagttagaggacgcgcaggtcgccgcggagatcaccctggagcaggcgcaggtcgccaacacgaaggcgacggaaaaataccggtatgcgttggaggagttttcccaggccaaccaggcgatgaatagtgccgatgggggccgggtggagaacctgcaaatgttggtaggccaccataagcagcagctggcagagcgccgcaaggcgtatgcgaacctgcagaaacgcatcgagtcgcacggtggggtgatgcccacgacggtgtcggagtttaacgacctgattaattcggcgaaggtgagcattgcggagcacccggcgaacatggagcggctgaatcgggacttggcgcagtcgttcgtgagtttggaccaggccaccaatgaggtgtccacgttgcagcaggagttggaggttgtcgccgccaataacagcaatattgatgcgaggtttttggcccgccgggaggcgatctgtgacgagttcaatattaaggaatccgaactcccgttcgccggggaattgatcgatattgtgccgtccgaaagcgagtgggagccggtgattcaacggttgttggcggatttcgcccacgaacttttggtgccggtccggtattatcctgcggtgcaaaactacattaaccgcacccattggggcgtgaggctccggtttagcagcattgattcgtcccatagttatccgaatccgcgggtgcacccgcagagcctggttcgtaaggttgacgtggttgaccacgagtttagcgcctgggtgagccacgagcttgccacccgctacagctatgtgtgcgtaaataatccgggtgatttggatcgactcgacccacacgaaaagggtgtgacgcgcagtggtttggtgcggcaagcttttcgacgttcggatccgacaagccggctacagaaaaacgatgtgcacgccctaggagaccgagtctactaccgactgggatcgaacaatcaagcgaaagtggagttgctgcggaagcatttgtcggatgcgcaaaccaccctgaaggcccggcagaacgagaatcagctgattcattcccgcatcgcccaggagaacgcccaggtgcagttcgcactcagcattgtggacgaggagtgggagaaccttgacaccgcgatcattgacgagcacatcaaatccctcaaccagcagttggagcagttgacggaaaacccggatgtgaagacgctcacggagaacgcacagcaggcggagcagaaactgcaggacgcccaggagcaaatgcagttgtgtaaccgtaatgtgggtgcggcgcagcacaccctggatgggattcaagcatccctggcggaggcgaacgccgaggccacgattgatgtggatgatgccacgttcaccacggtgcataagctgttcctgcggcatacccgccgggtgacgtcgaagaatgtggacaagctgatgaccattttaacgaatgagttttcggcaaacctcaaaaagaataatgagacgttaaacacggcgaataataagatcactatccggttgacgtcgtatattgagcggtggccggcggagcgggccgacctggaggccacaccggacttcatcaccgaggcgttagcgaaactgcagcagctcaagggcgagcggttagcggagttcacgaaccagttccgggcgctcattaacgacatgtcgacccggaatttagcggatatttcccaccggctgcggcaggcgcagaatgagattcgggagcggatcgcgccagtgaatcattcgctcgccagttcggagttttcggagggccggttcttgcgcattgatgtgcgggatgcccgcggcgaggtggtgaccacgttccaacgccagcttgatgaggccgtcagtggcggcatgaacgagcaaaacgatgccgaggcggagcagcgctaccacaacattgccacgctaattaagcgcctgggctcgaaggaagcgggcgatgttcgctggcagaaggccgtgcttgacacccgtcggcacgtgagtttcgtcggcgtcgaggtggatgaggacggcacggtgctcaacacctatgtggactcgtcggtgctgtccggcgggcaggcccaaaagctggtgttcttctgcctggcggccgccctgcgctaccagttggccaagccggacgcccaataccccagctacgccacggtggtgctcgatgaggcgttcgaccgggcggaccccacctacacgcagcgggccatgaacgtgtttgatgcgttcgggttccacatgattttggcaacccccctgaagctgatccagacgctcagccaatatgtggggaacacggtggtggtgagctacgacgagtccccgaacgagttgggtcaggtgcggggccggtcgtcgatttcccgcattgatttcggcaaggccaccggctag

SEQ ID NO: 42211 - DNA, 1446 bp, Clostridium sp. M62/1
atgaaacttctgaacgaaatcccgtcctcattctggggacttttccgttccccaaacagggaaatatatatagaagccctcttaaaaatcaacgaagagtatcagtacagcaactatttcctgagcagggagatgtgcatccaggtgctgggcgattacttttccaggcgccaggtggagattgagagagaacaggaggaggctgaggcagataccctggagccgccggccacacgtattctcaactggctgatcagaaccaggtggctgcgccgccaggaggattttgtcaacctgtcggtcaatatcgtcattcccgactatgccgcggtctttatcggcgcattcgagcggctgatcggggaggagggagacgaggcggacatctatatccagaacatttatgccaacctcttctcctaccggaacgatccccgggcatccatcgccctgttaaacacagcccttgtaaataccagaaggcttaacaagacccttcaggacatgcttcacaacatggacaaattttttacaagcctgctggatcagaaattttacggggagctgctgcgggaacacctggacggatatgtggaagagattgtaaagaaaaaataccatattttaaagacatccgataatttctacctgtacaaggcagatatcaagcagtggctgaagctcctcagagaggagccggagtacctggagctcaccatccgccggggaggaaaaaagctggagctttcagaggcagtccgcctgctcgatgacattgagagaggatttgatgacatcgaacgccggattgccaacatggacagggagcacacccgctatgtgagagttacagtgagccgtctctactatctcttaaataaggaagaggacacgaaagggctgattttacagcttctgaaccgaatgtcccgggaggaggatccggagccccttatcagaaagacggcggccaggatgaacctttcaagaagagagctgctctctgacaaatccctctacaggaagcgaaagcccagggaagccttccgggagaagctgcagccggaggaggctcccaaggagctttccagggaagagcttctgagcctgaaccgggtttcggcaaaatacaccagagaagagattacagacttcatcagagagcggatggaggataaggctgcggcgatcacaggagacagcgtccgaagcgaagaagattttgaaaagctgatcctggcctatgattactccttaaaaaaagaaagccccttcaggacagagggggagccggagtccatcgacaacggagcctatgtgtttccggctcttgtattcagagaaaagacaaaagcgggggagccagagaggcgcgccggggaggagacgaagggcagctaccatacaggaaagggacagataagagaagatgataccatattttaa

SEQ ID NO: 42212 - DNA, 696 bp, Clostridium sp. M62/1
atgataccatattttaatgagctgcttcaggaggagcgggaggagcttacccaggctatccggcttctggagcggcagacctatgtgctggagagaaaatatgacaggaaaacggggcgctaccagtattccggtgtgtacagaaccctggaacgccacatggagtttctgcgggaatacctggaaatatccggtatttctatctatgaggatattcagctgggtgtgatttacataaaaggggaggcagtcctggcagaaaagctgccgaagctcgccaccctgtacctgctcatcttaaaggtgatctacgatgagcagatgacagaggcctccaacagccttgcagtccacacgaccctgggagagctcagcgagaggctcggcgtgtttggcctgaccgggaggacggctcccacagaaatccgacgggcgttaagccttctgaaaaagtatcagatcatcgagccgctggatctgatggacgatctggatggaaatatgcggctgatcctctatcccaccattaacctgatcctgaccggaaacgatgtgagagagcttctgtcagagcttggagaaggagaagggcaggacaggcagctgacacgagacacagaagaagcggcggatagagaagaaaacgagacagacggggaagaaaatgagacggacggagaggaggattccagatga

SEQ ID NO: 42213 - DNA, 3426 bp, Clostridium sp. M62/1
atgaatgacaagggattcaaggcgctgacgcggatctgcctgaacaactggcactatatcagccataaggtgctgtccttaaacagcgggatcaactttttcaccggacactcggggagcggaaagtccacgatcattgacgccatgcagatcgttctctatgcaaacacagacggccgcgggtttttcaataaggcggctgccgatgattcagacagaagcctgattgaatacctgaggggaatggtgaatatagaggaaaacaaccggtttgcctatctgaggaatcagaacttttccacgacaatcgccctggaatttacggagacggagggcggtgaggcccagtgtgtcggcgtggcctttgacgtggagacggcgtccaaccaggtgaaccgcctgtttttctggcataaggggagactgccggagcatttctaccggactgccgatcgcaccatgaccatcagcgaggtgagagacttcctgaagaaaaatttcacaaaggaggacagcttctacggccctcacaacgagagattccgctctcagctctacagcacctatctgggaggcctcgacaaggagaagttcccccttctttttaagagggccattccctttaagatgaatatccgcctggaggattttgtgaaggagtacatctgtacggaggatgacattcacatcgaagatatgcaggaaagcgtcatgcagtatgggcgcatgaagaaaaaaatcgacgatacggtccgggagatggaggagctctcagaactgaatcaggcctttctgcaggtccgggaggccgagggggagatggaagggtatcatgcccttgcaaaggaaatggagattctggccctgaagggaagagtcaggcgccttggacgtgaggcagaggcggcaagggaggaggcaaaaagacagtctgagtcgaaagcgcagcttgaggagcggattcaggagaaggaagccgggagagaggaacttctgaaaaaaatcgcttccaccggctatgaggatctgaaggaaaagctgaaaaccctgaaggagctgattgagcagtacgaaaaaagtgaggcgaggtttcagaaaactgccgcaggcttaaagggctgggaggaggctgactgcactgcaaaccagaccctctgggacatcgaggcctttgagaaaagagagatctcagaggaggggcttcacagcctgaagcagagcatagaggccatgaggaaggaggccgatgaggagagaaaggaggcagagtcggagatacgccggctgaagcgggctcagacggaggcgagggagaacctgaaggagttaaaacaggggcgcaaggcctacccgaaagagctcctgaatgccagaacctacattcagaaacgcttcctggaggagttccagaagccggttcaggtggatattctggcggatcttctggacatcaggagcgagcggtggagaaatgcggtggagggctatctgggaggcaataagctgtccctggtggtagagccaaggtacgtgcgttctgccatgcgcttttacaatgagctggacagaagggcctattaccgggtgtctgtggtggacacggagcaggcggtcagggacagtcacccggtgcttgaccatgccctgtcggaggaggtgtccgctcagacggagtacgtccggtcctatgtggattttatgctgggaaaggtgataaagtgtgaggggattgacgagcttcgccagtgccggatcggcatcaccgacgactgccttctctatcacagctgccgcctgcagtatataaacccggaaaattatacgaggggagcctatatcggcgccctgagcatgaaaaagagaattgaaaacctggaggaggagcttcgggagattggggaggaacttaagcctctggaggaaaccaggcagacctgcgatcaggttctgtccctggaacctctttctctgactgtgtctgagtatggggaaatgtttgaggacctgaagaacctgaaaaagaagagggctgagaaaaaacgccaggagcaggcccttctcgaactttctgagggacagataagcgcctgggagaaagagcgggaggagcttcagaaggagatagagcaggaccgcggggctttgaaggccctggaggagaacctctggaagctgaatcgtgatattcagggcagggaaaagcagaatatagagcttcagggagagctgtcacagagggagagagagctttccgaaatgaaaaaagagatggaggaaaagagcggaacccatgctctcgagcagtttgaagcgaagaaggaggaggccctgctgtcagcttttaaggcagttccggacggctattccacggcagaatacgccctggagcggccggctcagtgcgagaggctgagggagacctttgaaaacctggaaagagagtcaggagagcgcagagagagccgctttgagaggctggaaaagcagcggatcgagtacttaaggcgccatcctggccgccgcttctcgccctccgacagaggaaatgaggagtacgacaaacttttggcggagctttcctgtgaccgcctttcagagtacagggagaaggcggccgagcaggccagaacggcagtggagcactttaaggatgactttatctttaagataagaagcgccatcaaggaggcctaccaccggagagacgagctgaacgagattatcagctcgctggatttcggaaaggataagtaccgttttgtcatcgagaaaaacaggggggctgacggaaagtattacgacatgtttatggatgaggccctggagattaatccggccagtctgagccagaacatggacaaccagatgaatttcttcaccatggcccacgaggaccggtacggggcgatgatgaacgagctcatagacattttcattccgccggatcaggccgccgccagggagcaggaggaggccagaaggcagatggaaaagtatgcagattacagaacctatctttcctttgacatgcagcagattatcgagggggaggagaccatgtacattccattgagccggatgatcaagaaaaactccggcggagaggggcagaaccccttctatgtggcactcttagccagctttgcccaggcctaccgcatcaacctgccggcccggttcagaagaaacacaaccatccgcctggtggtgctggacgaggccttctccaagatggatgcggaaaaggtggcaagctgtatccgcctgatccgcggcctgggcttccaggcgatcatcagcgccaccaacgacaagatccagaactacctggaaaatgtagacaagaccttcgtgtttgcaaatccgggaaaaaagtttatctccattcaggagtttgagaggaaggagttcggggagctggagtaa

SEQ ID NO: 42214 - DNA, 1413 bp, Clostridium sp. M62/1
atgtctttttttgaaacattgaacgagaaattttttaatcctttttgctgcagaaatcgggtgctctattttgaatgtatcagccagctgatcgaaaaatcaaaggaaatctctgttttgtacgaaacggacgccagaaacacactgattctgtatcttcaaaattgcacatactccatagaaacggaaaatattggagaagagattgctggcgggaaaactcctcaggagaacgcctccacaattctcaggtattttcgtgcatgcggatggattactccgcaggaaatcgggcgcagcggggacaatatcgcgtccgtatcggcatactgccgtaagctgattgacgcaatccataagatttttgatggagacgccaatggcgcgattacgaattatattttttccatgtatgaaatcctgaaattttccttcagcaaagacaatgcccggtcgatacgtccgtatcagaacatcctgattccactggtagaaaatgaatgtgacttgaaaaatgaacttctgattctgaaagacagtatccgtgaaattatgcgtgcagttatgaagatggcagacgccaacagtttcggtcagtttttgatgaaggatgaactcctgaaccgttttttcaatgattattttttcattaagaaaagtggtctgattccttcttacatttcggacattgaccggatgctgagaaaactgcgccactcggagctttatgaccggatgatccaggagtatagaaaaatagaaaacacagacgagattcaggcaaaggagaagattgaccgtctgtttaacgagctggacagcttcattaacctggaatatgagcaggagatgtcttacattgaccggaaaatcaacaactactacaatctgtattctacccggatgatgatggtactgagtgaaaataccaatctggagcatgaactgaaccggatacttctgtttttgaaaaatctgaacgaagagaaccgggcggaagcactctcaaagctttcagaaacacaccgcctcatgagcatgggatatatcggaagaaagtcttttgaacggcggaaaaagcgaaatcccaatcaaaaaaatgcgggcttagtctgtgaggaattgtcggaagaagagaaacagcggctgacggacgaacttctgacggagacgcccgatcggtacagtatggacaacgtggagaaacatttcgatgagatcatgagaggcagagatcagatttctgtggaagaatgcggagtacataccagggacgatgcgacgatgatcgcggcaagtatgatttattcggggacgtcagggtttccttatgaagtggaattcaggaagggcatggtggagaccgaggccgccagaatcagcaatatcagcataaagaggaagaaaacatga

SEQ ID NO: 42215 - DNA, 642 bp, Clostridium sp. M62/1
atgagcgatatcagtttgcggataacgataaaagaggaaagcggacatttgttcaaacgctgcatacgaaaactgctggagtccactttcatactgcgggataaggatgaaaaactgtatcagtttgcctccagagaatccaatcgacaggatatttccgagtacctgcgaatgattggttttgatatgatcgtggaggagaagacgggagtgtgcatgctggctgccagcgaagaggatgcggatacagtaggcttgaaacgggccaatgtggtgacgttttcgacgctgcagtatcatctgctgctggtgctctggaaagtatatctggaaaatctcggttacagcgaaggaaattttgtgacgagaggggatctgattgacaagatcaagtcctatgatgttcagctgacgcgcacggaatttagcgcagcgcttcgcctgtttaaaaaatacagcctgatcaatttcaacgatgatgaggagggcgaggatatgaaaattcagctctatccatcgctgcaattcggctgggatctcccacagtttcagactgtggcgcgggaatatttaaaagaagaaccggaagaagaaggcccagaagaaatagttccggatgaatttgaggaggaagaggaatga

SEQ ID NO: 42216 - DNA, 3318 bp, Clostridium sp. M62/1
atgatcctgctaaaaaaagtgcggctgatcaactggtatggattttccaatgtgacggctcccatcggtttttttacgctgattgcagggaagaacggcaacggaaaatccgtcatgctggatgcaattaaatatgccgcttacggagatacggtatttaacaagtcgtcggagagtaaaggaagccgtacgctgtcctcctatacgagaggtcttctggatgccacagccgggacgtacatgcgcccggcggaccgggtgccaaacgtgtacagccacattgtgctggagtattttgacgatgtggaggataagtcttttttgctggggacggtaattgagaccagcgcgtccaataattgccagacgtatcgttacgtgatggaccggagggtcatggagcaggtggaacatacttatgaagagaacggcgtcacgatgccctgcagcgcgtcgttccttcaaaaaagatacagactgacgctgatgaaccgggagcagggattgccgaaatttttgcagatgacgggactgaagctgaatctgggacagcttcccatctatctgcgcaagcttcggggaatcatgtcatacgatccgaacgccaggattgaccggtttatccgggagagcgtcctggaagaacggaacgtggatttcgggaaactgattcaggcgaaggagaacattgagcggctgaacgagaattttgagattatccagcaggagattaacgagctggatgggattcttggggagtacgatgcatgggagagcgagaaaaaccgtctgctggctgatgatatccgcatcatctataaaaagaggaaagatttgaaccgggagattgagcgccagacagctgaacaggaattggcacagagaagaaaggaagatctggagagggaactggagattctggatggaagaaaaaaagaaattgacgctcagctggtgcaggccagagtcagtttggagcagctggacagtacccggatgatcgcagaagaaagacgaaaattagaggaactggaggctgagaagaggacgctgatggctctgtgcagaaagctggagcattttcaggccgtggtcagcgaactgatgaatcagttttttgaaaaggaaaaacggatggagggtcagaacgtgctggcgtccctctgcgggcgcgggcacacggctgcggaaaaggcggcggcagtatccaggttcaaacagaaaataaacgagtgttacgacggactggtgatgagagcggcagataccgagagggatctggcagaactgaaccggagtctggacgtgcagcaccggatcatagaggattgtaaaaaacatcgcaatacgtttgctcagattccagagtatgtggggctgcgtgatgagatcaaccgtgaatttgaaaagagaaacatccggtcgaaagcacagtttgcctgtgaatacgtgattggactcacagatgaaaaatggagggacgccatcgaggcatttttgggaccgcgccggtatacgatcctggtggaccctcagtattatgatattgcagatgacgtgctgaaccgttcggaacatcgttatgcccatctgttcaacacaaagctgctgatgaagaaaaaagtacatgtggaagaagactcagcggtatttaaactggagatcaaaaacccggtggcaaaacagtattttgattatcagctgggaagaatgcatgcggtggagcgaaatgctgtgaaggaatatgaaaatgccatttccagggaaggccgcgtgtccgtagctatggacagctattttctgcgttttgacaggctccgttcctattatcttggacagaagacgtttgaactgaaccggctccgcgcggaaaaagagatttccaggctcaacgaggagaggaaagcaaaactggcagagaaaaaggagcttgaagatcagaagaaccgtatggcccagaatcgggagatgtttcaggagtatgactatgacgcccaccgaaaataccaggccgcgtcggaaaacgccagggcgtcggaggcgcagctggagcgcctgaaaaaagcgcaggagaataatcaggaatatctggagctgaacgagctggctggccggctttcagatgaacagaaagcggtgcagaacgaatataacgcaaaacttcaggagaaaagcggacaggacacgaccatatccagatgcggagagaagatagaggcaaaatcaggggaactggccgaacaggagaagcggtaccgggaatatcagaccgggtactataccatcgtgcagcggacggtagaggcctatgaaaaatacctgaaaaatggaaagaaaggtccgggcggcctgctggcggaagataccagacggcgtataggaaacagtatcacgcagcatgaaagagatctgacgcagaagcaggcggattataacgcaaaacatgccggacgcatgctgcccagagggacggagggaagagaacggtatgcaggcagaagagagcgcatctggatggacaatcttcaggaaatccgtcagaaactggaagagcagacccgcagatatgaggacatatttaaaaatgaatttgtgctgacgattctgaaatcctgtgagcgtgccagagaagatttaaggcagatcaacggagaactggcaaagctgagctttgctgcaaaatatcagtttgatgtccactatgtaaaggacgggtcagaatacgcaaaggtgattgaatacgcccgatatctggacgagcgggagcagctgggaggcaatgcagacggacagatcgctttcgatatgctgacctctgtgtccgatgaggaaggcgagcggttagaaacagagatgaagcagatcatcaaccggatcatcgaaaagaacagtgaagaaacgattgcccgttttgccgactaccggaactatatgaattatgagattctgatcagcaaccagatcctggaccgggcaaaattatcccggcagactggtttcaactccggggcggaagtgcaaatcccgtatctgctgatcctgtcgtcggcccttttgctgatttacaaccagcgtaccaattccacacgtctcgtatttatcgatgagccgtttgccaagatggatcccggcaatgtgaaattgatgctgaaattcatgcgggagcagagactccaggtaatcttttgctctccggataagacggaatccatcgggaacgagtgcgaggtaatcctgcctgcgctgcgtgtgcgcgcggacagtatgcagctggggatcgtgcagttccatgaagaaaaggcgtacagcagccggtga

SEQ ID NO: 42217 - DNA, 1251 bp, Clostridium sp. M62/1
atgaagaaaaggcgtacagcagccggtgaggggacagatatggtgaattacgaagaaaagctgctggctgccctggcggataaatacaggaagagcaaaaaagacagggggaccaatgtgattacgagacggacaaaactgaatccgtctcagctttataagaattacagccgcaacgacggcgatatgacacagattgaggcagtgaatcaggcgattttccggtgcagtcaagaaggatttgtgacctatgagacagagggattcagcagcgagatccagagcatttatctggtggatgaaaaaatcggcgagatcgaggactatctggaaacaaaatatggatatgagccaaaatctgcgaaacggaagtacgtggaagggctgattgccgggtacagcggacgttcgcccgcagcggaacaggagtgtataaagctgcgtcaggctctggaaaagaacaggattccgccccgatatcatcagacggaagaccttctcaaagcacttgtctttattgagaataatgagaaagaactgtatctgcgcgaagcttctctgctgatctacggggactccaaatatctggaggaaaatgtgctgggatccgtttgcagggcactccgggactgcctgggccgtccatgcggcccagcagagctggaagacgagatcctggaggaatatcatattacacgggaaaagcagaagctgtgcctgaagggggatatgacggtacgcatccttgggaaagaactggagattggggcgtttcccaacggtattgaattttttgctgatgaactgtataagattgagcagataacggtcaaaacggcggtttttactacggtggaaaactatacctcctggctgaggtgtgacagctcgaaaacagctctattttatctgggcggttatgccacccgttatcagagagacttcctgaaaaaaatattttccgacaatccaacgcttgtctaccgccatttcggagatatcgacgctggagggctttatatccatgagcatttgtgccgtgtgaccggtatcccgtttcagatgtaccggatgtcgcgcgcggaattggaagacgtacgctttcagtcctgcctgcatccgctgacagagcaggatcgagtgcgcctgaagtctctggaaaaacaggagatgtaccgggaactggcagaatatatgctggagcggggtgtgaagctggagcaggagatagtcagctattatgagctgtga

SEQ ID NO: 42218 - DNA, 1470 bp, Corynebacterium accolens ATCC 49725
atgcctgttgaagctcgcgccctttcactgcggcggttattacatgattccgcggcagtgcggctgctggcggccgataatgccccggtgattttggcgctgattgctgagtattttccccgcggcactcgggcgcggccggcggcagaagtatatgagctgatggtcaccgatttcgaggtgcttgccagtgaattctcaatgccgcgcacaccgcaaagttattgcaatgactgggtaaaagctggttggctagtccgtaaatctggcaagagctcgcgcggggaaacgttggaaccgagcgaggaagcactgtccgcgctcgaggccgttgagcgttgggaaacgccggttactacggtcacggcatcgcgcgtggaatctatcggctcggcgctacaacgcttggcgcgggatacgaatgaggatatttcgagccgcgtcgccagcttagaggcggagcgagaccgcattgaccgcgaaattgaaaaggcccacctgggtcagtttgaacgactgactgcggcagagaccgaggagcgcgtccaagacgtgctgaacatggccatggcggtgccaagcgatttcgccagggtgcgccatgaactcgaagccctcaatcacaggctacgccggcagctgctggatccagagggttaccgcggcgaggtgttagaggaaattttcagcggtgtagaccacatcgcggaatcggacgctgggcgcagcttccgcggattctattcctacctcatggatagagaacgcagtgcgtggctagaccagtggattaaccaagttctagaaagcgaggtcggccaagagctggcagcagaaaaccggcggcagctgcggaatctcttccgcgatatggaagaaacgagcttcgaggtcaatcaaacgatgactggcctggcgcgcagcttgcgcaactatgtctcctcggaacaattcgcagaagaccggcgcatgattgagctactgcgtgaggcacggggcatggccattgatgcagcgcaggcatcggagctgaaagcctttcaccgtatggaaactcccctgcagcgcatcggcatgtccattcattccgtatcgcgcatccacttggccaacccaggacgcgaggtcgtggaggaagcaccggaagccttccagccaggtcaggagaatgcggaggcgttgtatgagctggtgcgcgaatcagaaattgattttgaggaattgcatggggcgattcgcggggccgtcggcaaggcgggcccgtgcacgattggccaggtattacaggcgtgccctcccacgcagggcctggccagcgtcgtgggtttggtacacattgcagaccagcacccgctaccggctttgcacgatgatcatgaaaaggtcacctggaccgaagaagatgggaccattcgcgcggcgtatatccctactatgtatttcgatagcaccaccgttgaggagttgtag

SEQ ID NO: 42219 - DNA, 651 bp, Corynebacterium accolens ATCC 49725
gtgagcgctactgataatcaccgcgtcgattcggcgcatgagcccccgctgtgggaaagcgataaaggatcgctgacctataactcgcgccgcgcattggtgcagctcttgaaggggccgctcgtgcgagcgcacaaggaacctgtcttatggtccgccatcatctcggacgaagacaacctgcgcgcccgcctgcatgaggtattcctcgagctggtcgtcgatgaaggagaagggtttgcgtttacccggatggtagaagaggaaactctgcctatcccgcaggtgctgcgcacggataagcttaagcacatcgataccgccatcctgctgaacctgcgccaggaacttggtttggcgctgcccggtgaacgcgtgattgtggatgtagaagatctccgggagggcattggctacgtccgcgcggttgataaccgcgatgaagccgggttcaataaccgcttcaatgcggcgattaaacgcatccgcaatgaatactcgctgctgagtgccaccgagactgaggggcgctacgaggtatcacccgtcttgcgccagcttttcgatgccgccacggtcaccgctatccgggatgaatacgcccgcctcgcagaatccgagggcgaccaggaggaggcttccgatgactaa

SEQ ID NO: 42220 - DNA, 3372 bp, Corynebacterium accolens ATCC 49725
atgactaacctgtatccaggccaattccgcatcagccgtatccagctcattaactggggtactttccacggctacttttccattccggtagcccgcaagggcttcctcatcaccggcggatccggttcgggcaagtccacgctgcttgatgcgatgtcggcagtcttggtaccgcagaaggacctcaagttcaacgcggcatcgcagcaggacctcgggcgccataatgggcgcaacctcgtctcctatattcgcggggcgtggcggcagcaagaaaatgcgcacacgggtgaaatcgccccggagtatttgcgtgagggcgcgactaactcggtggtggcgttgacctacgataatggggctggcacgcagcacaccctcatcgccatcttccgtctcaacggcggtgaaaattcggtgagccaaattaaacggctctatggggtggtgcagggagatgaggacatcgataagctcagccccctactcacccgcaacctggatacccgcaagattaaggccatgtacaaggggcttggcgcgtcatttaccccgacgtacaatacgtttgcggatcgctttcgcaaacgcctgggcatcaagagcgagcaggggcagatcttgcttcaccgcacgcagtccgctaagtctttatccagcctggaccagctcttccgggactatatgctggatacgccgtctaccttcgagcgggcggaggagtcggtggagcaatttgaggatctgcgccaggcatacctgcgggtagaggacgtcaaggcccagattgagacgctggcacccctgccccaattgcattcccggcgcaccaccgcggaagcggataagcacaaggccgaggcgatgaatgaggtgctgccggcggtgcgcgcccgcttggtggcagaagaactggactatcgcatccgcgcgctgaccgcccagcaggcagaggcgcactctgctgccgaggcgctcgaagcggaggtcacgcaccttgacgatgccgagcgccgcgccgccgtagccgtctcccaactcagtgccggcgagctggccgccctagaagccaagatagaaaccgcggagaaggaaattgagcaccgctccaaggagttccaccaccttgccgctgccgccgaccagtggaccgatcactttgagctcaacccgcacggctttgctgagctgcaagcaaatgcccgcctgcgcatcgcggacttcgaggccgactcagcccagcttactgagcagcaacaagaagccggagtggccgcccgcgatgccgcgacagcatccgcgtccttagaaagtgagctgcactcatttagctcgcggcgcaccaatatcgataaagcccttgtggagctgcgcacccaactcgcgcgggatactggctatgccgaatcggagcttcccttcgctggcgagctactggatattgccccgcagcaggcggagtgggaaccggtgatccaaaaattgctgcacggattcgccgccaccctgctcgttccggaaaccgcgcgggaagccattaaccagtgggtcaattctcgcaacgtgggtacccggctcgagtaccgcactatcccggagtttgcaccgacacccgcgcccgcgcgcagcccgcaacagctcatccacaaactggagttccaagatcaccccatggcgcagtgggtgcgccaccatatttcgagccgttttaactacgaatgcgtcaactcggtggcagcgctcgaacaggtaaccaagaccccggccgtcacgcgcgatggcttggaaagccggcccaaggataaggatggctcgacgcgctttatcaaggatgatcgcacgcgctttaaaggcacgcggtggtaccgagtgggttccaccaataccgccaagattgagctcctacgttcccaattgacggaagcgaaagccaatgctcgcgccatggccaaacaggtccacgagctcaaccggaagatggatatcctgcgcacgcagcgcgataaagcgcagcgcgtactggagactaagttccaggatattgataccgcttctgctgaggcgcgcaaacgcgatttgcaagaacagtacgattctttggcttcctctccagaggcgcaggccctagccacagcgcatgagcaggcaaaggaaaaactcaccgccgcccgcggccaactaaacgaagcacaaaaacacctcggcaacgtggagggcgagctgaaccgctccacccagcggcgccaaagcatcggaacggtgcccacggtggccgatcagggcatcgccaaggcggtcgaagaggccctgcacaagggcaggagaaaactcaccatcgatgacatcgatgcccggcgcgatgaggtgcaggccagcttgcaagaaaccgcgcgtagggccgcacgccgcatcgaggagacgaatgccaagattgtctccgtcctgcacaagtacctatcgcagtggccggcggaagcggcggatttggagccacaggcgagcttcgccggcgaaggcatggagaagctgaagttcctgcgcgcggaccgcctggcggattttcgcgctcatttcttggagctgctcaatggcacgacggtgcaaaacctatcgcacctcgcctcttcgcttcgccatgcccgtagcgatatcgaacagcgcatggagtttattaataagtcactggagcgcacgcccttcaatggggaccgcaccctgcgcattgatgtgaaggatgcccggggccagttggtgcaagacttccagcgggatcttgatgccgcaacgtcccatagcctggcggagattagcgccgatgatcctgaagctgcggtagcgcgctaccacgccctggacaagattctcagccgcttgggctcgtctgagccagaggatattcggtggcgcaacctggttctggatacccgcaagcacgtcagcttcatcggccgcgagtgctaccccgatggtacgaccgccaatacttatcaggattccgcctccctctccggcggccaggcccaaaagttggtcttcttctgtttggctgcggcgctgcgcttccgcctggcggagccggatcaggacgttcctacctacggttccatcattttggatgaggccttcgaccgcgccgacccagcctttacgcgcaccgccatgtccgtgtttgcatcctttggtttccacatgattttggcaacgccattcaaactcatccagacgctatcgccgtacgtggatggcaccatcgtggtcaattacgacgagcccattatccagggccgcccgcaggcgcgtacgggctattcgcttatcgatgccacttcctatccccaggaatcccaggagtcccccaatgcggatgcctag

SEQ ID NO: 42221 - DNA, 1134 bp, Corynebacterium accolens ATCC 49725
atgcggatgcctagtgacctgcacacgcatgcagaaaaatacctgcgcaaccactttgcggaggcactggccgccccggattcgttgagcatcgactggccgctgcacccgcctacggccgccaccgccgcgcgcgatgtccccgcgacccaggagttcatccgcgcctggcagcgctggccgcaccaagaagagatccactacgaacagcgcaattggtcccgcacgggcctaggcaccaattccgtgcctacccgcgcggtacttaccggtgctccccgcatcgccgcggccacaggcctcagcggcgaatactcccgcgcgcaacagcgcgcacgcgacatcgccgcgttcttccccgactcccctgcattcaccgacaccgtgcaccgcacctatccccagtggaaggacttaactgcatacgatctgcgctgcttaaagccatgcttgacctggctgcgcgcccatccgaattccggcgagtgggagcgcgccgtaccggtcgaaggcgtggatggcaagtggataggcacccaccgccgcctgctgctcgcgctgctttcgcccttcggcatcacggatttggggctgcgccgcaccgatgcccgcctgcgcctgcgctacctcaaccacgcccccgcgttgtccgatatcgaggttcccctttcccaggctgcacaactctttcccaccgctcccccgcgcgttctcatcgtagaaaacaagcagaccttcctagccctgcccctgctttccgatgccgccccacccaccatcgccatcctcggcgccggcaatgccgcccgtcagctccacgccctcgactggctccacgatgtcgaaatcacctactggggcgatcttgatgccgccggcttcagcatcctcaacggcgtgcgcgcccactttccccacacggagtctctcctcatggataccgccaccgtcaccgcgttccgccacctcgcggtccccgatcctggtgatggctccgccatgcttagccacctcaccaccgaagagcagcgcgcctcccgcctcctctttaccgagggcaagctgcgaattgaacaagaacggattccattcgcgcatgccactgacgcgattcaatctacgtttcaacgctag

SEQ ID NO: 42222 - DNA, 1473 bp, Corynebacterium striatum ATCC 6940
atgtctgttgaagcacgcgctttgtcactccggcgcttgatgcatggttccgccgcgattcggctcctcgctgcggataatgcgccggtgattctggcgctgattgcggagtactttccacgcggcacccgggcgcgtccggcggcggaagtctatgagctcatggtcaccgatttcgaagtgattgccagcgagtttcccatgccgcgcaccccacaaaactattgcaatgactgggtcaaggccggttggttagtgcgtaaatccgggagaagttcgcgtggtgaaacactcgagcccagcgaggaagccctatccgcgttggaagccattgagcgctgggaacaaccggtgaccacggtgacggcctcgcgtgtggaatccattagctcggctttgcagaggttggcgcgggataccaatgaggacatcgccagccgcgtggccagtttggaggcagaacgcgcgcgcattgaccgcgagattgaaaaagcacagctgggtcagtttgaaaggctcaccgccgccgagactgaggaacgagtccaggatgtgctcaatatggctatggcggtgccgagcgatttcgccagagttcgccacgatcttgaagcgctcaaccaccagctgcgccggcagcttttggatccggagggctaccgcggtgatgtgttggaggagatcttcaacggcgtggaccacatcgcagaatcagatgcgggccgcagcttccaaggcttttattccctccttatggatagggaacgcagcgcctggttggaccagtggattgaacaggtgctcgatagtgaagcgggccaagatgtggcaccggagagaaaacggcagctgcgtcgtctctttcgcgatatggaagaaaccagctttgaggtcaaccagaccatgacgggcttggcacggagtctgcgccactacgtgtcctcggagcagttcgcggaggaccggcgcatgattgagctgctgcgagaagcccgcggcatggctattgatgccgcgcaaggctcagaactcaaggccttccaccggatggacacgccgctacagcgcatcggcatgtctatccactcggtctcccgcattcgtctggctaaccctggacgggaggtcgtggaagaagcacccgtggcctaccaaccgggcgaggacgacgcacacgccctttatgagctggtacgcgagtccgagatcgactttgaggagttgcacgaggcgattcggcagacagtgagcgactctggcccgtgcaccatcgcgcaggtattgcaggctcatcccccaacacaaggtctagccagcgtggtgggattggtccatattgctgatcaacatccgctgcctgctggacgggagtcgcaagaaaaaatcacatggactgaagaagacggtgcggtacgtgccgcgcagattcccactatgtatttcgatcacacaaccgttgaggagcttcagtga

SEQ ID NO: 42223 - DNA, 651 bp, Corynebacterium striatum ATCC 6940
gtgaccaccgccaacagcccccgcgtggattctacgcacgagcccccgctgtgggagcacgacaaaggaacgttgacttaccactcgcgccgcgccttagtgcagctgctccaaggaccacttatccgcgcacagaaagaaccagtgctgtggtcagcaattatctctgacgaagaaaatctgcgtgccaggctgcacgaggtatttttggagctcgtcatcgatgagaccgagggctttgcctttacccgcctggtggaagaagacagcctgagcatcccgcaggtgctgcgcacggacaagctcaagcacatcgataccgctatcttgttgaacctgcgccaggagctggggctggctctgcccggcgagcgcgtcatcgtggacgtagaagatctccgggagagcatcggctatgtccgcgcggtggataaccgcgacgaggccggattcaccaagcgcttcaacgcggctattaagcgcatccagaatgactattccctgctcagcaccacggagacagaaggccggttggaggtctcgccggtgctgcgccagcttttcgatgcctccacggtcaccgccatccgggatgaatacgcccgcctggcgcgagccgaggataccgaggaggacacctcagatgaataa

SEQ ID NO: 42224 - DNA, 3369 bp, Corynebacterium striatum ATCC 6940
atgaataagcacacggacctttacccaggccagtatcgcatcagccgcatccagctgattaactggggcaccttccatggctatttttccatcccggtagcgcggaaaggtttcctcattacgggtggctcaggatcaggtaaatccacactgctggatgccatgtcagccgtccttgtcccccagaatcacgtgaagttcaacgccgcctcgcagcaagacctcggtcggcacaacggccgtaacttggtctcctacgtgcgcggagcgtggcggcagcaggagaatacacaaactggtgagattaccccggaatacctgcgtgaaggtgcgaccaactcagtggtggcgttgacttacgacaatggccagggcaagcagcacaccctcatcgccatttttcgcctcaacggcggtgagaactccgtaggccagatcaagaagttgtatgggttggtgccgggcgatgaggacatcgataagctcagccccttgctcacccgcagcttggatagccgcaagatcagggcgctgtataaaggccccggagcatcctttacgccgacctatgccacgtttgcggaccgcttccgcaaacgcttggggattaagaatgtggagggccagcttcttcttcaccgcactcaatccgcgaagtccctgtccagcctggaccagctctttagggattacatgctggatgtgccggataccttcaccagagcggatgaggccgtggcacagtttgaggatttgcgccaggcctacctgcgggttgaggacgtcaaggcgcagattgatacgctcgggccgctgccccaacttcactctcggcggtctagtgctgaagcggataaggagaaagcagaggcgatgagtgaggcgctgccggcagtacgcgcccgcctagtggcagaggaactagatttccgcatccgtgcgctcacagcacagctatcggaggcccagtcgcagtcggagaccctcaacgctgaggtcgcacacctggatgatgccgagcgcctggccgcggtggctgttacccagctcagcgctggcgagctcgatgccttaagcgccaagatagaaactgcggacaaagaaattgagcaccgcacgaaggaattccaacggttggctgcggccgctggagcgtggactgatgattacgagttcagtccacacggcttcgccgagctgcaggccaccgcgaagctgcgcatcgaagattttaaggttgacttcgccaacctcatcaacgagcaacaagaagctggcgtggccgcccgggacgctgccaccgcctgtgccgcgctcgatagcgagctgcgctcatttagctcgcggcgcaccaacatcgacaaggctctagttgaactgcgcgcgcagctggctcgcgataccggctatgccgaatccgagcttcccttcgccggcgagctcatcgatatcagcccgcagcaggccgaatgggagccggtgattcaaaagctcctccacggctttgccgccaccctgctcgttcctgaggctgcccgcgacaccatcaaccagtgggtcaattcgcgcaacgtgggcacccgtttggagtaccgcaccattccggagtttgcatcaccgcaggcctccgcgcgcagcccgcggcagcttatccacaaactggaattccaagaccacgccatggcgcactgggttcgccaacatatttcgcgccgcttcaactacgagtgtgtggactcggttgcggaactggaccatgtcaccaccaccccggcggtaacgcgcgatggcctggaaagccgccccaaggataaagacggctcaacccgcttcatcaaggatgaccgcaagcgttttagcggcactacctggtaccgggtgggttccaccaacaccgccaagattgagctcttacgcgcccagctcacgcaggccaaggccactgctcgtgccacggccaagcaggtccagaacctcaaccggaagatggacgttctgcgctcccagcgcgataaagcccagcaggtgctggaaacctccttccaggatatcgacaccgcctccgccgaggctcgccggcaggatctgcaggagcagtatgactcgctggcctcctccccggaggcccaagccctcgccgcagcccacgagcaagccaaggccaagctcaaggccgcacgcgccaggctgaacgccgcccagaagaacctgggcaacgtcgaaggcgagcttgagcgctcaaccgagcgccgccgtagcatcggtattgtgcccgacatcaaggaccaggacatcgcgaaagcagtcgaagatgccctgcacaagggcaagcgcaagctcaccattgatgacatcgatgcccggcgcgatgaggtgcaggctagtcttcagaacaccgcccgcaccgccacgcggcgcatcgaggacgccaacgccaaaattgtctctgtcctccacacatatctggcccagtggccggcggaggccgcggacctcgagccgcaggcgagcttcgctggcgagggcatcgagaagctcaagttcctacgcgccgaccgcctggcggatttccgcgcccgcttcctcgagcttctcaacggctccaccgtgcgaaacctctcccacctcaccacagacctgcgccgtgctcgcagtgatattgagaggcgcatggaattcatcaacaagtccctggagcgctctcccttcaacggtgagcgcaccctgcgcatcgacgtcaaggatgctcgcggccaggtggtccaggatttccagcgggatcttgatgccgccacctcccacagcttgggcgaattcagctccgatgatacagaggctgcccttgcgcgctaccacgcgttggacaagatcttgagccgcttgggctcgagccagccagaggatctccgctggcgcaacgtggtgctagatacccgccggcacgtgagctttatcggccgtgagttgtaccccgacggaacgacagccaatacctatcaggattccgcctcactgtctggcggccaagcacaaaagctcgtcttcttctgcctggctgcggccctgcgcttccggctggcggagccggaccaagacgtgcccacctatggttccatcattctggatgaggcctttgaccgcgccgatcccacctttacccgcactgccatgtccgtctttacgtcttttggtttccacatgattctggccacgcctttcaagctcatccagacgctgtctccttacgtggatggcacgattgtggtcaagtacgatgagcccaccatcaatggccgcccgcgggcgcgcacgggctattcgcttatcgacgcctccacctaccaggaccccgactatgcgcagccctaa

SEQ ID NO: 42225 - DNA, 1137 bp, Corynebacterium striatum ATCC 6940
atgcgcagccctaaagacctgcaagcacacgcgtcgaaatacctgcgcaatcactttgccgaagcactggctgacccggattctgtgcgcgtcgactggcccctgcacccgcccactgccactgctgccgcccgcgatatcgacgccacgcagggcttcatccgtgcctggcagcgctggccccaccaggaggacgtcatctacgagtcccgcaattggtcgcgcgccggcctgggcacgaacaacataccggctcgcatcacaatcaacggtgccgaacgcatcgccaccgccgcgggccttaacctcgagtacgcccgcgcccgtgaacgagcgcacagcatcgctgccgtctttcccgattcccccgacttcgcccacaccgtccgccgcagctatacccaatggaaggatttaagcgcctatgacctggaatgcctaggaccgtgcctgacctggctgcgcgccaaccctgactccggggagtgggagcgcgccgtgccggtcgaaggtgtggacggcaagtggattggtacccaccgccgcctactcctcacgctcctcgcgccgttcgacatcacagacttagacctgcgccgtagcgacacccgagtccgcctgcgctacctcaaccacgctccagcgctcagcgatatcgaaatccccctagcccacgccgccacgcttttcccgcatacccctccccgcgtcctcatagtggagaacaaacaaactttcctggctttgcccacgctttcggacacctcccctcccaccgtcgccctcctcggtgccggcaccgccgcccaccaactccacgcactggactggcttaaccgcgtcgacatcacctactggggtgacctcgacgccgccggctttgccatcctcaacgccgtgcgcgcccatttcccccacacgacgtcactgctcatggacaccgccaccgtcaccgaattccagcacctggccgtccccgaccccggcgacggctccgccacccttacccacctcaccaccgaagagcagcgcgcctaccgccttctcttcactgcgggccggctgcgcattgagcaggagcggattccatttgctcatgtgaatgcggtgattcatgcaacgctcgcagcagcgtga

SEQ ID NO: 42226 - DNA, 1473 bp, Corynebacterium lipophiloflavum DSM 44291
atgaaccgaacaacggcggttgccgacaccctcaccatgatccgccttgcggactcggtcccggcgtgggtgatgttgcgcgccaaaaacgcgccggctgtactgtcagtgctcagcgcggtgtttcagtccgataaccgacaagtcgcgggcaccgaactgacgctagcggtggactcattgcttgttgatattcgggagcaaaccgacatggagcttcccaaatccgccgtggcgtacatcaacgattgggtcaaggccggttatctgatccgccgcagcccgcagggaacgcgtgatgagttctacgagctcactacggacgcccacgtggcaatcgactacgtccgacagctggtcaacccgcagcgctcggtaaccaagtcccgcctggacaccctcttcacgggcttacatagtctggctgcggagacggaccctgatgaggcgaccgctattcggcgcctcgagcaacagcgcgaccagctgcaggcgcgcatcgaccagatccgaatgaacggggtcggcatcatatctgatgcggaggccgtggagaaagcgcgcgagatcctggccctggcgagcgatttgcccacagacttttcccgcgtacgggaggagatcgaggaggtcgacaggggtctgcgggagtccatagtcgacgggcaactcaacgccggcgcggtgttggacaacgtgtttcggggtgtggatctgattaccgagtccgaggcaggaaaagcctttaacggcttctacgaggtcttccttgacccggagcgatccaagcagttcgacgcgactatcagctccgtgctgtcccgtgatttcgtggacaagctcgatccgctggagcgaacggagctggcacagctggcagacacactggatacctcgtcggggcaagtccatgactcgatgacaggcctgtccagatcgctgagaaggttcgtgcagtcccgcgaggcggagtcgcagcaagcgttgaccagggcgatcaataccgcccagcagctcgctctccaactcgcgcagcgcggcatcaaaccctacgagtccatcgagttcgatctggagttgaccacccggcagccgacctcgctgtcgagctgggaactctacgacccgatggagtaccgcatcaagcccaatatggaagtcgacgagtcgggggagatcgactttgaggcggtgcgcgcgaggatccgggaatccgagattgattgggaggagctgcgccgggcgatcaatgatgtggtggacaggagcgggagggcgtcgataagcgacgtgctttccgctcaccccgcaacccaaggcctggcgagcgtcgtgggactgatcaagcttgcgcacgaccacggcgagcgggccgacggcaccgagttcctgcactggcagcgcccaggcggaaagaatttccgcgcccggtacgagcgattcgaattcggcgaaaagattggacacgtatag

SEQ ID NO: 42227 - DNA, 588 bp, Corynebacterium lipophiloflavum DSM 44291
atggacaacaagcttcatgaggccgacaccggcaccctgaccggcctgcagcgccgagcgctggcggagctcatccgcggcccgtatgtgtccagcatcaaggctccggaggtgttccagacggtatcaggctcgcgggagctgcttgcgcagcagctggataacctctttctcaccctcatcgtcgacgacaatgccggtgtcgcctacaccaaggcgtgggatgtggaggtgcctgagaaacgcgctctgctgcgaaaacaatcgctgacgttcatggatacggtggtcatcttgcatctgcgccgcgagctggtgaccaccaaccccaacgagcgcaccatcgtggatgaggacgaggtattcgaggcgactctgccttaccagggccacgggggcacggacaagacgaaccagcgcaagcgcttcactgcctcgtggaacaagatgaagacctactccatcatcgtgtccacccccaccgaaggccgcttcgaggtctcccctgtactgcgcatcatcttctccggcgaggaaatcgccgccgtcaccgaatcattctgcgctcttctggaggacgagcagtga

SEQ ID NO: 42228 - DNA, 3351 bp, Corynebacterium lipophiloflavum DSM 44291
gtgaccgccatcatcccaggccaatttcgactgtcccagatccaggtgtacaactggggaaccttcgacaacctgcacacggtgaacgtatcgcgggaaggcttcctcatcacggggccatcggggtcgggcaagtccacgcttatcgacgccctctcgaccatcctggtgccacccagcaaagtccgcttcaacgcggctgctgacagccattcccagtcggggcgaaacctcgtcacctactgccgcggggcgtggcgccgcgagcactctgtggaggccgacgaactgacacaatcctacctgcgccagggagcgacctggagcggggtggcgctgcgctacgacaacggcaccgagggcgtggtcaccgcctgccggcttatgttcctgccagcgaacgcctactcgcgccaggagatggtggacctctacctgctccttccccgcgaggcgagcctgacggagttcgagcccctggcgctgaaaaacctgcctgtgacggaggcgaaaaagcagtacgcgtccgcgctgcacgtgagccgcagccacccccagttcattgcggcgctgcgccgcgccgtcggaatcaccgacgaaggagccttggatctgctgcaccgcacacagtccgcgaagacgctcggggatctcaaccacctgatgcgcacattcatgcttccggagccggagacgttcgccatcgcggagcaggcggcggggaacttcacggacctgcacacggcgtattcctctgtggtggatgcccgcgagcagatcgagcacctgctgcccgtgcgggtagcggccgagaaacgctcggacgtggccaccgagctgctcaccgtcgacgaggaacgcgagcacctcgagctgttcatcaatacctggaagcaacaattcgcccagaagcaacgggcccaactgacgtccgagctcgcggccatcgacggaaccatcaccgcggaaaatgcccggcgtgaggagaatgcagcggagcaggaccgactgcgcactctcattcacggcgcgcaggactcgtcgcttgtcgccgcggaggcacgtcgcgatgccctgcgtgagcagctgaaacgcgtggaaaaggccgaggcggacttcaaggagaggctgaagattctggacgccgcgatgccgggaacagtcgatgagttctccaacttccggctgcagctcgaaggagagcgggacgatctacgccagcaacaggatgacaacgaaaccaaattggagcaggcgcaggggcgtgtctacgagcttgtcaccatcaagaacagccgtatcaaggagctggagacactgcgctcgtccggctccgcgatggacagccggttgattggtgcgcgggccctcatcgcgcaggtcgcgggtatcagggagaaggacctgcccttcgtcgcggacctgatgagtatgaggcagggcgaagacgcatggcagggtgctgcagaacgtgtcatgggtggcttcgcccggactctcgttgtgccggaggagctgtacgcacaggtctcctccgcgatcaacgcgacacacctcggggcgaaggtgtcctacacccgattcagcccccagctggagaaccagcggccgccgtcgtttgtgcagggctcgctgggccagaaaattgaggtcgccgaggggcggttccacgcctggattcaaacacagctctccaagagctttgaccacctctgctgcgagaccatggacgaattccgggccgcccggcgcgccgtgaccctccaaggctcggtgaaacacaacccacacgaccacgtcaaggatgaccgtagccgcgtcgaggacaagtcgcggtgggtgctgtggggcaacctggatgacaagatcgacgagctccaggcggcagttcgcgctgccacggaaaagctcggggccgccacacgttcgcgtgacctgatcaaaggtgcgctgcaagcacagcgcactcaggtatccaccattgaacggctgctcgaaacgagtgacttcgccgacatcaatgttgccgccacgacggctcagcttggcgacgctcagcagctcgtcgatgaactgactgacggtaacgccgagctagcggccatgaagaagcaactctctgcggctcgggcgtcccggcagaaaatagagaagaacttggaggatcttctcgaggctcggggcggactgcgcaccgagctccagcagacggaggcgatcctagagaaggcccgcctgcaggtgggagagcgcgaggtgccggcggaggtaaacgcacggctcgaggagcgttgccacgctatcgatcgctccatccgcgctgacaacatcgaccgcctctcacaccggctcaccagggacattgaggacaggttggcggcgctgaaagatcgtgccagccgctatgacagccagcttcgcgacgccatgaaccgctaccttctgcgctggccacaacgccagggcgatctcagcgccgatccggcctgggagaaagacttcctcaaagagctggagcgtctcgagtccgatgatctcccgcgcttcgaacagcgcttccgggagatgctccgcgaccaaacccacaaacatctgggaaggttgcggcggctcatccgggatgcggcggcaaagactcgcaactcgattcagatgattaacaactcactggcggaggtggaattctacccaggcacgcatctcaccatcgaggtgcgcgaagcgcagccagcgatcacccgcgactttgtgcagcttctcgatgccgcaatggagggcatgatcaacgacgccgaccaggaggaaagcgaaaaccgcttccacaaactgcgcgcggtgattgacgcggtgacggtctccgacaacacctcgccgcgcgagcgccagctgcggctggacacccgcgaacacgtgaagttcctgggtgtcgagtacagccccgacggggtgcgcggcgcggtctacgactcagccgagggtctgtccggtggccaggcccagaagctctcctcgttctgtctcgcggcggccttgcgttaccggctcaccggcaccgggatgtccgcctcccaggcacgcaactcgacggtacagctggacggggagatctacccgcgctttggcaccatcgtgctcgacgaggccttcgaccgagccgacaccgagttcacccgcgccgccatgggagctttccgccagttcgggttccacatgatcttggccaccccggagaagctactgcagacggtgcaggactatatcgggggagtgctcatggtggagtgccccgaccggaagcgctctcggacgagttccctgaccatcgaagaggatcccattgaaaacccctga

SEQ ID NO: 42229 - DNA, 1077 bp, Corynebacterium lipophiloflavum DSM 44291
gtgcgcgctcgcgccgcaacgttttacgcgcgcaaccaccgcgcgtggctcggtggcgatttctccgggctgactatcaatctccagccgccgacgggcagggccgcagagcgtgacgacggcctttcggtgcgctcctggatcgacgagtggacccgcagcgccatccccgccgaatgggaagacaagaaactcggctacctgggcacctactcactgcccgcgcgcgtggtgctctccgacgcggcagtggccgcagaagcggcagggaggtcctcgcactggcgtcgcgtcaacgaattactgtcgttgttctgccacgagctgggggaagaagttcgagccggccttgccgcaaagctcgcatactgggagggctgggacaacgtggtcgccgcgcagttcatcgatgtggtgcgctggctacgcactcaccatgtcgccaagcactacgcacgcgagctgccgattttcggtatcgactccaagtggatcgaaactcgccgcgcggtgatctccgcggtggtcggcgaaattagcttccgtgaggcaccgtcgatggtggagctgcgcatcctggatcccacggacaacttctgcgggatgcgtcactggtcgtgccccgtctccgcgctctccgacgtgcccggtgcgcgggtgttgatcgtcgaaaaccgccagacctttctcgcgctgcccaacctgccgaacacgatcgcggtgtacggcggcgggctacgggcgcactccctcgtgcgcgatatcccctggctggcgacgaaagagttactgtactggggagacttggactcgcacggcttctatattctcgagctggtccgtcggcacgtctcgcccgtgcagtcagtcctcatggacctagacaccgcccgccgccatctggacctcgcggtcgaggaaccccagcccagcaggtttgtgccacacctcttaaccccctccgagacgatggccctggagttcctgcgcagccactccactagcggatgcatgcggatcgagcaggagcggatcgtgttcgaccacgtggagaaaagactcagggagattggctag

SEQ ID NO: 42230 - DNA, 1431 bp, Hungatella hathewayi DSM 13479
atgaacctgttcgatatcctaaaccctaattttttcagccctctaacaggagtcaacaaacacagatatgccgatatcatcggcttaatctgggatcgctgcagccagaatcccttatacagtacagaaaaaagcacgctccttgacgaagtggaatcctatttcaccgggctggaacagatcggtgaggggaatataccattagacgaagaagaaatttctggcgaggataaaccggaagataccggcagtacaactccgcgtttctgggcctcccactatctgcggcggttgaaaaataccggatggttggaagagaaagatggcggatatgatgatgaggccagatacgcggtcaatcaccggattatccccattatccaagcatttatagacgtaatatcaccgaaaatggtcacctatcaggggaaactttataaaatttatactctgttatccgggattggcacccaggcgaatccttatgaaacagttctgaaagaggtagaggaagatatggaggacttgaatatttcccttcggcagcttgcttcttccattgaggagcatatggaccaactcacacagggcaaaacaccggtggagattttggaactgtttaatgcatatgaagaaaaggtagtagtgggggcttatcatcggtttaaaacaagtgaaaatctcttttactaccgtgcagagttgtttgagatgcttgagcgctgtgaagatgaatacaaagaacggctggagcttgactatgcccagattatgggagtgccggttgatgaggccggtttacaaatcagacggcttctgtataagctgcgtgatgaaatcaaagagatggggaatattatccggatcattgatgaaagccatgttctttaccgttccagggcggtacagcgggctcaatttttgctgttgtcagatggcagcattaagagtaaaatcagtaccattcttcagtattatgcagcctctatggaatcgaaagaagaaatgctggaatacgatgaagggttagcatcccaaatttttcaaatctatatccagggatatttttgcccggagtcgctgcaaaagccggtgacccgcagaaaacctacggaaattgaagatatggaagcactggaaccgcttgatgaagaagtgctgaaaagagagcaggagcgtctgctaaaaatagccagggaagcattgacggaagaaaatgtaaaccaatatgcaaatcagcttctgcaaggccatgaggccgtggaagccagcagcctgacagagggtgaggatgagcagatgatcaaactgattggtctgtatacatattcacagtcaagggagcggacttatgatattgaagtaaagaatagagttataaagaaggggagaaccaggttcacagactttaccatcgaaaagaaacgataa

SEQ ID NO: 42231 - DNA, 579 bp, Hungatella hathewayi DSM 13479
atggctgttgatttaagggaagaaacggcaaattatctgctcaataactgttttctcatcggcacgctggagaatatgcgggagaagtattttgatgtaataaatcatgaaaatgattaccgtgaattatttcgcccgttaggctatacgcttgtgattcataaggcgctgagggttgttcaagtcatcagccggtatctatcgggcagagtggagcttaaaaagtatgagagtattctactgctgattctgcgtctcttgtacgttcagaaacgggaaagtctatcgaccaatgaaaatcaggtgctggttactgtggaggagataaaagatgaatatgataagttaagctttcccagaaagctggatcagcagcttttaacagacggactcagaacattgaaacgatataatctggcagctgcgattgataaactcggtgatttgactgcccgcatccaagtttatccgtcggttatgctggcgatgccggaaacgcacattaaagaggcggcagaaaagaccagggaatatttacttctatatacaaaggcggtggaggagggcgatcaggaatga

SEQ ID NO: 42232 - DNA, 3312 bp, Hungatella hathewayi DSM 13479
atgatacggatgacaagagtcaggctggtaaactggcataactttactgacagcattctggacattaagatgatcacctatctgattggagtgaatgcagttggcaagacaaccatcatggatgcggtccgctactgcctgacaacgaataagaattttaacacggccggaaaccgccggagtgagagaacgcttcagggctccgtgcatgggaaacagagggctgtaaaagtatataccagaccagggcatacggtttcttatattggtgtggagttttatgatgaaataaaacagaagccatttgttattaccgttcgagtggaatcggaaaatccagcgcaggaacttaggcatgtttcacaagactggtatctcaccaagccgggatataacttggagcagcttccttatattattaaaaatcgccctgcttccagagaacagtttcggctttccgggaagggactggagatggcccccaaccaaacagaagctagacgccggatcagccggattctgggaatcggagaggctgattcaccactgggcaaaaagtttcatgaagtttttcatatggggacaagtctggaggatatcaacaatattcgtgaatttatttacacttatattttaccggagccagagatgaacctggagacacttcaaggagatatgagagagttggagcgtctgtcagaggtgttaatggaagcgcagcagcgggagaagtcacttcaggaaattattgattgtctggatgagggaagaaggctggatgggagggtaagggtagttgaattgctgattgaatatgccagatggcaggaagcggtggaaaaggatcgttactgtgaactggaaattacgaggaatcagcgaatatctgtgacagctggagaagaactgaaggtacttgaagaacgtaagtcggcactcacccgaaagcgggacgaagcgatccgtaacctgggacagaatccggagaatcaggccctgacttatctgcaggagaaggaagaagagttaaagaaacaatgtcgtgaactcagaacagcgaaagataaactggatcgttctgtatcaatgctgaaacagttggatgagcagttgaaaatacaagactttgttttaggaatatccgacgaaatcaccaatatcgatatttcattggaggaaagaaaagagcagatacatacccttgcggcgggactgaaacagttagaaccggagataaaagagcggggacatcaaatttgggcttcaatcgaaacggcggaacaggaacttaagggaatcggaaaacggttgttgcagttaaagagcggcaagatggtgtacccaagagatgctgaaaaactaaaacaggtgatcaattcggaattacagaaacggggaatgccggaggaggcccggatattttgtgaactgctttatatgacggatgagtcttggcaagacactgtagagagctatttgggcagcctgcgatttcatgttctggttccgccccgttattatcaggttgcgaaagaagtatttgtccggatgggcagggaggttggccatgccggattggtcgatacgattggtcttgagcgggattatcataaagcggagtttccggaaggtgattttctggtgggcaaaatcgaaagcaaaaatccatatgcccggatgtatattaaatttttgctaaaggatactgtttgctgcgaacacgaatcagatttggaacaataccgccggagtgtaaccaaagatttgctgcgctatcagaattattgtttaattcggatggataagcgagaacattatatcgggctgaacgcaagaaagcagcagatagatgttttggaaaaacggcagaatacattgctcacagaaaagcggcattcagaaaattcaaaagtagagttggagcgattagagcagctgtattatccatttgttcagggaaatgcaatggaagacctctatcagcatcttgatgctccggagcggttagaagagacggaacaacaacggttaaatgtccggaaggagatcgaagaatacgagaataatccgattttacgagcaatgtttaatcaaatagattgtttgaaaaatgagttggaagatctggataaggaatgtgtgaataaacaagcaagtcaacaaacagctgatcaaacaatccttaaaatgaggcaggagcaggagaaaaaccgagattatattcaggaaacccggcagcagtatgaaagtctgctgcaccagtattcagagtatcaggaagatgcattggccagatatgaggagtatgcgaagacgcgctcgccggctgagattgtcaaaaaccagattaatagtaacgctttggctcagcttcagagcaggagggacaattacattaatgctatactgataccgaagcaaaatgattacaattcccattatgcctgtgattatgctcctggattggccggtgatggggcatttcggatggctcatgtgagcctcgtcaatatcgatttggaaaaatataaagaggacttgcgtcaggcacaaatccgctgcgaagcaagattccgcaaagatgtgctgtttcgtttgaaagacgatattacaactgcaaaacagcagattaagtctcttaaccgggttatggaaaacctggcttatggtgaggaacagtatcgtttttacgtagatgggtgtaaagagggggagttaaaggccttttacaacataattatggctgaaaaaaatgaagagtacagcgaagatagtcagctctcactttttacggaaaccagagacgaggcttatgaaacccaggttcatgactttatggaacggattatggtcgatgcgaaagagattgcccaggcgagggcagaaggaaaaaaggtcgcatttaaaccgctgtcccaatatgtggattaccgaacttatctcgattatgatatgtatgtgaaaaatctttccactggctatgaggttccgttatcagaagtcagcggcgacggcagcggcggagagaatcaagcgcctttttatgtagcgatctgcgcatcgtttctgcagatttatgagcaaagtgaaaacagtattcggttgattctgttagatgaggcatttaacaagatgacgagtgacagaattgctccgatgatgaaaatgtttcgtgatctgaagatgcaggttcttttgatttcgacggtcgaaaagtgttcgtcaatttatccatattgcgatctgacttattccattttaaaagttggaaatcgaaattcaatcggattattcgaccgggagcagatttaa

SEQ ID NO: 42233 - DNA, 741 bp, Hungatella hathewayi DSM 13479
atggttgtggattatacgcaaaagctaattcaggaaggtatttctatctatgaacggagaaggtactttgtccatgaaccagaggtaaagcagcgggctatcaatatcagcataaataaactttttcctaaataccaggataaccatgaccatcatgagtatagaaatgtgaatgctgtggttgaacagcttgtacgggatgggatattggaagcaaaaaccgatcaaagaggctattataagattgtgcggttcaggctggaggctgtttcatattgctatcaatttttaaagcgcaagtccgtcccggaaatttgccgggatttagagcatatcatagatatttatgattccccggaacaagagatactgcatttgttttgccagaaccaaagaacactactgacagagtatagaaagctgccttatggaattggctttgaagaggagaaactggaaggaattttgatagctttgaggggaattgaaaggcttcagaaagagacgtatattcgtaatttttcaactgctgtttatcacgactcaaaaaagtttgctcgtttcaggaactgtgttcaatcaattttgttcgattatagtgaacgggtagttgaaaaagagttgatcttggaacgatttcatctagttgataaccccacttatgccatgttcaaaggtgatgcaaagctttttggggagggcctttcgatagagctggggaaacttccgggaggcattgcg

SEQ ID NO: 42234 - DNA, 1377 bp, Hungatella hathewayi DSM 13479
atgaaacagaataagaaactgatggaagaaataccggaccggttctgggggctgttccgctcggtgaaccggtctatctacatagaagcactattgagaatcaacgaggaatatgaatacagcaactactttttgagccgtgaggtctgcatccagatattaagcgagtattttgcaaagaaacggtacgtgatctggcaggacgagctggaggatgaactggatacgctggaaccgccggccacgagggtgttaagctggcttttgaagaccggctggctcagaaaagtggatgattatgcctctatgacggtgtatattgtgattccggactacgccgccgtcatgacagaggcttttttgcggcttgacagcgaggatgaggacgagacgcagatctatattcaaaatgtctatgccatactgttctccttaaagaacgatccgagagccagcatcagccttttaaatacggcgcttgtcaacacgaagcgattgaataagacactgcaggacatgcttcacaatatggataaattctttgcaagcctgttggaacagaagacgtatgaagatcttctcaaggatcatttagagggatatgtggaggaaattgtgaagaagaaataccacattttaaagacctccgataatttttacctttataaaaccgacattaagagatggatagcggccatgcgggatgatacggaatggattgaacagatgagcaggcgaagcgggggaaaggtatccgccgccgatatcacggagaagctggaccagatcgagagaggcttcgacagcattgaacaccggattgccaacatggaccgtgaacattccagatatatccgcgctacagtcacaaggcttaattacttactcaaccaggatgataacatgaaggggatggtcattcagctgctgaatcatttgtccgagggagataagcaggaggaacggatccggcaggtgggagagcgcatgaatctgtcccagatgactattttgtccgagaaatccctgtataagcggagaaggccaaaggcagacttcaccggtaatctggagccggaggaagaggcggaggaactttccagggaagaaatcctgaacttgaataagctgaaaaaccgctacagtaaaaaagaaattgagagcttcatcgaggagaatatggaggatggacggatggaggtcaccggcgatatgatccgctccggggaagacttcgagaagctgatactggcctacgactattccaccaggcgaaagagtctgtaccgggtggaagatgcggatggggaaccggaaatgatagagagcggaggataccgttatccgaagctgacatttacaaggaggaaatcataa

SEQ ID NO: 42235 - DNA, 651 bp, Hungatella hathewayi DSM 13479
atggggtacgaggaacaggcgacaggaaccatggggatcccctattacgacagccttttgccggaagagcagcaggaagtaacagaagcggttaagcttcttctcaggcagacgtttgtgctggagtggaaatacgaaaagcgttccggccgctttacgaataaccgggagttccggatctgcaacaagcatctggaatttctaagaaaatattttgccgtcagcggcgtctcggtggtggagaacagccagatgggagttatctacattcagggcgaaacgctggtgggtgacaagcttccgaagctggctaccctttatttactgatattaaagctgatctatgacgaacagatggccacggtatccaccagtgtcaatatctatacatcactgggagaaatacatgaaaagctgggaaattaccggctctttaaaaaacagccgtcgcccaccgatatcagaagagcggtcaccctgctgaaaaaatatcaggttgtggagcctttagatctgctggaagatttaaatggcgacagcaggctgattatctatccgtgcatcaatgtggtgctgttcggtgacgatgtgcgggtgctgctggaatcatttggcgaaggagaagataacgatgacgaatcagagatttga

SEQ ID NO: 42236 - DNA, 3372 bp, Hungatella hathewayi DSM 13479
atgacgaatcagagatttgaggccctgtcccggatctgtttaaataactggcattatatcaaccgcaaaacgctgtcctttaaccgggagattaacttttttaccgggcattccggcagcggaaagtccacggtgattgacgccatgcagattgtgctctatgccaacaccgatggccgcggatttttcaataaggcggctgcggacgattctgaccgcaacttaatcgagtatctccgcggaatggtgaacatcggggagaacaatgagttcgcctacctaaggaaccagaatttctccagtaccattgttctggagctgcagcgcacagatacagaggaataccagtgtgtgggaatcgtattcgatgtggacacatcgaccaacgagatatcgagacgcttcttctggcaccgcggaccgcttctggaaaacggttaccggacggccagacgcaccatgtctaccctggagttggaaggctggctgcagagccattacggcaaagaagagtacttcgccacctcccacaatgagcgtttccgcaggcagctttacgatgtgtacttaggcggtctggattccgagaaatttccgctgctgtttaaacgggccattccgttccgtatgaacatccgtctggaagattttgtgaaggaatacatctgcatggagcaggatatccatatcgacgacatgcaggagagcgtcatgcagtacggacgcatgagaaaaaagattgaagatacttacacagagatttctatcctgaaggaaatgcaggagaaatacggtctcgttctggaaaaggaagaaacgatccaaaagaacggttactttacgggtaaacttgagattctggagctgatggaacgggcaggagaactgacggataaggcggcgctttccagagatgatctgcagaatcaggaacgcttaaaggacggtctggatgagcagattgcagacctgaccactcagggagaggaactgctgaaacgaatctcttccaccggatacgaagatttaaagacgcgtttggaatccttaaatgagctgatggagcatttaagcaagagtgaggtgaaatggcatcagaccgcagagcggttaaacgcatggatcgaccaggagaccacatcgaatcagacgatctgggatatcgaggaatttgagaagaacaccatcgatggagagaagctggaacgtctgaaaaagtcgcttgcggagatgcggaaggaagcggaggacctaaagagcgaggcgtcagcggttcttcgtgatttaaaacgccaggagcgccagctgaaagaggaactggcccagctaaaggccggaagtaaggcatatcccaaggttctggagcacgcccgttcctatatccagagaaggctgctggaggagacgggaaaggctgtggaggttcacgttatggccgatctgctggatatccgcaatgaggaatggcgaaacgcagtcgagggatatttaggaggcaacaagctggctctcgtggtgcccccggcgtatgcggaggatgcgctgcggatatacagtgaactggacaaaaatgagtatttccgcgtggctgttctcgatacggaaaaggccggaaaagatacgccaaccgttctggaaggcgcgctctgtgaggaacttgacgtaagagaatcgtacttaaagccttatctggagcggcttctgggacaggtggtgaagtgcagaagtatcgacgagctgcgcggctgccgcatcggtgtgacgccggactgtatggtttatcatacgttccgtctgcagcagatgaatccggagcagtacaccaaatccgcctatatcgggaaggacagtgtgagacagaggatccgccttctggaaaaatctctggcggaaatggagaataagcgggctccggaagaaaagacggtcagggaatgcgaggccgtgctaagtctggaaggactaaacgaggagaccggcctgtatctggaatggcagaaggatatgggggacttgaaggagcggcagaaggaaaagaaaaaactggaacagaagctgctaaagctgaaggaagagaacgtggaccagtgggagaaagagcggagcgctcttttagcccttgccgacggcaagagaagagaacgggacgcggtcagccgccggatctacgagcttcatacgaaaatctcccagatgacccaggcagtcacagcggtggaacaggagctgctggcaaaagagcgggaatttaagcaggacgatatcctggaggccgaatttacagagtatatggccgggaaggagcagccgaggtatgagaagcttagggactattttaccggaaggctgaacgcggtagcggaggccagggatcaggcattccagacgctgatggacgccaggggagagtacgcgaggaagtatcccaaccggaatttttccatcacggcgaaggataaccgggaatatgagaaactgatggagatcctggagtgtgatcatctggaggaataccgtcagatcgcggcagaacaggcgcggtcggcggtggagcattttaaggacgatttcatgttcaagatccggagtgccatccgggaggcgctgcagcgaaaggatgaactgaaccgcatcatcagccgcctcgatttcggcaaggataaataccagtttgtcatcggaaagaacaagggggcagacggccgtttttacgatatgttcatggatgattccctggaagtaaatcccaacgatttaaatgataccgtggacaaccagatgaatctgttcacaatggagcatgagagccagtatggagaactgatcgaggaattgattcacgtcttcatcccgccggataacgcatcgccggaacagatggaagaggcgaaacgcaatatggacaagtatgccgactaccggacctacttatcctttgatatgcagcagctgattcagaatgaggatgaagtgattaagatccgcttaagcaaaatgatcaagaaaaattccggaggtgagggacagaatccgctttatgtggcgcttctggccagctttgcacaggcgtaccgcatcagtatgccggagagcatccggaggaatccgacgatccgtctggtggtgcttgatgaggcgttttccaagatggatgcggagaaggtagccagctgtattgagctgatccgcggccttggattccaggcgattatcagtgctaccaatgataagattcagaattacgtggagaatgtggataagacattcgtattcgccaatccgaataagaagtccatatcgattcaggaatttgagcgggaaagctttccgcagctgatgaaggaactggatgagggggaagatgatgattga

SEQ ID NO: 42237 - DNA, 942 bp, Oribacterium sp. oral taxon 078 str. F0262
gtggatgagctgaagagcctttttaatggcatcaagcgctattatcagcgtctcgccgggcagcaggacatcaatatccttctgagagagcatttggatcaatacaaggagaagctctttgatcagatctactatcccctcaagacgatcgattccgtgccgcgctttaagggggagatcctccgcattctgaatgcctggagcatggatcgggaggtcatggaccgcatcgtcggacaggggatccggagaaggctcttctcctcggaggagcagggcagagaagagagctatgccatgctgaatgccgtcatcaatacctacgagaacatcgaggaactgattgccggagtagatgcgaagcacaacgagtatgtgaatgcctccattgacaggattcgctatatcgtaaatgcggaccggagcgcgagaggaaatctggtggatcttctgaaaaacgccgggagagaggatattctcaatgagatgagggggaagttcctcctcagtcggcacagcttcctggacagccagtctctctaccgccggatcaaaggggagagaagggagggggaaaaggcgaagcctctcgaaaggagagtggagagccccgccgcggtggatggctttctcacggagcttcgccgacagtacagcgatgcgaagatcgatcgctacatcctctcgattatgggggagaggggagagctttacagcgaagaggcttcgatccgttccccggaggacttcatcctctttctcctcggcacgcttcgagggggagaaaggagggctcccttcagtgtagagttctttcagggaaatgtagagcgaaatgactgcagtctgccgcggctttgcttccgggaaaagggaaggaaaagagcggacagaggggaaggagagggagaaggagaggggaatgctggaggagcagtttga

SEQ ID NO: 42238 - DNA, 672 bp, Oribacterium sp. oral taxon 078 str. F0262
atgctggaggagcagtttgaaaagctgaatatgacggagaaggagcagttccggagaatggtgaataaacttctttcccacagctatcttctctcccgaagctatgacttcacagatcatatcgcaaggacaaacccggagtatctctttgtggagcggaacttcgagctttttcaggaatatttttcctacagcgcctttcatcttgagagggacaataattacggcgtgatcagccttcagagcgagtatgatgaaaaccggctgagactcgacaagcagagcacgctgatcctctatacgcttcgcctgatctacgaggaggagagagagaagatctccctctcgcgggagatcttcgtcagtgtcgcggacctcgtacacaagatgatatcggtcggtgcgatccggaagaagccctcaaacctggcgctctcctcctctctccgcatactctcgcattttcgcctgctggaaaaggcgggaggcaggtgggaggacgcggatacgaggcttttgatcctgcccacgatcctctttgtggtctccaatgagcagatcacggggatgcacagacttctcgaggagggggacggggatttggcgggggaggaaggagagtcctattcggaggggggagaagagctttccgcggaggatgaagggaaatga

SEQ ID NO: 42239 - DNA, 396 bp, Oribacterium sp. oral taxon 078 str. F0262
atgaagaagctgacgagaatgctcatgatccgctggtacagctatgagaaggaactgatcgactttgatatgatcaatttcctgacggggaagacggcggccggaaagtccactattatcgacgccctgcagctggtaattctcggagacagcagcgggtcctattttaataaagcggccaatcagaaatccgtccgctctctcaaggggtatctctacggggagacgggggatgatggggatgcgggctatgagtatcttcgcacggggccgttcacgagctatgtcgcactggaattttatgatacggagaaggggaaatactttacggtgggatttgccgcggactgcgggagggagctttcggtgaattaccgctggtttctcatcccgtag

SEQ ID NO: 42240 - DNA, 1461 bp, Cardiobacterium hominis ATCC 15826
atgatgcttgacgagacgaacagcgcaatcacgcagctgacggcacgcagtccatccctgttcaagcgcctgccggagcggatttttgccccgctggcgtctgctaatcgtgggcaatattggcatctgctttgtgccctctacgacaaacgtttcggcccggacgcgccgttgccgccaggcagcggctttttaatgcgcgagattacccatgacattgccgaagaaatgcagcatcaggaatgggtattggaggaattcgaggcgacgccgtcaaccccactcgccaaccgcgccaatgcagtatttaaccgcctgcgtgacagcggctggctgcgggttgagcgcttgggcgtgcgggacatggtgaccatgccgcccgcggtcgctcatttcatgaaccgcctcatcgaatttgcccataccggaccggagtttgtctccggcaaaatccgcagtattgaggcgaacctgaaattgctattgcacgaaaacgccgacggtgcctccttgcaggaagctgccagacagtcgcgcgcgctgttggagcatatccgcatcgccagcaccaatgtgcgcgacctgatgcgtgaaatcggcgatattgaagcgacgagtgagtttgtgcgccgtttctttgatgattacgtcgaacgcatttttatcgccgattacaaagaattgcgcacacgcgaacacccgctggcgcggcggcaggaaatcctccgcctgctgggttatatccggcagacagcgctgcgcgaacgtctgctgcgctggtatcaggaaaaacaggcggcgggtaatgcggcacgcgctgaagcgctatttgaacgcgatttgcaaaagattgaagaattgcagcgcattgacgaataccttaaccgcctcgatgacgaaatccgccgcgccaaccggcaagcactcgcctatctcgattaccgcctgcgcgctacgcaaccgctggggcaaatgattcatgatgccgtcgcagcggtcattaaacacggtgaaaaagcggctgcctgcacgccgtttgcctgtggcaatgccatcagcggcgagcgcctcgcccgcccccgtcagcaaaactaccaggcgccgccgggcaaactgcgcacacagacgatatctccggaacgggcggcctatgcccggctggtcttacaggcacgcaaccggcgcgtgatgacattccccaaactcgccgccttcgtccgcatgcagcttgccggacgcgatgccatgaccagcgctgaattgcctactgacagcattgaagcggtgcgcgccttgcagatgctctgcacccttgccaccgagcacgcaggcagaccccgcccgctacccggcggttttatcatccggcgcgatggcaaagacgaacagccgtcgcccaccatctcgcacatcccttttagcctgatccgtttgcgcgccagcaaggaggacaaaacatga

SEQ ID NO: 42241 - DNA, 354 bp, Cardiobacterium hominis ATCC 15826
atgagtttctgggaaaacgccgtcgcgagcgcggacggcatgacggaagacgatttcgaacaggcagcgagccgcctcatcaccgaacaggtgctgtatgcggcagattaccgcagcaaagtggcttatgccctcatccgcgattttgagcgcgaattccgccgcgccctcgaaccgctgggttaccgcctgcacatcaacggccaactgcgctacgcctgcgccattccgcgccacagccgcaatgcggtggcaagcgttaagcaaaccctgctcgcgctggtgctacggcaaagccacaccgcaaaacgcgccgccatgcggacagttggcagcccccggtaccaaccataa

SEQ ID NO: 42242 - DNA, 561 bp, Cardiobacterium hominis ATCC 15826
atgaacgaaaaaaccgccaccggcatgggtgccgcacaaaacgccctcgacgactaccgcgagttctaccactacgacatcgaaatcctgcgcgaagaccgcgcgagtggcgaaacccggcgcgtagagtggctgagcaaacgtattgactccggctccggcggtgaacgccgcgcgccgctctacgtcatcgccggcgcagcattggcatcggcctgccgcctgacgcgcggcgacaacagcggccagcgcctgctcgtcatcgacgaagccttcatcaaaatggacccgggcaacatcgtcgccaccatgcgctactttgaagcactgggactgcaagtactcatggcgagcaccggcgacgcgctgggcatcctgacggccttccttgaccgctattacgacatcctgcgggatgccgaaaaaaacggcatcgttctcgacggccacgacgtcaccgccgaaacccgcgaacaattacgcgccgacctgcccgaatttcatccggaactgcttgcagccgaaatcagccgacaagcgggtgagggcagtgcgccatga

SEQ ID NO: 42243 - DNA, 1176 bp, Cardiobacterium hominis ATCC 15826
atgacttccccggcagaagaactggcacatcaggcgctgaggcggttgctgcgcgccgccgacaaatatgcggcaggcacgacgacgcgccgtgccgccctttccggcaaagcgctggcagactaccaccagctgccccggctacaagacaaagaaacctatgacgccgtcatggcacacgcgcaagcagaaggcgcgattaccctgacacgcccgcgccacgaaccgcagagtttcatcagccgcatcgaactcgccgacgcagccaaactggcggccatcctcggccaagaaacccgcgccgcacaaatccggcacgcaacagagacccttgccgcctgcctcgccgactacccggtcctgcacgacgtcctcgctgcctgggcaaaactgaaaaacgtgcggcaaaccgcgccggaagacgccgggcgttggcacgacgcctgccaaaccatcaactggtgccgcgaacaggagcagcgcggcatcaccgaaagcgccgtgcgtgatgccagcgcgctgctgttcaaagacagcaaacgcatcgagaatctgcatccctgccttgacgtgctgctcaccggaaacctcgccggtgaagcgcggccggaaacagaaatcctgcaagaactcggcctctaccgcgagccgcagccggtacgcctcgcgggcaacgtcctattgcgccgcacgcggggcgatttcccgccagatttcccctacagcgccttgccgccgtctgcgattcatggactggccgcacagcccgcgcaaatcctcaccattgaaaacctgaccacctttcacgtctgggcgcgacaacacggcgacagcaacaccctctgcctttataccgccggtatgccctcaccggcatggcgcgccctgtatggccgcttgcttgcgggactgccgccggacgtccccgtgtaccactggggcgacattgacgaaggcggcttccgcatcgccgccctgataagccgttgcgccgcagcaagcgggcacaccctgcgtccctggaaaatgcgtccggcagaaattcctgccacgcagcaccgcccggccagcgcacacaccctcgcgcaaatggtcaaatacgcccgtgatgcgggctgggaggatatcgtgcgcgaattggaagatgcgggcatcgtcgccgagcaggaaggttaa

SEQ ID NO: 42244 - DNA, 1467 bp, Corynebacterium efficiens YS-314
atgagctcaatcgcccaggcgttgtcttttcaacggatcttgacggattctcccgccgtccgtctcctcgccgccaagaatgcacccttcgtcatggccacggtgtctgttcatttcggaggtgctccggctccacgtccggcttccgaggtgtatgagttgatggcggcagatctgaccgtgctgcgccagcgcgggatggatctgccgaagaccccggcggagtactgcactgactgggttcggagtggatggctggtacgcagggctggaagccagcggaccggcgaattgctggagcccgccgaggatgcgttgagcgccctccaggcggtacagcgctgggagaaaccacgttcggcagttaccgcatcccggttggaatcaatctcggaagcgttgcgtggcctggcacgtgatactgacccggacatctcctcgcgtctgcaacgcctccagatcgaacgtgaccgtctggatcgggagatcgaacgggtctcgcagggtgatttcgaattgccatccgtggagcgggtgtccgaacggctggaggatatcctgacctcggcgtcatcagtgcccgcagacttcgcccgggtccggcatgagtttgaggtactcaaccgcaccctgcgtcggcagttactggatcccgatgccacgcgcggtgacgtactggatgatattttcacgggggtggatgtcatcagcgattccgaagccggtcgcagtttcaatggtttctattccatcatcaccgaccccgaacgcagcgcctatatcgacgcctggatagatcagattctggccagcgaacccgcccgccatcttgaccaggacagccggatgtctctgcgcagtctcatccgggacatggaggaggccggggcggaggtgaactcggtgatgacgggtctggcccgctcactgcgacactatgtggccagtgaacagttcgcggaggatcggaagatgatcgaattgatccgtgagacccgcgccctggccgcggatgcggtcgaagagtcggaactgaatgccattcacgcgatggagactccactgcagcgtatcggcatgagcatccagtccgtcagttccatcgaactggccaaccccggcgaggaggtagtcgaaggtgagaccatcgtcaatgcggcgcagccgctcgacgtcggggagttactggccacggtccgccaatcggaaatcgacctcgaggagctgatcgactcggtccgcgacaccgtgacggcggaagcggggcgggcgacaatcagccaggtgctggccagacacccggcgacccaggggctgggcagcatcgtcggcttactccacctggggctccaacacggtctacccggcggccacaccgggcacgtcacctgggacgaggacggaatcacccgccacgccatcatcgaccagtatgccttcgataccaccagcctggaggagatgtag

SEQ ID NO: 42245 - DNA, 621 bp, Corynebacterium efficiens YS-314; identical to SEQ ID NO: 41676

SEQ ID NO: 42246 - DNA, 3363 bp, Corynebacterium efficiens YS-314; identical to SEQ ID NO: 41677

SEQ ID NO: 42247 - DNA, 1113 bp, Corynebacterium efficiens YS-314; identical to SEQ ID NO: 41678

SEQ ID NO: 42248 - DNA, 1407 bp, Bacillus cereus Rock3-42
gtggtattgaagaaggaggttgaaatgagaaaattatttgaatgcattccggaaaattatttcaatttgtttactgggaaaaatcgaggattttatgctgaagttgcttttttactgtatgaacaattccatatcaatcgagctggtatcttatacagtttgatgaaagatgagattcaagaattgatagaaacaaaagaggagttaggagaatgtattgatgtagaagatgaaatggaagaaagagtgcaagacagtgctgagagagcgaatgtggtgcttcgacgtttaaagaaacttaaatggattgatgtggaagtacgtgatcaatttgaagagtttatagtacttccggtgtattctagccgtattttggctgtgctaaaggaaatttgtgaaaatagaacaattgaatatcaaaggtactgttttacgacatatcaattattaacaggtgtggaggcggaagagcgcccagcttcagctattttggagtctgaaaaatatagtgagcaactttatgatgaattaacaattttattgcacaatatgaaaaatcatatggaaacaattgcagccaaagatgatatacaacaagtgttagagcatcattttggagaatataaaaaagatataattgataaaagttatcatcgtttaaggacatcggatcatgtgtcgagatatcgaaataaaatattggagcgtatacagacttggtttttagatgatgaattcatgaagcgtgctgccaaagatgctgtagaaagtggatattctactagtcaagaagaagtgatggatgtactaagtaagaaaatgtatagagttgaagaaatttatagtaatttagatgaaatctgtaatcaaattgatgcacgtcattatcaatatttacgagcggtcttagatcgttctcgatatttaagtacttataatgacagtactgattacaaaatatcttatattttggaacatatcaggcaaacggatgagaatatattcgattcttccccgtttcgcttagtacagtttaggcaacttcaagaagcatcactgttatccccacgtaagaaaaaaggtgtatatgaaccagaacagcatgaggttaccgaaattagtgaagagatgcgagaagagctaaaagctgaaaatttaagacgtattgaaaaggttattaatagaaagaaaatccggaaatttgtgttggaagcaatgaaggggcgtcaagagatagagatgagtgagttggatttgcaaaacgaggaggacgctttgtatttaatttacgtttatttgtatggttacagtagggacgctggatatacgttaagtgaagagtcacctgactttattacacaaaggggctatacattttctaatcgaacaataaaacgagaaaattag

SEQ ID NO: 42249 - DNA, 594 bp, Bacillus cereus Rock3-42
atgcaaaatatattggatagagaaagagaagagatggaagttgttattaattatttgttttctcataattttttattgaaagaatttgaacgtgagaagtatcaattggcagtacgaaataaagatatcattaagcgatatttaaaggtaattggttgggattttattgtggatgaaaagcatgggtgtattgttattgcttcgccacattacgagcatcggttgaaattgaagaaagatgaaacgatttggttgttagtattaagacttatttatgaggaaaaacgcagttcgctatcaattagtcaatatccctttaccactcttcaagaaatcaaggggaaatatgagacgtttcgattaacatttgtatcaaaaacgaagttacgtgaacttgtgcagatggggaagcaaaatcaacttttgagaccaattgataatgacatagaattggatgattgtcgttttcagcttttccattcatgcattcatgtgctgcaacaaggagatttaaatgtattgtatgaaaaaataaaatcttatagtgaaggtggggatcacattgaaatggatgaagaaactacgattaattaa

SEQ ID NO: 42250 - DNA, 1203 bp, Bacillus cereus Rock3-42
ttgcgggggaagatagggacagaagaaaagccttttgtacgagaagggtattttacaacgtatattgttgcggagttttatgatgagaaggtagaagaaagttttgtaattggtatttcaattgatgtatttaaagatgatgagaaaataaaagagtattttattatacctaaatctgaaatgaatatgatttcgttttttaatataaaaaatgagaaacgttacgtagaaacacaagccgatttttcaaaaaaattaagagcgcaatttccaaaggctataattgaaaaaagttcaattcaatatcaaaaagctttattacatcgctttggtggactacatgaaagatttattaaaacgtttgcgaaagcattatcatttaaaccaatcgataacatgagggattttgtatataaaaatatactagatgaaaaagaacttaaaatcgatgttatgaggagcatttttcaaacacatgaagaattgcaaagagaattagaagaattaaaagaaagaaaagaagagctggaacgaatagataatatttatatggaatgtgtaaagttggaagcggatatttccatacaagagtatgttcttcgaggactagattatttactgatacaagaagaaatgagtatgtgtcaaaaacatattgaacagaaagaaaaagaattaaaaaaatgtgaattagatcaaatgaagacagcagaacaaaaagagtatgctagaaaaaaagagattgattatgaaattaagattaaggatagtgctgaacaaaaaagacaaaaacaattacaagaacaaatagctcaagcgaaaaaagaatgtgatgatttagagcgtgccaaaaatgtatatgttcatagtttagaaagagaagaaaaggatgtttctagcctttttaattatcaaggtaacaaatatttctctttaagcaaggatgagaagcatttattagaaataggaagagattgtctagccttcttgtcacataatgatggtactggagggaatagagaagagcaaacattaaataaacttggagagagtttaaaacgaattagtgggcgtttttataagagtacagcagaattggaacacagatctgttgaattgaaaacagaagagaaaaaattactttctgatatagagaatttaaaaagaaagaagcgctcttatcccatgtctgttgaaagttga

SEQ ID NO: 42251 - DNA, 1434 bp, Faecalibacterium prausnitzii A2-165
atgcagctgtttgaactggtcagcccgcggctgttccgcccgctggcggggcccaaccgggcgttttatgcggagctgctgctcctgctgtgggaggagtgccgccacacggcggattactccatctcccgggcagaagcggtgagccgggccgaggattactttgcggcgctggcaaagccgctggcactggatgccgatgacgcgggcgacgaagccgaacagcccacccgggatccccatacccttgcgttgggctttctgctccgcctgcgccgcaccggctggctggaagagcagcccggcagctatgaggaagagcctgcccttgcctttgtgcctgaggtggcccctctgctggaagcgctggaagagatcctgaacccgcgtgttgtcacctacaccggcaagctgtacaaggcatggcagctgctgcagaacatcggggaggaaaagagcccctatgagaatgttctgcgggaggtggcctccgatctggaagcactgaacaagtccctgcgggcgctgaacgcatccatcgggcattatatcgaccggcttacccgcaaccgtaccccgcaggaggtgctggagctcttcgaccagtacgaggaaaaggtggtggccgccgcttaccaccgcttcaagaccagcgataacctgttcaattaccgcgcttatctggaagaggagctggacgactgcgaggcagaacacctgccccggctggcgctggattacgcccgggtggagcgctgtgcccccggcgaggcagcccctgccgtgcgtgccctcatccagaaactgcgggattcgctggaagagatgagcaccctgatgtgccagatcgaccagagccacatccgctaccgcaagcgggccgtgcagcgggcacagttcctgctgctgagcgaccgctcctcgcagggcagtgtcaccgccctgctccgccgttatgccgaggagatcaaaacgcccgatcagctgttcgcgccggatgacggcccggtggcaaagcacctgcacctctacccggcggcggtgttcggggcaaagcccctctacccgcccgccgcgccccgcagcgaaacgccgctggctccggtgcggcaggccgggctggacgaggagcagctgcgcaaagaacagcagctgctgctggactacgcccggatggccgtgactgaggagaacgtgggcctgctggcaaaacaggcccttgccgcccgcagtgcggtggctgcctccacactggcggaggaatacccccgcgattttgcccgcatcatcggcctgcacacctactcgcagtcgccgcgccgggcttacgatatcacccttaccggaaactgggtcgaacggggcggcttccggtttgaagagtttattctgacaccccgcagggaggacgctgaccatggccgaaccgaataa

SEQ ID NO: 42252 - DNA, 606 bp, Faecalibacterium prausnitzii A2-165
atggccgaaccgaataaaatgctggaagagaccgcaaactatctgctcaaccactgctttgtgctgggcggcgtggaggatcagcgggcaaaatatctctatgtgcaggatcatctgcccgaggtgcgggccgtgttcgcgccgctgggctatgcggtaacgctttacccggcgccgctgcaggcggcggcgctggtcaacgagcatgagggcagccaggcccggctgctgaaatacgagagcatcctgctgctggtgctccgcctgctctacctgcaaaagcgggagagccttgccgccagcgccgatcaggtgctggtcacggtggaagaggtgcagacagagctgcagaagatgaacctgccccggcggctggatcagcgcacgctggaggagctcatgcgcaccctgcgcaggtataatctggcccgcccggtggggcggctgaccggtctggacagccgcatcgaggtgtttcccactgtgctgctggccctgccggatgcagaccttgccgatgccgccgccgagagcagccgcacccgggaagaactggccctctacgagcggcctgacggagatgccagcggggaggaagaagaatga

SEQ ID NO: 42253 - DNA, 3339 bp, Faecalibacterium prausnitzii A2-165
atgatcgaattaaagcgcctgaagctcatcaactggcacaactttgaaaatgtcaccttcgattgtgcccgtctgacttatatgatcggtgtcaacgcggtgggcaagaccaccattctggatgccatccgctactgcctgaccaccaaccgcaatttcaatgccctgggcaataaaaagagcggccgcaccctgcagggctctgtccacgccaagcagcgcggcgagaacgcctaccgccgcccaggccgcacagtggcgtatatcggagccgagttctgggataccgtcaagcggacaaactttgtcatcgctgtccgggtggaatccgagggccccatgcaggagcttcaccccggcgatcagacctggtacatctccgaggacggcatcacgctggaaaagctgcccttccttgatccgcgcaccggtgcccccagcgccaaggaggacttcaagcccgctgtgggccgcctgtcctacacccgcagccccagcgaggcccgggaccgcatctgccgtgccctgggcattggccgcgcctccagcccgctgggcaaaaagttcaacgaagtgttccagatgggtaccagcatggacgaaatccccaacttccgggagttcctgtaccagtacatcctgccccagcctgaactggatctggaagcgctgcagggcgaccgggtggagctggaaaacctccacgccgttctggccgaggcccagacccgtgccgccgcgctggaacagatcgtggcgtatggccgggaagctgctgccaaagaaacggatgcccttgtcaaccggggtgcggccctgctggcccgcgccgaagcggatgccggtgaggatgcctcctggcagagccatttggatgcaggccgccgccagctggccgacctgaacgcaaaatacgaggccgccaagaacgccgaagccgaagcccgccgggcctatctggcggcccacggtgcggccggtgacagcggcgtgggccgggcgctggatgccctgaccgaggagctggcccggaaaaagagcgcgctggatgcagcggcccggacaaggaatagtctggaagcgactgcggataccatcaccggcctgctgacccagctgaaccgcagcggctttgcggtggagaaggagctctggccccagcgcctgacggcggaacatctccccgccctgaccgaggcgctggcctgcatcgaaaagccgctggaggagcagtattttgctgcccggcaggcttcggcggatctggcaaaagagcaggagggcctgcgggccgagctgaacgccgtgtccggcggcaagtgggtctacccccacggcgatgccgccaccaaagtgcgggatgccgtgaacgctgagctgaaaagccgcggcatgacggcggatgcaaagatcttctgtgaactgctgactgtggctgatgagagctggcaggactgtgtggaagcctgcctgggtgaccgccggtttgatatccttgtgccgcctgcccactacgccgccgccaagagcgcctttgtggcgctgggtgaccgggtgggacccatcagcctgctggataccccgggcatccgcaaggcggaccgccatgcagagacggcccccgccgacagccttgccgcccaggtcaccagcgaaaacccgctggccgcacagtatgcggacaccatcctgcgccgcatcgtctgctgcgacacccccgacacgctggagcatttccccgacagcgccacccgggacctgctgcgccaccatcccttccggctggaacgcctgcgcaggccccagcgctatatcgggctggatgcccgcagggagcgtgccgaagcgctggaagcacagcttgccgcccaggccgaccgctgccgcgaagccgcccagaccgaaaagaccctgaaatctgcctacgaccagtaccagaacgtcctgcggggccatgcgctggaacagctggccgaactctgggccagccgggccgcgctggatgccgcccgtgccgactacgccgcgcaggagcagaagctggcggactgccgcgagaaccccatgctgcagcagctctaccgcgaggaagaagcccgggaagccgcatgggagactgcccgcaaggccgtggagcaggtgggcggcgatatccgcgtctgcgaaaagcagatcgcatcctgcgaggcagagcagggtaaggcggtggagaccgctgcacagagcagggcggcggcagaggcattctttgcacagcacccgctgctggagcctctggcacaggagcgcaaaaagggcctgatgacgggcgggcgtacggcccgtgccgccgcacagactgccgaaaaggcacagaccaggctggacgatgccctgcgagcgtatctcacttccacgctggaacccgcccagagggattacaacgagcactacgtctgcgattatccgctgggtctggccggggtggagcagtaccgcgcccagcacgacagccttgtccgcattgatctggaacgctacgccgcccggctggagcaggcacagcgggactgcaaggatcgcttccgcaaggatatcctcttccggatgaaggatgatatcttcaacgcccgccgccagttccgggagctgaacaaggtgatggagcagctgacctacggcgaggaagtctaccgctttgagctggagcccagccgtgacccccagctggccgccttctatcaggtcattgtggacaagggcaaccagcagatgaccgatggcgactcgctggacaaccttgccgccaccgctgaccccgtctacgagcggcaggtggacgcgctgatggaaaagatcatggccgatgtggacgagaacacccgggcccggcaggagggccgcaccacctccggtgccaccctctcggattatgtggactaccgcacctatctggactatgacatcaaggtgaccaacaccgtctcgggccagcaggcctatctttcccgcgtcagccgcgattcctccggcggcgagaatcaggctcccttctatgtggccatctgcgccagcctgctgcagatctaccagaagagcgagaacagcatccgccttgtcctactggacgaggccttcagcaagatgaccagtgaccgcatccgccccatgatggagctgttccgccgcctgcagctgcaggtgctgctcatctccaccgtggaaaagagcacggccatccagccctactgcgacattacctattccatcgtgcgccacggcgatgccaacgccattgcgccgttctaccgggccggcatccgtgccgatgctccggaaaaggagactgaatatgaataa

SEQ ID NO: 42254 - DNA, 1401 bp, Faecalibacterium prausnitzii A2-165
atgaagttttttgaagcggttccaagcgaacttttctcgccgctggcttcgcccaaccgtattttatatgcggatgcactggacgtactgtacgcagcataccaagaaaacctgaaaatacgggaagatgtcttgtattccatgctgcgcggcaggctggagcaggaactggcggatgctacgtttgaagatgaagacattgacgaagaggaactgagggatatctctggccgcgctcgttttttgatccgcaagctgtgtagtaaggggtggtttgagaaagaacgcggggacgactttgaagagtatatcacgattcctaattacagcagccgtttgctggaattattccaccaactctgcgatgatagcccggctcgtggatattcctatgtgttcggaactttctcagtcttaaagaccgccgacgacagcaacaatgcttacgataaaatgacggctctctatagtgcctacgataacacaacggcgctgattagcttgttgcaaatggtctatcataatgtgaagcattattttcagacgcagatcgatatgcaggatgtcaaccaggtgctggctgcacactttaacgacttcggacaaaaggttgtggaggcatatatccgtccgctgaaaatcaaagattcagtgccgaagtatcgtgtgcccattcagtctgtgcttaggcgctgggaagaggatgataccttgctgatggcgatggcaaatgaagcattgcgtgataagcggggcaagacattggaagactgccgtgccgatctgctgaggaaaattttctggatcgaagaacgctatgacaatttagagaaggactatcttgaggaaattgatacgcaggtccggcgctataccagggcagcaacacagaaaatcgagaacctgacgaaccgagatcaaagcgtgcgcggcaatttgaatgttttgctgacgacactgtccagaaaccgcagggcggctgagctggtggaccagatacaaccggcatttcaattgtatgagcagtcttttttgtcagaaaaaagtctgtggtaccgtaagcgccccgaaaaacggacaaaaaccgcgtcggtgctgatacaagatgatcaggcaccgaatacggaagaacaggtcagagcggcacagttactgcaatcgaaatatggccgggcagcagtaaatgcttacgtgcagggatggctgggagacgctgacattcgttgctcggaggagctctcgcttgaagaggacaaggattatatcatgagtttgctggcaatccttggaagcaaggatgcatctgccggttatgtggtccaggaactcgatggcattttttgtaaaaatggctattcgatcccgcaaatgcagatccggaggaaggagaagaagccgtga

SEQ ID NO: 42255 - DNA, 648 bp, Faecalibacterium prausnitzii A2-165
gtgaattttgattttgttaccaatgcaacggcaaaagaactggaacaattcaaatcagtctgcaatcagctgctcagccgcacatacattgtgcgaaccatctaccagccgggaaaaggcagggtggataacccagactatctttttctatcacggcactatgaggctgtacaggagtacctgagtctgctggactgggatttgcgcagggatgaactgaacggatacttttatgtgttgaacacagacgaggctaaccgttgcaacctcaataaaaaagaaacggcgattttgctggcattacggctgatctacgaagaaaatatggaacgtttgggtttggagcaggatgccgtgtgtactgtgcgggatgtgctggaaaaagtggtgaccgactatccagtttttccggctaagccgaatatggaagaggtcaaacgcgcgtttacggtactggaaaaccattctgtgattcaaagactggaaggaaaattcaaccagggcagctgcaggatcgcaatactgcccaccattctctctgcggtctccagcgaaaagctgaacttggtggtgtctgttttgaaaaaggaggaaacagatgaagaagctgaagaaaatcctgctgatcaactggctctatttcagtaa

SEQ ID NO: 42256 - DNA, 3384 bp, Faecalibacterium prausnitzii A2-165
atgaagaagctgaagaaaatcctgctgatcaactggctctatttcagtaaagaactgattgaagtgggcgacatcaatttcctgaccggcaagaacggcgccggaaagtcaacggtcatcgatgcactgcagatcgtgctgctgggcgagacaaattcccgcaattttaatcaggcagccaacgaaaaatcgcagcgcacattggaaggctatctgcgcgccgacatggatgataacagcccgtattcccgccgtggtaaggacttttctacctacattgtctgcgaatttcaggatgagatggagggcagcagttttgtgacaggcgttacctttgactgccgcagcgatggaagttaccgtgatacattctttatttacacggggacactgccggaaaattgctttattgaacagggcgaggcaatggagatttctgcacttcgccgttttttgaagcagaactatgcacggacagaattttacgatacccaaaaagagtatcgccgcaacatgcttgcaaagtggaacgtccacaacgagcaggtcttacggatgatgaagaaggctgtttcgttccggccaattgtggatatccaaaaatttattacggagaacatctgcgatattccggataagcccaatattgagctgatgcagcaaaacatccgggattataaacggcacgaattgctggcgcagcgtcagcaggaaaagctggatgcgctgcagcaaatcagcaggctgtatcaggagatgaaccaagccatagaccgctgccagatccagaagtttctggtacggtgggcagaaaaagaagctgcgcagacagagatcgaccagagggaattggaacgaactgaatgcaaggagaaccttgcaaatgtgaatgagcaacgggaggagcttgagcggcagatcgaacagaaagaaacgcgccgcagtgagcttgagctggcctgcaggcagagcaacgttttccaggaggaagagcgtctgctcaacatggaaaaggctctgagagatgagcagaaaaagctggaacagggtctgcaaaatcttgaagtggagattaagcgggaagcacggcgtttgcagagattctgtggggagatacaagaactggaaccggaagaacttctcataccggtgcaggaagcggcgaacactgcgcagaaagcatatgctgtatttactggtgacgagaagggattgtttgcccggcctgtggagttgtttgaaatggggcaacaggcagcggccgaattgtcggatgctgtccgcagtgcggctcataaaacagaggatcgtattgcagagctgaagaagcaagccgaccagaaaagtgcggtgcttgcaaatctgcgcaggaacatcaaagattatccccatgggcttctgctgttcaaagaccggctggaaaaggatctggcagataaaacggggcatgcggttcccgtttatattctggctgatgtgctggaaatggcagatgagcgctggcgtggagcggtagaaggctacctaaataaccagaaatattatctgctggtggagccgggacgttatcaggatgcactcaacatttacgaccggctgaagcaggaagcagagtaccgtgcgtttggtctggtagatatcggaaaactgcgggaaaaagaaacacttcgaccgttgcccggtagtctggcagaaaaggtggagacagaaaacaagctggcacgcagctatgtggactatcttctgggtcgggtgatatgctgcgacacggcagaacagttgcgctgctataagacggcaattacggaagaaggaatgctgtatcagggctatgtggcccgcgcacttcggaagggctggatggaagacgccttcatcgggcggcgtgcggtgcagctccgcatcgaccatctggaaaaggaactggcctgtctgcaggaagagctgcggcattggcagccgctccagaagcagctgaccggcctgcaggagccgctttttacccaaagattcgtccgaatcgatgtggcgcaaaagcaggaggactaccagcgcgtccagatgatcatcaaggaaatcgcagaagtcaaaaatcagctttcccagctgaatctgttctggttggatgagcagcggcgcatcattgaacagttgaaagaagagatccttgcattcaataaggaaaaagatgcgaaaaatgtgcaaaaagggaagttggaaggccgcatccatcagctggaatatgagatcttgccggaaaaataccaacagtatgaggccatcgaagatgttttgaacgaggggttcacgaaggaataccgagaaaccatcggcgttccccgctatcggcaggagcttgtccgcttgaaaaaggcagatgtcatccgcaagaacttcggcgacagtttggcgcagagcacaaaggcgatggacggggctcagaagaaactgtttgcagcacgcagagaatatgcagaacggttcaaaccctgtgcattccagatcgaggtgatggataacacagaatacgaggaagaacggcgtactctgcaggaaagcgagctgccccgatacaaagaaaagatccgggcggcacgggaaagcgcaatggagcaattccagaacgatttccttgccaaactgaaatccagcatcgaccaggtgcaagaccaggtgcacaatctgaacaaggccctgcgccaggcacaatttggcacagacaagtaccaattccgcgtagggccaaacccggattatctggattactataacatgatcacggcagatgaactgatggaaggcgaatccggtctattcgcactgccctttcagcaaaaatacggcccattgatcgaaaaactgttcagccagatcacaatggcagacgatacgcagctcaatgcccgcaaacagagcgaactgcaggagaatatcgtccgctatacagacttccggacgtatctgaagtttgatttggaaacgaccgatcagaacggttccaagcagctgctttctcaaacactgaatatgaagtccggtggcgaaacacaaacgccattctatattgcggtgctggcctcgtttgcccagctgtaccgcgtcaacgacgctacccgttttggtaatacggtgcgtctggtggtgttcgatgaagctttcaataaaatggatagtgaccggatcacggagagtgtactccttctccgaaagatggggctgcaggcgatcatctgtacgccgccggataaggtctcggacattatgcccattgcagaccgtacgttattagtggacaaatccggataccggatgcatatcattccatttggaaaggagatgcagaatgaaggaagcacaggtgatcctgaatcgtctgctggataa

SEQ ID NO: 42257 - DNA, 1239 bp, Faecalibacterium prausnitzii A2-165
atgaaggaagcacaggtgatcctgaatcgtctgctggataagtttgaaaatagtaagcatctttctgaacccaacacatccagacgtcgggtaatgctgcgcattgataaaagggagttgccggagtatcaatacgaagatgcggtggttcgggacgcttacaatattgcagcgcgggagctggagcagcaggctttggtgcgtctggaatgggcgagaaagcagagcgttctctcctgcattgtgctggatctggaacgggtcgcacagtgctatgaatgcgccgacagagtgcatccgcaaaaaaaggcagaagaggttgcaaacatcatcatgcagaagctggcagacaatcccgttccatggatcgcggcatggagtgatgctgtatgtgctcaggtgcggaacagcatgaaagtgccgacgtattgcagagaaaacgacggtctgctgcaggagcttttgctcacgtttcaacggtatgcggagctgtccggcagtgtgacgatgcgtgcattcagcagccagtgttttcacgataccaagtattttgagcgaaatgtacgggagctgtttcttaccattgcacgaaaatacaatacccaactggcggcggcctgtacagaagcgaaacttggtgagcgggatcaacttgcatttctgggaatctatgcccgcccggagctttacgaactctcgggcgattgcgcgatctgcttgaagaaaggagaactacggctcagcgtagcagaaccttatggattggctttgcccagtacacttgtgtcagagattgtggacattgaactgaaaaacatctgctgcattacctttatcgaaaataaaacgaacgatgatgaatatttgctggcagaaaaacagccgcaagaacttgttgtttatcacggcggctttctgagcccgcggaagaaaaaactttttgaaaaactggctgctgcggcaggggaaaccatgcaaattcgattctgggcagatattgatctgggcggtttttgtatgtttgaaaacctgcaaacggtgttcccacagcttgaacccatgcgtatggaagggcgctttgtggaacagtaccacaaaaatggcctgaagcggccggagcagtatctgaagaagctgaaggaagagcggaatgcgggaagacatacgctgtttgttgatgcaattgataagattttgcaatatggggtcacaatcgaacaagaaacatttctggagtag

SEQ ID NO: 42258 - DNA, 1497 bp, Klebsiella sp. 1_1_55
atggaagaaaacactaggcagcgtacggaaaattatatttcagccaaaaaccagcatcccgcatggatacttctggcttcccgccgtgccccgttggtgctgagttgcttgaaaacgttgtttgaaaaagctcatgatggtatcccccttgaggacgcgattcagtctctttccggcattctcatcgagcatgtgagtcaggaacagtatgacattaatcaggacaatccctctcttcaggccagtcgtgaactgcgggaatggattaaacgccgcttaattgtcgaacgggatggccgtatcttcgccaccgatgcgcttgaggttgcgattacgtttgttgagtcgctggataatcgtttcatgacctctacggcttcccgtttgtctaccgtacagcgagaaattgaaaacctggaaaccaggcttaatcctaatccggctaaccgggttgcaaccttacgtcgtcgtattgctgaactggagcgtgaattacaggaggcggaagccgggcatattgaagtgctggaaacgcatcaggcggttgaacatattcgagaggtcttcaatttagcttccagcctgcgggctgactttcgtcgcgttgaagactcctggcgtgaggccgaccgtgcgcttcgccaatccattattggtgagcagtatcatcgcggcgatatcgtagaacgcttgcttaacgatcaggacgcactgcttaatacccctgaaggaagagtcttcgacagttttcagcaacagctacgccaatcagttgagttaacggcaatgagcgagcgactgcgcgtaatccttagccatccttctgcttccaatgcgcttaaccgtctacagcgtcatgatttacgctggctggttaaacgcctggtcgatgaatcgcaaaccgtactccaggctcgtgcccgaagcgagcgagatgtccgcggttttatgaaaaccgggcttgctgctgaacatcaccgcgttggtcatctgcttaacgagtttctgaatctggcgttaaaactcgactggcagcgccagatgattcgtaaacaagaggttccgcttcctgccgttggtgtggcggtgacgggagtccccgcaattgagcgtttacgttttaaagaagtggatgatgaagcggaacaaacgttggatctcagtaatcatgcgacggatttgacgcagattggcgatgatttctgggatgctttcaatggccttgatcgtgaggcgttgattcagcagacgttgcagcttctggcaaaagaaaatcgccccgttggtctggctgaactggcggcgctgttgcccccggctcacgatctcgaaaccttcgccgtctggattggcatggcgagagaagcaggcattgaggttattgattcacagcgcgaatttgctgaacttagtgatggggaaggtcgccgctggcgatttaatctgcccacgaccggtctggaaagtcaggcattaatggatatcgattgggagtaa

SEQ ID NO: 42259 - DNA, 750 bp, Klebsiella sp. 1_1_55
atggcgggcttttttgacaaactgattaaccggagcgtcgctgcaaatgcaggtagtgaaccagaaacatcggacgaagaaattactgatgagttggttgaagacagtgcggccagtggcgaaacgcggaccctgaagaaaatacgcgaagcgattcaggaattgctcaaatacggcctgctggaagaggccagtaaacccaatctgtaccgtgtcgtactgacccatcctgaagaggttactcgcattctggaacctcttgatctggatatcggcattgatgagatccgcggcctgctgtatgtcaaagtcagacttgacgaaacgccagagcaggatgaatggtcccatcctctggtgaggcggcaacggcttaatctggaacaatcattattagttgccatactgcgccagcattttgttgcctgggagcaagaaagtggaactggtgccagccaggcacagatcgctatcgacgatctcctccctcagctccagatttaccttggcgatccgggcagcgaatcaaaagaacgcacccggttgctcaccttggtggatcaattaaaggggcatgggctggtcacgtcgccggatgcgcatgagcggatcgtgattcggccaattattgctcatcttgccgacccgatgaatcttcaggcattactggcatggctgtgggaacaaattacgcaacaaacttccccggatgattcgtcagcaaaggagagtagtgaggaggacgtatga

SEQ ID NO: 42260 - DNA, 3291 bp, Klebsiella sp. 1_1_55
atgaatcaaatagcgcgtctggctgaaaaggaatcctttattctcacccgtatcgagttgttcaactggggcggttttcatggattgcatcaggcagcaatccatcaggaaggtaccgccgttattggtccaaccggaagcggaaaaacgacgctggtcgatgccttaatgacgctactctgtgccaatccccgttacaacctggcctcaaccggggggcatgaaagcgacagagatcttatctcctacgtgcgcggtgtatccggacccggcgatggtggggaggggcaatcgcatattgccagaccggggaaaaccgtgaccggcattgccgcgacgctggagcgtgaagggcagcaggtacgtctgggggcgctattgtggtttgattccaccagttccagcgcggcagatttgaaaaagctttggatgtttagtgataaccctacacagacgctggatcactggctgaatatctggcatgacggtggcgcacggtcgttgaagcaaatggaaaaagagacgaccggaatctggatttggctgaacaataaaaaacagtatctggcgcgcctgcgggacttcttcgaagtgggggaaaacgcctttacgctgttaaatcgggcggcaggattaaaacaactcaacagtatcgatgagattttccgcgagctggtactggacgatcactctgcttttgatcgcgcgacggaagtagccaatagttttgatggtttgacagaaatccatcaggaactggaaacggcgcgtaaacagcagcagtcattgcaacctgtagccctgagttgggataagtatcagaagcaagagcaacaacttgctgacaggaaggcgctggagtcgctgttaccaatctggtttgcacaacaggcaagccagctctggcgagaaaaggtcagccatattgaagtcgagcttggtgagtcacagactcgcgaagaacagatccagtcgcagctcgagttgcagaaaaaagtggtgacggactgcttacagcgctatctccaagtcggcggcgccaatattgatgaactgaacgagcgtatcaaggactggcaaaaaacgctcggcagtcgggagattctggcgcaccagtatcaacagctgacccgcaatcttggattgccgcctgacctgagccaaccacagctggaggcgaatcagcatgaagccgaggcccgatgtgagcagtttgctgatgatataaagttgaaacaggaagatgtgtatcaaaaaggcgtgctcagccatcgcatgaccgaagaacttcgggaacgggaaactgaacgcgccgagatcgcgcgtcgtccggattctaaccttcccgcccattatcaggcatttcgcagcgagctggcagaagcgctgaacgtcgatgagtctgaactgcctttcgttgctgaactgatacaggttaaaccggaagaggcgcaatggcgcggtgcgattgagcgcgctgtcgggagtaacaggctacgtattctggttgctcctgaatctgcacaggaagcgcttcgctgggtaaaccagcgcaataatcgtctgcacgtgcgcctactggaggtcaaattaccgcactctcccgccaggttttttgatgatggttttacccgtaagctgttgtggaaagatcatccgtggcgagaggccgtcaaagcattattggccgaaaacgacaggcattgtgttgacagccctgaacaactgcgtgacacacctcatgctatgacagtgcaggggttaatgtctggtaaacagcgtttctatgacaaacacgatcagaaacgtcttgatgaagactggctaacgggattcgataaccgcgatcgcctgaacttccttgccaaagaaatcgccgcccttcaggagcaggttaaaaccgcaaacgcagcgtttgagtttgcgaaaggcgaggtgggggttttgcaaaatcaggccatttcattccagaaaatacaacaaattgattacgatagcatcgatgttcccggcgcaaagagccaactggacgcgctcagggagcggctggagaatctgatccgcccggattctgacgccagtgtagcgaaagcaaaacttgatgaggctcaaacggttgaatctgaactcgataagcagctcagagccgccaataaagtcactaatgggctggatacagaactcacctcagcccgggcagcagaacgtaaggcccagcaaactgcgcaaaaaggtatgcaggatgaagagcgagagttgtgcgcgtcacattttcctgtggtggctctggttcaactgcctgacattcgcgatctggaacgtcaacatgagcggggaattcaacaagaaattgagggtattaaaggtgaattgcatcgactgaacattgagttgaccaaacgtatgtctgaagccaaacgtgtggatactggggagctcgttgaggcaggggctgatttggacgatattcctgtctatttacagcgtttgcaggaactgaccgaagaagccctgccggaaaagctcaaccgctttcttgactatttgaaccgttcatctgacgatggcgtaacgcaactgctcagccatatcgatcatgaggtgctggtgattgaagcgcgactcagcgaactcaatgaaaccatgtttagggtcgattttcagccggatcgctacctgcgtctggataccaaaaaagttgtccatgaaagcctgcgcacgcttgaaaaagcgcagcgtcagctaaatgcagctcggtttgttgatgataacggcgagagccattataaggcgttgcaggtgctggtggcgcaattgcgggatgcctgtgaacgaaaccgtaccctgggggcgaaagcgctgctggatccccgttttcgtctggagttcgccgtgtcggtgatggatcgccagagtggtaatgtgattgagtcgcgtactggctcgcagggcggtagcggtggagaaaaagagattatcgcgtcttacgtattgaccgcatcacttagctatgcgctttgtcctgcggggagtcgttatccgcttttcggcactattgtccttgatgaagcattctcccgcagctctcatgccgtggcgggcagaatcatcgccgcgctcagagaatttggcttacatgcagtatttatcacccccaataaggaaatgcgcctgttgcgtgaccatacccggtcggcgattgtcgtccaccggcgcggtcaggattcaaatatggcttcgctgagctgggaagaacttgaacaacactcccgacgacgggagaacgcgtaa

SEQ ID NO: 42261 - DNA, 1149 bp, Klebsiella sp. 1_1_55
atgtattctcctgatgaactgcgtgaaaagcttgcccggcagtgggataacgcaaagctccgggccgagcgtttacttccacccggtaactggccgctctgtctgaccattggcaaaccttccgcgaaaatattcgcagagcagcctcagcgtgttttacaacacgtgcagttatggcggcaagtcgcggttgggcgggtggaatgggaagaggtcagttatcgggcgagcgacggaccggtatcaatgccattgcgctggatcatgaatggcccttctgactggatcaacgcagcggcagatgcgacggtaagccgggaatttcgcttgctggagggaattattgagcaggttgatcccattttccatccgctgttgattagtcatcgttcgctctggcgaaacaaaggctcgcaggacatcatcagcgctgccaggctggccagccgattagagccgggctgcgcaaaagggctgccgctaagactgctttccgggcaaggggtggataccaaatttattgagaataatatttcgttattaacccgactgttggatatgcgtttttccggcgaagccagcgagcaggggttaaccacctttcttgatgcttttgatgagtccagccactgggttttggttgtgccgctatcacccggcttgcttccttttaaaaaatgccgggtgacaacagcggaactggcggaaacgacattgcccgcgtcgcgtgtgctgatgattgaaaatgaacagtgtctgcatcaacttccagagttatctgacactatcgcggttttagggtgtggccttgacgtgcaatggttatccagcgttgttctggataaaaaacgcgttgcctattggggggacatggatagctgggggctactgatgctggcgagagccaggcgctgtcgtccgacgcttgatgttctgctcatgaatcgtgagttgtttgagcaatatgccagccaaagcgccgttcctgaaccggtaaaagcacaggaagccatacccgatggtttgcttaatgaagaaggcgatttttatcgctacttaacctgcttaccgcgtggtcgtctggagcaagagtttttgcctgcgggggtagttggagaggaactggttaggtggagaaaagagagttaa

SEQ ID NO: 42262 - DNA, 1521 bp, Bifidobacterium bifidum S17
gtgggtgatatccgacgggagatggaacggctgaggccggtctatgaaaccggcgtgctgagactgctgctccgtcagaattcgatgatgtacgtggcgctgctccgcgcggccttcgacccgttgaccggcgagctgccccgtgagaccctggaggaaagcttctcgcaaagcctgtcccggctcgtcgactccggcgaataccagctcagggaggatcagaccatcgcggacgcctcccggcgcatcctcgccgacctgacccgtgagggcgatgacgattacgcatggctcgccaactcgcatgacgccgcgtcgcaccggttcctgtaccgtctcaccgcccgcgcccatcgtgcgatcgaggcgctgtcgcggcttgaggatgactcccgcacgctgtcgggcgcgcaggcgaactcgatcatcatggagatcgagcatgcgcgcatgcagcttaccgccgaccccggcgagcgcgtggcgttgctcaaccgggagatcaaggcgcgcaaacacgagatacgtcagatacgccacggtcagcggcaggcggcgctcaccgaatcgcaggtcgaggacgtgatcgcagtgattcacaacacgctgcgcggcgtgcccatagacctgcgtgaactcgtgctgaccgaacgggacaacggtgacgcgctccgccgccgcatgcaggcgggcgacatgagcgtcgacgacatcctgacctcgtaccacgacgaataccgcaggtccttcagcgagtccgacagcggaagacgcttcgaggacgcgttccaggtgatcatcaccgacgaaggacggcagcagatcgacgcggccctgcgcgacatcgcccacacgccgtatctggccggcgagtccggtgccctgctcgatcaggtgcgtgccgagctttcgcgcatctatgacggcatcgaggcggtgcgccgccagatgcgcgtatccgacgaggcgatcagccgtctggtgcgacagcagaccgatacccgataccgcacgatgctcggcaagctcaaccgtctgtatgcccacgtcaacgccgacgcgaaggcgcatcagggcgacgatgcgagaccgtaccggaccgataccgcggccggcaggttccctccgctgccgtcgcgccccgcgcgcccgatggtacgaacgaccaccccgggattgtccgtaccgcagacaccgggcgatgcgaccgcgcccgacctgcgttcgatgatcgacaacgggggaccgcggctgcggcgcatggccgcgctcatcctcgaatcgcccgtctacgcggacgacgggaacggcgccatcgacatcgtcgccagcttcaacgggctgccgaaagccgagcggaaggaaagcgagctcgtcggtttcctgggagagctcggctgcggggacggagccggcgtcgcatggcattgcatatcggcagacggaagcccgagggactggatcaccggcccagtgctcgcacaagaggatgaattgcacgacatcgtgaaggaggactga

SEQ ID NO: 42263 - DNA, 1038 bp, Bifidobacterium bifidum S17
atgagcgacctgacgaacgacgccgcccagccggacgcggacatggacatgattggcgacgacatgaccggcaccggcagtgccgataccgacagtgccgataccgacagtgccagtaccggcgcggatgacatgggtgcggcggacgtcgaatacgatggcgcggacgcggaaggcgcggtcaacccatacgccctgttcgagggcgacacgggcgacatgaccgccgacgcgcgcatggtggcgatcatgctcaaacgcgagcgctacatcagcggacgtttctatgacctggcgctcgacaaccgcgcggcggtcatccgttcgctcaacaacgacctgctcgatctggtcgtcaacgagcactaccgcgtcatgtacgccaccgcggtgagcgggccggacatgacgctgcgcgcgctcaagacccgtgcgagcctcaaacgtgaggaggcggcgctgctggcgttcctgcgcatccgcgtgctcgaatacgagaacgcccacgtcgcgccggacgaatggctggtcagcttcgaggagatccgagcggcgctcgccaccggcgccgggtacctcgcctcgcgcaacgacgaggagggcgtgctcaggcaggtgggcgcgatcgtgtccgtcatgtgcacgtacggctatctcaggcagctcgacgatgacgagacgatgtaccgcatcacgccgctggtgccggtggtgctggaccgtcagctggcggacagctggctcgcagtcgcggaccgggacgacgatggcgagccggccggtgacatggccccggccggctcgcggtctgcagccggcgatacgtcgaacgccgatgcgagcggcgccgatgacgatggcgattcggacgacgcgggacccgacgccgaactgttcgaggctccgctgttcgatgacgacgccgatgcggacgccgccgaggacatcaggggcgccgatgatgccaatggcgcgaacgacagcgacattgacgacgagaccgcctcggacggcggcactgcacgggaaggggagtga

SEQ ID NO: 42264 - DNA, 3585 bp, Bifidobacterium bifidum S17
atgagcggcaaggacatgcagatgatcgccgaccgatggatgatggaaagcaggaggctcgtcaactggggatcctatgagggctaccatgagttccgtccctccacggactcgcaactgccggtgacgttgctcgccggcgcgagcgaatccggcaagtcgacgctggtcgacgcgcagatatcgctgctctacccgaccggcacgcccttcaacaaggcgtcgaattcggggcgttcggaacgaagcgactacacctacctgcgcggcatgatcggcgtgggaggctccgacggcgtcgacgaaccgatgtacctgcgcggccgggacgagtccggcgcgccccggtccatatggggcgcgatcgtcgacacctaccgcaacttcaccactggtcagatactgtcctgcggcaagttcctctatctgatgcccggcgacgggcgcggcgacgtccgacggctgtacctggcatgggacaagccgatcgacccgcgccgcatggacgtgttccgcgagtcgtcgttcacgcccacgcagctgaaatccacgtatccggggtgcgtcaccttcccgaacgccgaggcgttccacacccacatttgggatgtcatgggcctgagcgcggaggcatgccgtctgctggcccgcatccagtcggccgacgccccctcccgccttgacgacatcttcaaacagggtgtgctgggcgtgcccgaggcgctggacctggcccgtgcgaccgtggaggattacgagcgttacgacgcgaacttccgaagcatggaggaaaagaccagacgcatgggcaagttgcgtgccatcaccgccagctatggcgactacgagtcggcccgtgacgcggtccactcgttcgacgcggtgaacccggccacgaagtccggctcggcgacgatccgagcatgggcgatccgccgcatgatcggcgaggtcagcgaacggcagccgctcgacaggcgtctgcgtgacgagcgacgcagtgaggcgcgggctgccggcaagcgcatcgaaagcctgcgcacccgcatcgacgcggtgcgcgagcgcatgcgaggcctcgacggcggcgacctgacacggctcgacgcggaaatgcggcaggcggaacgcgcgctggcggacatcaccgccggcagacagcgcatcgggcgcatgttcgaggcggccggcgaggagttccccaaagacgagcacgcgtgggacgagcggcgcatcgaggccgtgacgttcatgcgctcatatgagcagcgcaagggactgctggacgacatgcgcaaccagacgtacgccgcgcacgcgtccgtcaagcagacgctgcagcggctgaacgacgattacgaacgccagaaatcgcagcgcacccgcatctcccgccagatggacgagacccgcgccatgctgtgccgggccaccgggctgggcccgagcgaactgccgtacgtcgcggagctcatggacgtgcgcgaggatcaggagcattggcgcctcgccatgaacgccgcatacggatccatggcccagaccatcctcgtcgacaagcgccatgagcgtggattcgcagccaaggtcagcgccatcgacccgcacgccatggcgcggcgcacctggcagttcgtcgacaccgaacgcgggggagccgggaacgggcccggcggcgcgaacacgggtgcgaccggcgggacggacggagaggtgtggctgtcctcgaagctgcgctaccgcgaggattccccgttcgccggctggctgcgcgagcagaccagctccgagcgtctcgacgccctgtgcgtcgacggcatcgacgactccgaccatgccgtgcggcaggtgcaggccgacgggcagatcaaatccggcaaacgcggccagcatggcatcaaggaccgtcagcaggtcatcggattcgtcaacgaaagctatttggcgcaactgcgcacgcgcatccaggacgcgcaacgccaatgcgacgagaccgcgcaatcgtacgcgagcgcgaaggaacaggccgaccgcctgcagcgagagcgcgaactcgccgaccagctcgcatacaccgcatgggagaagatcgacgagaacagcgcgaaggcggcgatcgccgacatcgaacgcaccatcgcctcggtcaggaacaatcccaagctcgccgaactcgacacgttgcaggagtcgctgtccaaggagctcgaccgctcgcagcgccagcgcatcgacatcgaacggcaggccgagctcgccgatcaggcggtgaacgcagcgcaggcatggctcgacgagcatgccgcgcagccgcagccgcagacgcggccgctcgatggggaagcggcggacgtttcgccaaaagccgtcacgaacggacggactctcctgacggacgaggtggaggaggcgctcgccgaatcatatgagcagcgtctctccggtctgggggatgcgacgacccgcgcccacatgatcatcggcgcgggggcgccgcagcgtatggctcagggggataccttcgccgaccgtgtcatcgccggcatcggcaaggacctggaggcgcgcgtctccatgctcgaaggtcgtgcggcgtcggcccgcaccgccgtcgaggcgcggatgggcgcctatatcgagatgtatgcgggcggtgacgatacgatcgccgccagcgtggacgactaccggtattaccaggacgagttggaaagcctttcgaagctcgccaccgtcgaagccaccgccgtcgaataccacaactgcctcgacaagctgctgatgagcttcctgaccatcaaacgcgcgatagacaccgacgccggagatatccacgaccagctggaacgcatcaacgcgatgctggacggccagcagttcggaccgcgccacggcagcctgtccctgcacgcggacgtgcggcgccccgagcgcgcgttctggtcggccctgacccgcgtgatcggcaccctcaacgaccgcaaggcggcacagacggacgacgatcttgacggggcccggtgcgcgttcgcgtcctgcgccgcgatgatcgacatgctgcgccgcgagatcgggcagatcagggacgtcaacggcgtgaaaagctacggcgcccgcaacctcgacccgcggtgccgatcctcgttctacgcgctcgtgcgccactcggacgggcaggtcgaacgcatcacctcgaccggcggacggtccggcggcgccctgcaggagctgacctcgttcgtgtacggcgcggcgctgatctacctgctcggcggcggaatggacaacaagctcaagccttcctacacgacgctcttccttgacgaggcgctcatcaaggccgacggccggtatacgcggcgcgcgctgtccgtactgccgagactgggtttccaggtcatcgtctccgcccctgaaagcaagacgggtgagatactggaggtctccaccaaggcatacgtgacccgcaaggaccccgacaccggctacaccacgctgcacgaagccagactggacggcatcgatgagacggaaggcgcagatgagccggaaggtaccgtcgagtcggatgacgccgccgaatag

SEQ ID NO: 42265 - DNA, 1425 bp, Erysipelotrichaceae bacterium 3_1_53
atgtccttatttgaaaaaatggatccctccttctttaccatactggtatcgaagaaccgggatatttatgttgatctgcttctgcagattcatacgtgtatttaccgtaatcagaccatgagcatggagcgcgccctgcttcaggatttactggaggattatgtacaggatcgaaaatatgaaatcgacttccgtgaggaagcagaatacagtgatatagaaaaagagcttcgtcaggaaaaggatgtgtacggacgcgatatacagtttctattgcggctgtttgaaaagcatacgtggattcatattgatctgcatatggatactatgaaaaaaatggtatccctgccatatcatagccgggtgtttatttcctttgtgaatgatattatcaaggaacgagaacagattggttatctgattcgtattcatgcttccctaaaggatatggaagaccctgtgaaaatagaggatagctaccagcatatccgtaatgcctatgcggatttcaaggagctgattctgacactggaacagacgaatgcaagaatacgggactattatgcaatccaggtgaaaaaggcatccaccagaatttatcatgatttttttgatatatattatggggatattgtagagggttatgtgtttcccacacttgtcgaggatagcctgaagcgtttcaagaatcctgtcgcaaccatattggaagccctactgcaggaagaagctctgaaagagaaaatcgttgacagtgctgttagtcattaccgtgtatctagtcgggatacagccagaaagcatattgaggatatgctgtatgccatgtataacgatctctacattgtggaaaccctgacaacacagctggtagacagtgatgcaggctatcgtcgtctcgcaaaacagaaaatcatgtacctgtgcaatagtgatcagggattaaagggaaagcttgtggagctgctgcatcatatgaaagaagaaccgcagaaaatgtgtgatctcgttagtgaaacgatcaatgtccagcagacgcgttatatggaacgtgatgaggtgtatacctttcatcggcgcacgcgcagggatgagcgcgaggttatgacctttgcctttgaggaggggacgcagaatcaggaggagcttgaaaaacgcattggctttgaccgctattcccgttttaccagagaaagcatctctgcctattatgcggaaaagctgaagggagaagcttacggtaagctgaaggatatcggtgtcagagatatggatgactatatccgctccattctggtctatgtgtatggacgtgatcggaagatggatgtacatgcgacgctgctgcccaatcatgaggagggcattacagaggggaattttcaatatcccaatctgttgattaaaaggaaggaaacaaaatga

SEQ ID NO: 42266 - DNA, 669 bp, Erysipelotrichaceae bacterium 3_1_53
atgaaagtagaacaactggatttgaaggatcgggaggaatttgcccggatcgtgaatatacttctcgcagaaaattgtatctatcagtatgcgaaaatcaagcagtttgaaaagaaggaacgaaatgcagattatgtatttatcaatgatcactgggactgctttgaagaatatctgcgttttgcgggatggctgctatataaggaacgatcttcctatatgggaatgatttatcttgtcaatgaacgtgaggactgcgcttgccgttaccgtctgacaaagctggaaacacagctgctgctcatacttcgcaattattatgaagagaaaatgctggagctggatgcatcattgacgattcgtatttcagtcaatgagctgttgcggcttttggtggatgtatttgccatggtaaatgccagaccgcctatgcagcaggtgcatgcggcattgcaatctttgcagaaactgaatattattcagaaatatgcacagggagaggaagacctgatctgggtgttaccttatatcacctgtgttctgacaccaaagcgggtggaggaaatactgatgaagatacgaaatgaggaaggagaggaagacgatgaagctgaagcggatgctgctgatcaactggctgtattacgagaaaacgattctgagctttga

SEQ ID NO: 42267 - DNA, 3288 bp, Erysipelotrichaceae bacterium 3_1_53
atgaggaaggagaggaagacgatgaagctgaagcggatgctgctgatcaactggctgtattacgagaaaacgattctgagctttgaggatatcgtctttctgagcgggaaaaccggagaggggaagtctgccttaattgacgccatgcagctggtaatactggggcgtacggataattccattttcaataagtcagcaaatgataaaaccaccagggatctgatggggtatttaaaagggaaatataaggatggtacctttaaacgcgataaaggaatgttcagctcgcatttgtgtatggaatttgaggatgaaaagcagaatgtatattgctttggtatcgtgtttgatgttagcgggccaacgagaggagagctggagcaccgctattacatgatgaatcagccgatacccgagcattgctttatggatgggggaaccgtattcgatattcggcgtatgagaaagctgctggacagctttcaggatcgcagctgccgtatgtttacgacacatctggattataaaaactatttccgtcagcggatgctgattaaagatcagcgtttctttgatgtattcaagatggcagtagcttatactccaatgatgaatatctcggaatttattgtaaagaatgtctgtcaggaggaggaagacctgaatctggaggaaatgcaggaggaaattaaggattaccggcagatgaaggaacaactggaaaccgttcggcaaaaaaaggaacagctttccctgattcatgagcagtatacggatatttgcagggaacaggagcgtttggatacgctgcgtgtcgagcaggaggcggcgaaatatcacggtatggttttggagcataaggaagcagctgcacagtatgaagcctataccaggggatatcagaagctgatgcagcaatcaaaggaaaccgaggagcagcgaaagcttgtcgagaaggatatggaagaactgcgggatgcccgtaaggataatgaagcggatatactggagcaaaagatacagcattatgtggagcagcaaaatcttttgaaaacggatacggctgctgttcagcagcagctgatacggaagggggaagttctggaagaacagctggagcagttggaggaaatcgaagattatgaggcattacagctggaagcctttgatttatccgccaagaagctggccgtaagaaaatccatccatgcggcacagcagctgtctgcttttgatctggaagcctatcttgagctgcaaacacaaatgcaggaaattgaggagcagatagcctctgttcgtggaagtctgcacaatacgctgcaggaaaagcgcgaggagcttgccgcacttcgcgcaagtcggcaggagctggaggcaggaagaaagacctatccccaaaagcttcttctattaaaacaggagctaacaaagaggctggcacagcaggttggcagacctgtggaggtatgcatacttgcggatttgttccgtattgaggatgaaagctggagaaatgccatagaaggctatatccataaccagaagctgaatctggtggtggaagcagagtattttatggatgcctaccgtatttatcgtgcgatcaaagaagaaaaaaacatacatacctattccattgtggatatcgccaaagcaaagccaggaaaacgcccggatgcgaaaacgctgtatgactgtgttcatgttgagcgaaaggatgtagcgccctatgtggagtatctgctgggcagggttgtctgctgtgaggaagaagatacattgcgaagctatccggtaagcattaccagtgattgtatgctgtacagcggatatgcggtatcccatatgaatccggcattgtatcaggtaccattcatcggctcggattccattgaaaagcagctgcaggaaacaatactgcagattcagaaaagtgcagcgtcatgcaaaaagctggaagcaatcacacagatattacaggccgtgcacctgcagcagatcatcagtgatgacttcatccgtcagttaaaggacggcttacacaaggcgaaggatgtggaagcactggagcacaaaattaaagagctgcgtgctgcgcagacaccggaatccttgcaggagctgctggtgctggatcaaaagattgaggaagcaaagaaaaagaagaatgagctttacatgctgcaggtggagcagggaagccgccgccacaggctggaggacgacatgaagctatgcaattcccgcatacaggagctacagcagcgtcttcaggaagcaaagaaaccggaaaatggcataccggattcgattgcggccgtcacggcagtggatgccatacgcagaaagcagaagcagctggaggatgtattgcgtgagttgaataatcatatggaactgtcgaaggtggaactgattacgaaaaaaacacattacaacgataccttccgcattgcgttgaatccgaattttatgtgcgatgattatgagcgggagtatgaaaagcattctgaaaatgtagtagaggcatatattgataaatgtgcacttgctgagcagaaggcctatgaatgctttcagaataacttcttcagtgccattaacagtaagattgaaaatgtacggacacagattgaccgcctgaaccgttccatcagaaagcataaattcggacgctccagctatgagtttgtatgtacctgtaatgaggattaccgggaatattacaacctgattaccaataaggagctaaacggacacaatttgttaaatacaaaggtgtatgaggaaaatgaagagctcattcatgaattgtttgataaaatttcctctctttcttccatggaggatccgaagaaatatcaggagctgcaaaaagaggtacagatgctttcccgcttcaccacatatctgaagtttgatattctggataatggaaattcgctgcgtgcaacgattggctccagctccggcggagaaacacagactccgttttatgtcgctgtgcttgtttctttattcagtgtgtatgatgcaggaaatgacggattgcagctggcaattttcgatgaggcctttgacaagatggataatgagcggatagaggagtgcatctatctgttgaaatcacttggctttcaggcaatcatcgtaacgcctacagataagatatccaatctgagcaaggttgcggatgcgacactgattgcgactacggatgagaaaaacggacagcgtgtttcctccgttcaaagatggagtcagaaggaaaccatagctgcctaa

SEQ ID NO: 42268 - DNA, 1521 bp, Bifidobacterium bifidum PRL2010
gtgggtgatatccgacgggagatggaacggctgaggccggtctatgaaaccggcgtgctgagactgctgctccgtcagaattcgatgatgtacgtggcgctgctccgcgcggccttcgacccgttgaccggcgagctgccccgtgagaccctggaggaaagcttctcgcaaagcctgtcccggctcgtcgactccggcgaataccagctcagggaggatcagaccatcgcggacgcctcccggcgcatcctcgccgacctgacccgtgagggcgatgacgattacgcatggctcgccaactcgcatgacgccgcatcgcaccggttcctgtaccgtctcaccgcccgcgcccatcgtgcgatcgaggcgctgtcgcggcttgaggatgactcccgcacgctgtcgggcgcgcaggcgaactcgatcatcatggagatcgagcatgcgcgcatgcagcttaccgccgaccccggcgagcgcgtggcgttgctcaaccgggagatcaaggcgcgcaaacacgagatacgtcagatacgccacggtcagcggcaggcggcgctcaccgaatcgcaggtcgaggacgtgattgcagtgattcacaacacgctgcgcggcgtgcccatagacctgcgtgaactcgtgttgaacgaacgggacaacggtgacgcgctccgccgccgcatgcaggcgggcgacatgagcgtcgacgacatcctgacctcgtaccacgacgaataccgcaggtccttcagcgagtccgacagcggaagacgcttcgaggacgcgttccaggtgatcatcaccgacgaaggacggcagcagatcgacgcggccctgcgcgacatcgcccacacgccgtatctggccggcgagtccggcgtcctgctcgatcaggtgcgtgccgagctttcgcgcatctatgacggcatcgaggcggtgcgttgccagatgcgcgtatccgacgaggcgatcagccgtctggtgcgacagcagaccgatacccgataccgcacgatgctcggcaagctcaaccgtctgtatgcccacgtcaacgccgacgcgaaggcgcatcagggcgacgatgcgagaccgtaccggaccgataccgcggccggcaggttccctccgctgccgtcgcgccccgcgcgcccgatggtacgaacgaccaccccaggattgtccgtaccgcagacaccgggcgatgcgaccgcgcccgacctgcgttcgatgatcgacaacggggggccgcggctgcggcgcatggccgcgctcatcctcgaatcgcccgtctacgcggacgacgggaacggcgccatcgacatcgtcgccagcttcaacgggctgccgaaagccgagcggaaggaaagcgagctcgtcggtttcctgggagagctcggctgcggggacggagccggcgtcgcatggcattgcatatcggcagacggaagcccgagggactggatcaccggcccagtgctcgcacaagaggatgaattgcacgacatcgtgaaggaggactga

SEQ ID NO: 42269 - DNA, 1044 bp, Bifidobacterium bifidum PRL2010
atgagcgacctgacgaacgacgccgcccagccggacgcggacatggacatggacatgattggcgacgacatgaccggcaccggcagtgccgataccgacagtgccgataccgacagtgccagtaccggcgcggatgacatggatgcggtggacgtcgaatacgatggcgcggacgcggaaggcgcggtcaacccatacgccctgttcgagggcgacacgggcgacatgaccgccgactcgcgcatggtggcgatcatgctcaaacgcgagcgctacatcagcggacggttctatgacctggcgctcgacaaccgcgcggcggtcgtccgttcgctcaacaacgacctgctcgatctggtcgtcaacgagcactaccgcgtcatgtacgccaccgcggtgagcgggccggacatgacgctgcgcgcgctcaagacccgtgcgagcctcaaacgtgaggaggcggcgctgctggcgttcctgcgcatccgcgtgctcgaatacgagaacgcccacgtcgcgccggacgaatggctggtcagcttcgaggagatccgagcggcgctcgccaccggcgccgggtacctcgcctcgcgcaacgacgaggagggcgtgctcaggcaggtgggcgcgatcgtgtccgtcatgtgcacatacggctatctcaggcagctcgacgatgacgagacgatgtactgcatcacgccgctggtgccggtggtgctggaccgtcagctggcggacagctggctcgcagtcgcggaccgggacgacgatggcgagccggccggtgacatggccccggccggctcgcggtctgcagccggcgatacgtcgaatgccgatgcgagcggcgccgatgacgatggcgattcggacgatgcgggacccgacgccgaactgttcgaggctccgctgttcgatgatgacgccgatgcggacgccgccgaggacatcaggggcgccgatgatgccaatggcgcgaacgacagcgacattgacgacgagaccgcctcggacggcggcactgcacgggaaggggagtga

SEQ ID NO: 42270 - DNA, 3591 bp, Bifidobacterium bifidum PRL2010
atgagcggcaaggacatgcagatgatcgccgaccgatggatgatggaaagcaggaggcttgtcaactggggatcctatgagggctaccatgagttccgtccctccacggactcgcaactgccggtgacgttgctcgccggcgcgagcgaatccggcaagtcgacgctggtcgacgcgcagatatcgctgctctacccgaccggcacgcccttcaacaaggcgtcgaattcggggcgttcggaacgaagcgactacacctacctgcgcggcatgatcggcgtgggaggctccggcggcgtcgacgaaccgatgtacctgcgcggccgggatgagtccggcgcgccccggtccatatggggcgcgatcgtcgacacctaccgcaacttcaccaccggtcagatactgtcctgcggcaagttcctctatctgatgcccggcgacgggcgcggcgacgtccgacggctgtacctggcatgggacaagccgatcgacccgcgccgcatggacgtgttccgcgagtcgtcgttcacgcccacgcagctgaaatccacgtatccggggtgcgtcaccttcccgaacgccgaggcgttccacacccacatttgggatgtcatgggcctgagcgcggaggcatgccgtctgctggcccgcatccagtcggccgacgccccctcccgccttgacgacatcttcaaacagggcgtgctgggcgtgcccgaggcgctggacctggcccgtgcgaccgtggaggattacgagcgttacgacgcgaacttccgaagcatggaggaaaagaccagacgcatgggcaagttgcgtgccatcactgccagctatggcgactacgagtcggcccgtgacgcggtccactcgttcgacgcggtgaacccggccacgaagtccggctcggcgacgatccgagcatgggcgatccgccgcatgatcggcgaggtcagcgaacggcagccgctcgacaggcgtctgcgtgacgagcgacgcagtgaggcgcgggctgccggcaagcgcatcgaaagcctgcgcacccgcatcgacgcggtgcgcgagcgcatgcgaggcctcgacggcggcgacctgacacggctcgacgcggaaatgcggcaggcggaacgcgcgctggcggacatcaccgccggcagacagcgcatcgggcgcatgttcgaggcggccggcgaggagttccccaaagacgagcacgcgtgggacgagcggcgcatcgaggccgtgacgttcatgcgctcatatgagcagcgcaagggactgctggacgacatgcgcaaccagacgtacgccgcgcacgcgtccgtcaagcagacgctgcagcggctgaacgacgattacgaacgccagaaatcgcagcgcacccgcatctcccgccagatggacgagacccgcgccatgctgtgccgggccaccgggctgggcccgagcgaactgccgtacgtcgcggagctcatggacgtgcgcgaggatcaggagcattggcgcctcgccatgaacgccgcatacggatccatggcccagaccatcctcgtcgacaagcgccatgagcgtggattcgcagccaaggtcagcgccatcgacccgcacgccatggcgcggcgcacctggcagttcgtcgacaccgaacgcgggggagccgggaacgggcccggcggcgcgaacacgggtgcgaccggcgggacggacggagaggtgtggctgtcctcgaagctgcgctaccgcgaggattccccgttcgccggctggctgcgcgagcagaccagctccgagcgtctcgacgccttgtgcgtcgacggcatcgacgactccgaccatgccgtgcggcaggtgcaggccgacgggcagatcaaatccggcaaacgcggccagcatggcatcaaggaccgtcagcaggtcatcggattcgtcaacgaaagctatttggcgcaactgcgcacgcgcatccaggacgcgcaacgccaatgcgacgagaccgcgcaatcgtacgcgagcgcgaaggaacaggccgaccgcctgcagcgagagcgcgaactcgccgaccagctcgcatacaccgcatgggagaagatcgacgagaacagcgcgaaggcggcgatcgccgacatcgaacgcaccatcgcctcggtcaggaacaatcccaagctcgccgaactcgacacgttgcaggagtcgctgtccaaggagctcgaccgctcgcagcgccagcgcatcgacatcgaacggcaggccgagctcgccgatcaggcggtgaacgcagcgcaggcatggctcgacgagcatgccgcgcagccgcagcctcaaccgcagacgcggccgctcgacggggaagcggcggacgtttcgccaaaagccgtcacgaacggacggactctcctgacggacgaggtggaggcggcgctcgccgaatcatatgagcagcgtctctccggtctgggggatgcgacgacccgcgcccacatgatcatcggcgcgggggcgccgcagcgtatggctcagggggataccttcgccgaccgtgtcatcgccggcatcggcaaggacctggaggcgcgcgtctccatgctcgaaggtcgtgcggcgtcggcccgcaccgccgtcgaggcgcggatgggcgcctatatcgagatgtatgcgggcggtgacgatacgatcgccgccagcgtggacgactaccggtattaccaggacgagttggaaagcctttcgaagctcgccaccgtcgaagccaccgccgtcgagtaccacaactgcctcgacaagctgctgatgagcttcctgaccatcaaacgcgcgatagacaccgacgccggagacatccacgaccagctggaacgcatcaacgcgatgctggacggccagcagttcggcccgcgccacggcagcctgtccctgcacgcggacgtgcggcgccccgagcgcgcgttctggtcggccctgacccgcgtgatcggcaccctcaacgaccgcaaggcggcacagacggacgacgatcttgacggggcccggtgcgcgttcgcgtcctgcgccgcgatgatcgacatgctgcgccgcgagatcgggcagatcagggacgtcaacggcgtgaaaagctacggcgcccgcaacctcgacccgcggtgccgatcctcgttctacgcgctcgtgcgccactcggacgggcaggtcgaacgcatcacctcgaccggcggacggtccggcggcgccctgcaggagctgacctcgttcgtgtacggcgcggcgctgatctacctgctcggcggcggcatggacaacaagctcaagccttcctacacgacgctcttccttgacgaggcgctcatcaaggccgacggccggtatacgcggcgcgcgctgtccgtactgccgagactgggtttccaggtcatcgtctccgcccctgaaagcaagacgggcgagatactggaggtctccaccaaggcatacgtgacccgcaaggaccccgacaccggctacaccacgctgcacgaagcaagactggacggcatcgatgagatggacggcgcagatgagccggaaggtaccgtcgagtcggatgacgccgccgaatag

SEQ ID NO: 42271 - DNA, 1428 bp, Faecalibacterium cf. prausnitzii KLE1255
atgcagctgtttgaactggtgtccccgcggctgttccgcccgctggcggggccgaaccgggctttttatgcggaattgctgcttctgctctgggaggagtgccgccacacggcggattacagcatttcccgtgcggaggccgtctggcgtgccgaggattactttgccgcactggcaaagccccttgcgctggatgccgacggtgcgggcgatgaagaagagcagcccacccgcgaccctcacacgctggccgtgggctttctgctgcggctgcgccgcaccggctggctggaagagcagcccggcagctacgagggggaagcgtcccttgcctttgtgccggaggtaacgccgctgctggaagcgctggaagaaatcttgaatccccgcgtagttacctataccggaaagctgtacaaggcatggcagctgctgggcagcatcgggcaggaaaaaagcccctatgagaacgttctgcgagaggtggacgcagaccttgacgcgctgaaccgctctctccgggcgctcaatgcttccatcggccactatatcgaccggctcacccgcaaccgcaccccgcaggaggtgctggaactgttcgaccagtacgaggaaaaggtggtggcggcggcctaccaccgcttcaagaccagcgacaacctgttcaactaccgcgcctatctggaagaggagctggacgactgcgaggagaactacctgccgcagctggcctttgattatgcccgggtggagcgctgcgccccgaacgaagcgacacctgccgtgcgtgcgctcatccagaagcagcgggacgcgctggaagagatgagcctgctcatgcgcgagatcgatgcaagccacatccgctaccgcaagcgggccgtgcagcgggcacagttcctgctgctgagcgaccgttcttcgcagggcagcgtcaccgccctgctgcgccgctacgccgaggacatccgcaccccggagcagctgtttgaaccggacgacggcccggtggcaaagcggctgcatctgtacccggcggcagtgttcggggagaaattcctctacccgcccgctgcccagcgcaccgccgagccgctggccccggtgcgcaccgaaggattcgatccggaacagctcaaaaaagagcagcaattgctgctggattacgcccgccttgccgttaccgaggagaacgtggccctgctggcccggcaggcccttgccgcccgcccgcaggtgaacgcggcacttctggcagacgaatacccgaacgattttgcccgcatcatcggcctgcacacctactcgcagtcgccgcaccgggattatgacattcagctcaccggcaattgggtggagcgcggcggtttccgctttgaggactttgtcctcacccgccgcagggaggaagaaaatggcaaccattaa

SEQ ID NO: 42272 - DNA, 597 bp, Faecalibacterium cf. prausnitzii KLE1255
atggcaaccattaacatgctggaagaaaccgcgaattacctgctgaaccactgcttcgtgctgggcggcgtggaggatcagcgggcaaaatatctttatgtgcaggaccatctggacgaggtgcgcgctgtgttcgccccgctgggctattctgtattgctgtacccggcacccctgcaggcggcggctttggtcaacggccacgagggcagtcaggcccggctgctgaaatacgagagcatcctgcttttggtattgcggcttttgtacctgcaaaagcgcgagagccttgcagccaatgccgatgaggtgctggtgacggtggaagaggtgcagaccgagctgcagaagatgaatctgccccgccgtctggaccagaaaacgctggaaaacctcatgcgcaccctgcgccggtataatctggcgcggcctgtggggcggctttccgggctggacagccgcattgaggtatttcccaccgtgctgctggccctgccggatgccgaccttgcggatgcagcggcagaatctgcccgcacccgcacagagcttggcctttatgaacgaccggaagaagcaggggagggtgaagaatga

SEQ ID NO: 42273 - DNA, 3294 bp, Faecalibacterium cf. prausnitzii KLE1255
atgatcgaactcaaacggctgaaacttatcaactggcacaactttgaaaatgtcaccttcgactgcgcacggctcacctatatgatcggcgtgaacgccgtgggcaagaccaccattctggatgccatccgctactgcctgaccaccaaccgcaatttcaatgcgctgggcaataaaaagagcggccgcaccctgcagggttcggtgcacgcaaagcagcgcggcgagaacgcctaccgccgcccgggccataccgtggcctacatcggggcggagttctgggacagcgtcaagcgcacccccttcgtcatcgcggtgcgggtggagtccgaaggccccatgcaggagctgcaccccggcgatcagacatggtatctttcggaggacggctgcacgctggaacagctgcccttcatcgaccccaagaccggtgcacccagcgcaaaggaggacttcaagcccgcaacaggccgtctctcctacacccgcagccccagcgaagcgcgggaccgcatctgccgtgcgctgggtattgggcgcgcctccagccccttgggcaaaaagttcaacgaggtgttccagatgggcaccagcatggacgagatccccaacttccgggagtttttgtaccagtacatcctgccccagccggagctggatctggacgctttgcagggtgaccggctggaactggaaaatctgcacgccgtgctggccgaagcacagacccgcgccaacgcgctggaagagatcgtgaattttggccgcgaagctgccgaaaagcagacccagacccttgtgaaccggggcgcggcgctgctggcccgcgccgctgccgacggcagcgaacagaccgtctggcaggagcatctggatgcgggccgccgccagctggaacagctgaacgcccgctatgccgaggccaaaaatgccgaagcggaagcccgccgggcctatctttccgcccacggtgccgccagcgccagcggcgagggccgggcactggatgccctgaccgaggagctttcccgccgcaaaacggcgctggataccgccgcacgcaaagccgaaaaggcagaaagtgcccttgcccgcacccagagcctgctggctgtgctgcgccgcagcggctttgctgccggcatcaaggccgaagagctgacggcggacactctgccgcagctcaccgcatggctctccgcgcaggaaaaaccgctggaggaagcctattttgctgcccgccagaacactgctgctttgcagaaggagcaggccggcaagcgcgccgagctggacgcggtgtccggcggcaagtgggtctacccccacggcgatgccgccacccgggtgcgggatgcggtcaacgccgaactgaagagccggggcatgcagccggatgcaaaaattttctgtgaactgttgaacgtggaggacgaaagctggcaggactgcgtggaagcctgccttggcgaccgccgctttgatatccttgtgccgcccgcccactacgaagccgccaaaagcgcctttgtggctctgaaggacaaggtaggccccatcagcctgctggacaccccgggcatccgcaaggccaaccgccgcgccgacaagtacggcccggacagccttgccgcgcaggtgagcagcgaaaacccgctggctgcacagtatgcccagaccattctgggccgcatcgtctgctgcgacacccccgatacgctggaacagcatcccgacagcgccacccgcgaccttctgcgccaccaccccttccggctggaacggctgcgcactccccagcggtatatcggtctggacgcacgccgcgcccgcgccggggcgctggcggccgagctggaagctctgggggaaagcgcccgtgctgccgcccagacagaacagaacctgaaagccgcctataaccagtaccagaccctgctgcggggcacggcactggacgagctggctgcgctgtgggatgcccgcgccgcactgactgccgcacagaatgctgtgaccgaacaggaagcaaagctcaccgagtgccgcgagaacccgctgctgcagcagctttacaaggaggaagaagcccgcgaagccgcgtgggaggctgcccgcgccgccgtggagcaggcgggcggtgacatccgcgtgtgccaaaagcagatcgcctcctgcgaagcggagcagaaaaaggcaggggaaacggcacagcagagcgccgatgctgcccggagcttctttgcggcgcatccgctggtggagccgctggcccgcacccggatgctggcgctggccccggcagataagccccgcgccgccgcacaggctgcggaaaaggcgcaggccaagctggacgatgcgctggccgtctatctgaccggcacgctggaaccggcccagaaagcctacaacgagcactatgtgtgcgattatccgctgggccttgcagggctggaccagtaccgcgcccagcacgagagccttgtgcgcatcgatctggaacgctacgccgcccgtctggagcaggcccagcgggactgcaaggaccgcttccgcaaggatatcctgttccgcatgaaggacgatatcttcaacgcacggcggcagttccgggagctgaacaaggtgatggaacagctgacctacggcgaggaggtctaccgctttgagctggagcccagccgcgacccgcagctggcggccttctatcaggtcatcgtggacaagggcaaccagcagatgaccgagggcgactcgctggacaaccttgccgccaccgccgaccctgcttatgagcgtcaggtggacgagctgatggaaaagatcatggcggatgtggacgagaacacccgcgcccggcaggagggccgcaccggcggcgtgaccctgtcggactatgtggactaccgcacctatctggactatgacatcaaggtgacgaaccgcgtcaccggccagcaggcatacctgtcccgcgtcagccgcgactcctccggcggcgagaatcaggcccccttctatgtggctatctgcgccagtctgctgcagatctacgaaaagagcgagaacagcatccgtcttgtgctgctggacgaagccttcagcaagatgaccagcgaccgcatccgccccatgatggagctgttccgccgcctgcagctgcaggtgctgctcatctccaccgtggaaaagagcaccgccatccagccctactgcgacatcacctactccatcgtccgccacggcgacaccaacgcaatagcgccctttatccgccttgcggcggaatga

SEQ ID NO: 42274 - DNA, 1401 bp, Faecalibacterium cf. prausnitzii KLE1255
atgaagttttttgaagcggttccaagcgaacttttctcgccgctggcttcacccaaccgtattttatatgcggatgcactggacgtactgtacgcagcataccaagaaaacctgaaaatacgggaagatgtcttgtattccatgctacgcggcaggctggaacaggaactggcggatgctacgtttgaagatgaagacattgacgaagaggaactgagggatatctctggccgcgctcgttttttgatccgcaagctgtgtagtaaggggtggtttgagaaagaacgcggggacgactttgaagagtatatcacgattcctaattacagcagccgtttgctggaattattccaccaactctgcgatgatagcccggctcgtgggtattcctatgtgttcggaactttctcagtcttaaggaccgccgacgacagcaacaatgcttacgataaaatgacggctctctatagtgcctacgataacacaacggcgctgattagcttgttgcaaatggtctatcataatgtgaagcattattttcagacgcagatcgatatgcaggatgtcaaccaggtgctggctgcacactttaacgacttcggacaaaaggttgtggaggcatatatccgtccgctgaaaatcaaagattcagtgccgaagtatcgtgtgcccattcagtctgtgcttaggcgctgggaagaggatgataccttgctgatggcgatggcaaatgaagcattgcgtgataagcggggcaagacattggaagactgccgtgccgatctgctgaggaaaattttctggatcgaagaacgctatgacaatttagagaaggactatcttgaagaaattgatacgcaggtccggcgctataccagggcagcaacacagaaaatagagaacctgacgaaccgagatcaaagcgtgcgcggtaatttgaatgttttgctgacggcactgtccagaaaccgcagggcgtctgagctggtggaccagatacaaccggtatttcaattgtatgagcagtcttttttgtcagaaaaaagtctgtggtaccgtaagcgccccgaaaaacggacaaaaaccgcgtcggtgctgatacaagatgatcaggcaccgaatacagaagaacaggtcagagcggcacagttactgcaatcgaaatatggccgggcagcagtaaatgcttacgtgcagggatggctgggagacgctgacattcgttgctcggaggagctctcgcttgaagaggacaaggattatatcatgagtttgctggcaatccttggaagcaaagatgcatctgccggttatgtggtccaggaactcgatggcattttttgcaaaaatggctattcgatcccgcaaatgcagatccggaggaaggagaagaagccgtga

SEQ ID NO: 42275 - DNA, 648 bp, Faecalibacterium cf. prausnitzii KLE1255
gtgaattttgattttgttaccaatgcaacggcaaaagaactggaacaattcaaatctgtctgcaatcagctgctcagccgcacatacattgtgcgaaccatctaccagccgggaaaaggcagggtggataacccagattatctttttctatcacggcactatgaggctgtacaggagtacctgagcctgctggactgggatttgcgcagggatgaactgaacggatacttttatgtgttgaacacagacgaggctaaccgttgcaacctcaataaaaaagaaacggcgattttgctggcattacggctgatctacgaagaaaatatggagcgtttgggtttggagcaggatgccgtgtgtactgtgcgggatgttctggaaaaagtggtgaccgactatcccgtttttccggctaagccgaatatggaagaggtcaaacgcgcgtttacggtactggaaaaccattctgtgattcaaagactggaaggaaaattcaaccagggcagctgcaggatcgcaatattgcccaccattctctctgcggtctccagcgaaaagctgaacttggtggtgtctgttttgaaaaaggaggaaacagatgaagaagctgaagaagatcctgctgatcaactggctctatttcagtaa

SEQ ID NO: 42276 - DNA, 3384 bp, Faecalibacterium cf. prausnitzii KLE1255
atgaagaagctgaagaagatcctgctgatcaactggctctatttcagtaaggaactgattgaagtgggcgacatcaattttctgacaggcaagaacggcgccggaaagtcaacggtcatcgatgcactgcagatcgtactgctgggcgagaccaacgcccgcaactttaatcaggcggccaacgaaaaatcgcagcgcacattggaaggctacctgcgcgccgacatggatgataacagcccgtattcccgtcgtggtaaggacttttccacctatattgtctgcgaatttcaggatgagatggagggcagcagctttgtgacgggcgttacctttgactgccgcagcgatggaagttaccgtgatacattctttatttacacggggacactgccgaaaaattgctttattgagcagggcgaggcaatggagacttctgcacttcgccgttttttgaagcagaactatgcacgggcagaattttacgatactcaaaaagagtatcgccacaacatgcttgcaaagtggaacgtccacaacgagcaggtcttacggatgatgaagaaggctgtttcgttccggccaattgtggatatccaaaaatttattacggagaacatctgcgatattccggataaacccaatattgagctgatgcagcaaaacatccgggattataaacggcacgaattgctggcgcagcgtcagcaggaaaagctggatgcgctgcagcaaatcagcaggctgtatcaggagatgaaccaagccatagaccgctgccagatccagaagtttctggtacggtgggccgaaaaagaagctgcgcagacagagatcgaccagagggaattggaacgaactgaatgcaaggagaaccttgcaaatgtgaatgagcaacgggaggagcttgagcggcagatcgaacagaaagaaacgcgccgcagtgagctggagctggcctgcaggcagagcaacgttttccaggaggaagagcgtctgctcaacacggaaaaggctctgagagatgagcagaaaaagctggaacagggtctgcaaaatcttgaagtggagattaagcgggaagcacggcatttgcagagattctgtggggagatacaagaactggaaccggaagaacttctcataccggtgcaggaagcggcgaacactgcgcagaaagcatatgctgtatttactggtgacgagaaggaattgtttgcctggcctgcggagttgtttgaaacggggcagcaggcagcggccgaattgtcggatgctgtccgcagtgcggctcataaaacagaggaccgcattgcagagctgaagaaacaagccgaccagaaaagtgcggtgcttgcaaatctgcgcaggaacatcaaagattatccccatgggcttctgctgttcaaagaccggctggaaaaggatctggcgggcaaaacagggcatgcggttcccgtttatattctggcagatgtgctggaaatggcggatgagcgctggcgtggagcggtagaaggctacctaaataaccagaaatattatctgctggtggagccgggacactatcaggaagcacttaatatttacgaccggctgaagaaggaagcagagtaccgtgcgtttggtctggtagatatcggaaaactgcgggaaaaagagacgcttcggccgctgcccggcagtctggcagaaaaggtggagacagaaaacaagctggcacgcagctatgtggactatcttctgggtcgggtgatatgctgcgacacggcagaacagttgcgctgttataggacggcaatcacggcggaaggaatgctgtatcagggttatgtggcccgcgcacttcggaaggaccggatggaagatgctttcatcgggcggcgtgcggtacagctccgcatcgaccatctggaaaaggaattggcctgtctgcaggaggagcagcggcattggcagccgctccaaaaacagctagcctgcctgcaggacccgctttttactcaaagatttgtccgaatcgatgtggcgcaaaagcaggaggactaccagcgcgtccagacgatcaccaaggaaatcgcagaagtcaaaaatcagctttcccagctgaatctgttctggttggatgagcagcggcagatcattgagcatctgaaagaagagatccttgcacttaacaaggaaaaagatgcgaaaaatgtgcaaaggggcaatctggaaagccgcatccaccagctggaatatgagatcttgccggaaaaatatcagcggtatgaggccatcgaagatggtttgaaagaaggattcacggaggaataccgagaaaccatcggtgttccccgctatcggcaggagcttgtccgcttgaaaaaggcagatgtcatccgcaagaacttcggcgacagtttggcgcagagcacaaaggcaatggacggggctcagaagaaactgtttgcagcacgcagagaatatgcagaacggttcaaaccctgtgcattccagatcgaggtgatggataacaccgaatacgaggaagaacggcgtactctgcaggaaagcgagctgccccgatacaaagaaaagatccgggcggcacgggaaagtgcaatggagcaattccagaacgatttccttgccaaactgaaatccagcatcgatcaggtgcaagaacaggtgcacaacctgaacaaggccctgcgccaggcacaatttggcacagacaagtaccaatttcgcgtagggccaaacccggattatctggattactataacatgatcacgtcagatgaactgatggaaggcgaatccggtctattcgcactgccctttcagcaaaaatacggcccactgatcgaaaaactgttcagtcagatcacaatggcagacgatacgcagctcaatacccgaaaacagagcgaactacaggagaatatcgtccgctatacagacttccggacgtatctgaagtttgatttggaaacgaccgaccagaacggttccaagcagctgctttctcaaacactgaatatgaagtccggcggtgaaacacagacaccgttctatattgcagtgctggcatcatttgctcagctgtaccgtgtgaacgatgccacccgctttggcaacacggtgcgtcttgtggtatttgatgaggcctttaataaaatggacagtgaccggatcaccgagagcgtacgcctgctccgaaagatggggctacaggcgatcatttgcacgccgccggataaggtttcggacattatgcccattgctgaccggacgcttctggtggacaagactgggtatcggatgcacatcattccctttggaaaggagatgcagaatgaaggaagcgcaagtgatcctgaaccggctgctggataa

SEQ ID NO: 42277 - DNA, 1239 bp, Faecalibacterium cf. prausnitzii KLE1255
atgaaggaagcgcaagtgatcctgaaccggctgctggataagtttgaaaacagcaagcatctttccgaacctaatgtttccagacgccgggtaatgctgcgcattgataaaagggaattgccggagtatcaatacgaagatgcggtggttcgggatgcatacaatgctgcggcacgggagctggagcagcaggctttggtgcgtctggaatgggcgagaaagcagagcgttctctcctgcatcgtgctggatctggaacgggtcgcacagtgctatgaatgcgccgacagagtgcatccgcaaaaaagggcggaagaggtcgaacgtcttattacgcaaaagttggagggcaatcctgtttcatggatcgcagcatggcgggatgctgtatgcactcaggcacggaacagcatgagagtgccgactttttgtagagagaacgaccatttgttgcaggacctgctgcttacattccagcggtacgcagagctgtccggcagtgtgacgatgcgtgcattcagcagccagtgcttccacgacaccaaatattttgagcgaaatgtgcgtgaactgtttctcggcattgcacgtaagtataatatccaactggcggcggcctgtacggaagcggaacttggcgaacgggatcagctttcatttctgggaatctatgcccgtccagaactctacgagctttcgggcgattgcacgattttgctgcaaaagggtgaacttcgactcagcgcagcagaaccttatggcgtagctttgcccagtacgcttatgtcagagattgtggatattgacctgaaaaacaactgctgcattacctttatcgaaaataaaacaaactatgatgaatatttgctggtggaaaaacagccggaagaacttgttgtttatcacggtggctttctgagtccgcagaagaaaaaactttttgaaaaactggccgctgtggcaggaaaaaccatgcaaatacgattctgggcagatattgatctgggcggtttttgtatgttcgaaaacctgcaaatggtgttcccacaacttgagcccatgcgtatggaaggactctttgtggaacagtaccacaaaaacggactgaatcggccggagcagtatttgcaaaagttgcaggaagagcggaatgcgggaagacatccgctgtttgccgatgcaatcgataagattttgcaatacggggtcacaatcgaacaggaaatatttctggagtag

SEQ ID NO: 42278 - DNA, 1632 bp, Bifidobacterium longum subsp. longum BBMN68
gtggccgatgtgatgcgggagctggaacggctgcgaccggtgtatgagacgggcgtcctgcggttgctgttgcgccagaacgcgatgctgtacgtgtcgctgctgcgttccacgttcgacccgctcaccggcgagctgccgcgcgagaccgtggaggagcggttcgcgcaaagtctgaacgctctggccgacgccggcgaatatgcgccgcgcgaggaccagaccttcgccgaggccgctcatcagatcctcgccgacctgacccgtgaaggcgaaggcgactacgcctggctcgccaactcgcatgatgcggcctcacaccgattcctctaccgtttgacggcccgcgcccaccgcgccatcgaggcgctgagcaggctcgaagacgaatcacgcgccctgtccggcgcgcaggccaacagcatcatcatggaaatcgagcacgcgcgcatgcagctgaccgccgaccccggcgagcgcatcaaactcctcaaccgtgaaatcaaggaacgcaagcacgagatcaaacgcatccaacagggcaagcagcatgccacgctgagcgaagcccaggtggaggacgtgatcgccgtgatccacaacacgctgcgcggcgtgcccatcgacctgcgcgaactcgtgctcgacgagcgggacaacggcgacgccttgcgccggcgcatgcaggccggcgacatcagcgtggacgagaacctgacccgctaccacgatgaataccgccgctcgttcagcgaatcagacagcggccgccgcttcgaggacgccttccaggtgatcatcaccgacgagggccgccagcaaatcgacgaagccctgcgcgccatcgccaaaaccccgtatctggccggcgaatccggcgtgctgctcggccagatccgcgacgaactggcccgcatctacgacggcatcgaagccgtgcgccgccagatgcgcgtctccgacgaggcgatcagccggctcgtgcgccagcaaaccgacactcgctaccgcacgatgctcacccgcttgaaccgactgtacgcgcgcctcaacgcggatgcgaaaacccatatgggagacgcctcgcgcccgtacgacacggccacctcggacgcgctgttcgcgccattgccgatgcgcccggccaaatccatgacccgcgccaccgcacccggcctgagcgacctcgccgccgaagccccgcagtcgactccggtggccgatctgcgggacatggtcaacagcggcggcccccgactcctgcgcatggtcagcctcatccggcgcaacccggtgaccgttgacaggtccgatgacaggcccggcgcaaccctcgtggacatcgccgccagcttcaaccggctgcccgaaagcgaacgccgcgaaagcgagatcgtcggcttcctgggcgggctgggagccgtaagcggcaacgccatcgccgacgagccgtccactgacggcgtcggcgtcggggtcgacagcgacatcgccaccgagccggccccggcgcagcgcggcgataccgcgacctggcattgcgtatcgatcgacggcgagccccggaactggatcactagaccggtgctggccgacatggacgagctgagcatcattgtggaggaaggatga

SEQ ID NO: 42279 - DNA, 675 bp, Bifidobacterium longum subsp. longum BBMN68
atgaccgtggccgaggaacacgaggaacacgaggagcatatggacaacgccaacccgtacgccctgttcgaaggcgacaccggcgacatgccggccgaggcacgcatggccgccatcgccctcaaacgcgaccgctatatcagcgggcccacctacgacaccgtgctcgacaaccgcgacgccgtcgtacgctccctgaacaacgacctgctcgacttggtgatcaacgaacgctaccgcatcatgtacgccacgcccgtggccggcgacgacgtgaccctgcgctcgctcaaaacccgtgtcagcctcaaacgcgaggaggccgcgctgctcgccttcctgcgcatccgcgtcctcgaatacgagaacgtgcacgccgaccccgccgactggctcgtcagctttgaggagatccgcgccgcgctcgccaccggcgccggctatctggccgcccgcaacgacgaggaaggcgtggcaaagcagatcggcgccatcgtctccgcgatgatcacctacgggtatttggtgcgcctggacgacgaagccatgtaccagatcacgccgctcgtgcccgtggtgctcgaccgcgaactggccgacacctggctcgacgtcgcggaacacggcgacggcgacacggaagatgacgatgacgacgagaagggagccgaatga

SEQ ID NO: 42280 - DNA, 3549 bp, Bifidobacterium longum subsp. longum BBMN68
atgatgcaggcgacagacgtgcagatgatcgcggaccggtggatgctggaatcccgccgactcatcaactggggctcctatgagggctaccacgaattccgcccctccacggaccacaagctgccggtgaccctgctcgccggcgccagcgaatccggcaaatccacgctggtcgacgcgcagatctccctgctgtacccaaccggcacgccgttcaacaaagcctcgaactccggccgctccgaacgcagcgactacacctacctgcgcggcatggtcggcgtgggcagcaccgaaaccggcgacgagccgctctacctgcgcggccgcgacgagaacggcgcaccgcaacccgtgtggggcgccatcgtggacacctatcgcaaccagaccaccggccaggtgctctcctgcgccaaattcctctacctgatgcccggcgacggccgcggcgacgtgcgccgacagtacgtggtctggggcaagcccgtggaccccaggcgcatggaccaataccgtgacgccccgttcacgccggcccagctcaaagccacctaccccgactgcctcacattccccagcgccgaagcgttccacacacacatctggagcgcaatgggcctgagcgaggccgcctgccgactgctgcacaagatccagtccgccgacgcgccctcccggctcgacgacatcttcaaacaaggcgtgctcggcgtgcccgaagccctggacctggcccgcaccacggtcgaggactacgaacgttacgacgagaacttccacgccatggacgagaagacccgccgcatggacacgctgcgcggcatccaacaggcctacggcgaatacgccgccgcacgcggcaaggcccgcgccttcgaaccggtcaagccggccgtcgacggcacggtgccggccgtgctgcgcgactgggcattggcccgcatgcgcggcgaagtcgccgtccaactgcccgccgatcgcgccgaacaacagaacagcgaggcggaagccaagctgctgcgccgccgaaccgaagacctgcgcacccgtctcgacatgatccgaggccagatgcagggtctggacggcggcgacctgacccgactcgaactcgaactcgaccaggcccgccgcaccctcgaagacgtgcaagccaaccgaacacgaatcaaacaaacgttcgcatccatcggcgagacgctgcccggcgacgaacaggcctggaacgaacgccgcatcaacgccgtgaacttcaaacgcgaatacaacaaacgagacggcgaatgcgaggaagccctcaccgccgccatcaacgcgcgggccggcgcacgcggcgacctcgaacgactgcaacgcgacttcgaccggcaacgctcccagcgcacccgcatctcccagcagatggacgaaacccgcgccatgctctgccgcgccaccggactcacccccgccgaactgccgtacgtggccgaactcatggacgtgaacgaacacgaggaagactggcgtctcgccatgaacgtcgcctacgcgcccatcgcccagaccatcctcgtcgacaagcgccacgaacagggcttcgccgccaaagtcagcaccatcgacccgcgcaccatgccccgacgcacctggcagttcgtggacaccgcacgccactacgacgacaccggcgcgcacgcgaacatactcaccggagaacaggacggcgactggctgtccggcaaactgcgctaccgcgacgactcgcccttcgccgactggctgcgctcgcagacccaggacgaacgattcgacgccctatgcgtcaccgccatcgacgacaccgaccgcaccaaccgtcaggtgcaggccgacggtcagatcaaatccggcgcacgcggccagcacggcaccaaagaccgcgcccaggtcatcggattcgtcaacgaaacctacctcaacgcgctcgcagcgcaggtcgacgccgcccgcaacgcgctcagccaagccgacaccgactacacggccgccaaaacacagtccgataacctccaccgcgaactcgaactggccaaccagctcgcctacacgtcatgggaacgcatcgacatcgccggcgcgcaacggaccatcacggacacgcaggacgccatcgcatccatcaaaaacgatcccaaactcgccgaactcgccaaacagcgcgacgaactgaacgccgaactcgaccgtgtggaacgccagcgcatcgaatccgaccaggccgcggcccgcgccggcagcgccgtcgaagcggcgctcatctggctgcgcgaccatgccgacaccggcacgacggacgccgccggtgccaccgccgacaatgacgatgacgccgcgtccggcccgctgccggacgaagtcacggcggcgctcgccgaatcctacgacaaccgattcgccggactggcggacgccgccatgcgcgcgcacatgatcatcggcgcgggcgcggcaggaacgcaggcaccgggggagagcttccccgaacgcaccatcgccggcatcggcaaggacatggcctcccgcatcaacctgctgaacggccaggccgatgccgcacgcaccggcgtcgaatcgaagatgagcacctacatcgcgctctacgcggccgacgatgattcgctgaccgccagcgtggaggactaccggtactatctcgacgaactcgccagcctcacccagctggccgcggttgccgccaccgacgccgaataccggcgctgcctcgaacagctgctcaggagcttcctgaccatcaaacgcgccatcgacacggatgccagcgacatccacgaccagcttgaccgcatcaacgccatgctcaaaggccagcagttcggtcccaagcacggcagcctgtccctgcacgcggacgtgcgccgtcccgagcgcaccttctgggcgcagctcatccgcgtcatcggcaccctgaacgattggaaatccgccgacgtcaacgattccgacgcctcgcgcaaggctttcgcggcctgcgcgccgatggtcgggctgctgcgcgccgaactcgcgcaggtcaaggacgcgaacggcgtgaaaagctacggcgcccgcaacctcgacccgcgctgccgctcgtccttctacgccatcgtgcatcatgccgacggcccggatgaacgcatcacctccaccggcggccgttcgggcggcgccttgcaggagctcacctcattcgtatacggcgcggcgctcatctacctgctcggcggcggcctgaccagcgagccctcgtacaccacgctgttcctcgacgaggcgctcatcaaggccgacggccgttacacgcagcgcgccctcacggtgctgccgcgcctcggattccaggtcatcgtctccgctccggaaagcaagaccggcgaaatcctcgaggtctccaccaaggcctacgtgacctacaaggaccccgacaccggcctcacctccctgcgcgaggccgtgctgcatcagaatgacatggacgatgaatcatcgtcggatatattgaaggatgacggggttgccgaatga

SEQ ID NO: 42281 - DNA, 1185 bp, Bifidobacterium longum subsp. longum BBMN68; identical to SEQ ID NO: 41659

SEQ ID NO: 42282 - DNA, 1485 bp, Xylella fastidiosa Dixon
atggaccatgccaccctgaccaccttgcgtgagcggcaccccgcctggcggttactgacctcaccgcatgcacccctggtcacaagctttctgcaccgcatgttcgtcgcaacgaacgcgcgcctgctgagcgagaccaagatcacccaggcactggaagacacgctgtatgcgctgcgtgaacacgaaggaccggaggcctacccgaagggcgccctggactacctcaatgactgggccgcacccgacaaaggctggctacgcaagttctacacctcaggcacggatgaagcgcagttcgacctcaccccggccactgaaaaagccatcctctggctgctgtcactcactgaacacacatttgttggcaccgaatcgcgcttgctgacactgtttgcgctgctggaacaaatgagcaccggtaccgagacagacccaatcaagcgcctggacgaactgcgcaagaagcgcgatgcactggacatcgaaatcacccgcgtcctggaagggcatacaccgctgctggacgacaccgcgatcaaagaccgcttccagcaattccagcaactggcgcgtgaactgctgtccgacttccgccaagtgcaagacaacttccgccagctcgaccgcaaggtacgcgagaaaatcgcactgtgggaaggcaccaagggcacgctgctcgacgaaatcatgggcgagcgcgatgccatcagcgattctgaccagggccgcagcttccgcgccttctggaacttcctgctctccagccgacgtcgcgaggaactttccgagcggctgggccaggtactggcgctgcccgcggtggcggcgctgcatccggagccgcgtacccgtcgcatccacgacgactggatagaagccggcgaacaaaccctacgcaccatcagccaactatcgcagcaattacgccactttgtggaaagccgagcttttctggagaaccgccgcattatggacctgctacacggcattgagcgcaaagcactcggcctgcgcgacatgacaccctctggcacagtgatgtacctggatgcgatcggggcggacattcaactgccgctggagcgccccttattcaccccacgcgcaaagccgcgcctggctgatctggtccttgcggccggtacagacgacatcgacaccacccccttgtttaaccaaattgtgatggacaaagcacgcctgcgcttagccatccaacgcgcactgcgcacccaatcccagatctccctgcgcaccctgttgcaaaccgagccactgcaacagggtttggccgaactggtcgcctacctggagctggcccacaccagcaacagcagtgatccggacggcttgcgcggcatcgtcgacgaaacggtagaagagccgatccgctggcaggccaacaatacagtgggtgaaacagtcacccgcgaggcacgcttaccccgcatcatcttcacgcggcgtgcctcctcgcactag

SEQ ID NO: 42283 - DNA, 705 bp, Xylella fastidiosa Dixon; identical to SEQ ID NO: 41844

SEQ ID NO: 42284 - DNA, 3501 bp, Xylella fastidiosa Dixon
atgccgtgccatcggacgatcaagacgaacctgacaccccgcctgaagcagaaggggagtcaggcgatgcgtgagacctccacactcggcctaaatttcgttgccgatgacaagcgcgtcggcttccggctacagcacctagaagtagtgaactggggcaccttcaacacccgggtgtggtgctacaccctgggcgggcgcagcggcctgctcaccggcgacatcggttcgggcaagtccacgctgattgacgcaatcaccaccctgttggtgccagcgcagcgcgtggcctacaacaaggccgctggggccgatgcccgcgaacgctcgttgcgctcctacgtgttgggctactacaagagcgaacgcaacgatgccaccggcaccgctaagcccgtagcactgcgcggtacgtcggactactccgtcatcctcggcgtcttccacaacgtcggctatgacaaggtcatcaccctggcccaggtcttctggctgaaggactcgcaaagccagcctgcccgactgttcgtggtggcagaacgcgcccttggcatcgccacggacttcaacaacttgggcggcgacatcaagaccctacgtaagaagcttcgtggtgcagggtgcgagctgttcgacagcttcccaccctacggggcgtggtttcgccgacgcttcggcatccaacacgagcaagcgttggagctgttccaccagaccgtctcaatgaagtccgtgggcaatctcaccgacttcgtgtgcagccacatgctagaaccctgtgatgtgggcagccgcattgaggcgttgatctgccacttcgacgacctggaccgggcgcatcaagccgtgctcacagccaagcagcaggtgaagttgctcctccccctggtcgacgacggccagaagcaccagacgcagctagccaacattcaaaccttggaagctggacgcgacacactgcggccctacttcgcacagctcaagggtgaactgctgaagcaccgcctggacgcactagcagccgaagcggaccagctagctgtggagatccagcagctgaaagaacagcgcaagaccgcagacagtaaagtcacccaactgcaacaggatctgcgagacaacggcagcgaccgcctggaaacgctggcggcagagatccagcaactggagcaaaccaaggcacaacgccaaaagaagtccgaccgctaccaaacgctactgaccaagattgacgagacagcgccagccgatgcaataggcttcttcacccagcaacagcgctttgcgcaacataccgaggaattaaacgcagccattgcgacgttgcataacgacaagagcgagaaggactttgcgctccgcaatgctcggaaagatcacaacaccctattggcagaaatcaacagcctgcaacagcgccagagcaacatcagcgccatccagatccgcatccgtcatgatctgtgtgcggcattgtccattgatgcggaggaattgcctttcgcgggcgaactcatccaggtgcgtgaggacgcacgcgattgggaaggcgccgccgagcggttgctacacagctttggcctcaccctgctggttccggacgcgcactacaaggctgtcgtcacgtgggtgaaccacaaacagttggatggccgactggtgtatttccatatgcgtccacgtaatacgacgcaggatgcagcgttacatgcgcagtcgctggtacacaaactcatcatcaaaccggagtcaccacactacacgtggctgcaacaggaacttcagcggcgctgcaacgtcgtctgctgtgacaccattgagcagttccatcgtgaggtccgcgccatcacgcaggccggccagatcaaagaccccagtggccgccatgagaaggacgaccgccatcgcattgacgaccgcagccgctacgtcctcggctggagcaatgccgacaagctgcacactttgtacgagcaacggcaacacctggaagacagcatacgcatgttgggagaagacctcggcaccattcagcaggaatgccagaaacaacaggaacggctggatgcactcaacaagctgggggaatacccggactttgcggacatcgactggatgagcctggtccgccagattgccggactcaaagaggaacaggcacagctccaagccacatctaacattttgcaaatcctgcaacagcaactcacagaggcgcagacgcaagtcaagctgctgcatggcaagtgggaaaacgcgttgcgcgaacagggcgaggtcaatagcaaacaaaaaacggcgcagcagatgtggaatcaggcccgtaacgtttgggatgatgcgccactgagccaagcgcagatcgcgctattggcttgctggcgccagcaagcgctgggggagcacctgctatcggtcgaatcttgcgacaaccacgagcagcaagttcgccaatggctacaaaaacgtatcgatgcggagaacgctcacctgagacaactaaatgaccgtattacaggcgccatgcaccgcttcaaagatcagttcaaggccgagaccgtggagatggacgcagacctggcggcgctgccagagtatgaacggatgctcaacggcttgcaggaggacgacctgccccgattcgaggcgcgcttcaaagaactgctgaacgtcaacaccatcaacgagatcgccagctttaacgcccaactcaaccgtgagcgggagacgatcaccgagcgcatcaaggacatcaaccaatcgctgcacggcattgactacaaccaggatcactacatcaaccaatcactgcacggcattgactacaaaagggggcgctacatcacgctgctggcacaacccagcccggacgctgagatccgcgacttccagcaggatctacgggcatgtaccgaaggcaccttgaccggttcggacgatgaacagtattcggacgcgaaattcctccaggtcaagcgcatcattgaccgcttccggggccgtgaagggctgtcggatgccgaccggcgctggacggccaaggtcaccgacgtgcgtaactggtttgtgttttcggccagcgagcgctggcgcgccgatgagagcgagtacgagcactacgccgactcgggtggtaaatctggcggccagaaagaaaagctggcctacaccgtgttggcggcaagcctggcctaccagtttgggctgaagtgggatgaggtgcgttcagaatcgttccgcttcgtgattattgatgaggcgttcgggcgcggctcggacgagtcagccgagtacgggctgcgcctattcgaaaagctcaacctgcaattgttgatcgtgacgccgctgcagaagattcacatcattgagccgttcgtctccagcgtgggattcgtgcacaacaagggcgggtgcgactcgcagctacgctgcctgtcgattgaggagtaccaggcggagaaaaccaatggaagcgggccgggaggcggcaccgccccatga

SEQ ID NO: 42285 - DNA, 1218 bp, Xylella fastidiosa Dixon
atgagttggaccacaccagccagtctgtacgcccaggtggaacgcctgtggaagcagggcgacttgctgcgggcgctggtcacggacacccacgccatgacgtggccgcacctcctgaagctgcgggcacccaacgctgcggatctgtccaaccgcttccaggcggtgcgtgattgggtacaggccatcgctggcaccccgcagattcggatccaatggcgggaatggaagcaccgcgtccaagggacacaacaggttcctgaagccgtctatctggacaccctgcaagcagccttggccttcatcggtaagacgcaccaagcgcaacaattcgaagcggtgtggcagcagaccgcagccgcgcagccagtgctcctggcgtggctgttacaacgcccgacccaggcgctggaggtggccgaccgctgggaacgtcttttagccgtggtcgcctggcttcaggcgcatcctcgtccaggcgtttacctgcgccaagtggatgtgcccggggtggacagcaaattcattgaggcgcacaaaagcgtgttgaccacgctgctggacttggcgttgccgccagagagtatcgaaacggccgccagcggcgtgcttcagttcacgcgccgcttcggcttcctcgacaagcctgtgctgatccggtttcgtctgcttgacgccgcgctgcccagcctgccgggctgcgcagggctgccggacatcagcctagacgcggctcacttcgcggcactgacgctccctatcacgcgcgtcttcatcaccgagaatgagatcaacttcctcaccttccctaaggtggccggtgcgatcgtcatcttcggcgctggctacggctgggagccgctggcacgcgccgcgtggctgcatgcctgccaactgcactactggggcgacattgatacccacggcttcgccatcctcaaccggctgcgtggctactttgggcacgtgacttctgtgctcatggaccaggacacattgttggcgcatcgcttgtactgggacgaggaatccaagccgacgcgccaggccttggagcacctcaccgcagaagaggctgccgtctacgatgacctgcgatacgatcgccaccagcccaggctgcgcctggagcaggagcggattggctttcgctgggtgtgcgatcggctggcctgcctgctctcagcagcccacgtagcaccaccccaggatgcgtaa

SEQ ID NO: 42286 - DNA, 1473 bp, Xanthomonas oryzae pv. oryzicola BLS256
atgaaacaccgtgcccgtatcgcccgctatcgcgccctgcgcgagcagccgctgtggaaactactggcggccgatcagtcgccggaagtgatcggcctgctgcagacgttgttgctcgacagcgagcgcggtttgcccgcggcggtcctgcatgaacgcctgcagcgcatgcttgacgatctcaatgtcgatcagctctcgcgcgagctgccgcgcactgcgcaggcctatgtagcgcactggctggcgcagggctggctggaacggcgcctgcccgagggcgcgcagcaggagcagtacgagttgtctacccaggcgatacaggcgattcgctttgccgatggtctggagcaggcgcgtggtgccgcgaccgagagccggcttgcgctggtgatgcagcagttgtcgcagttggccgcgttgaccgaaaccaatcccgatgcgcggctgtcggcgctgcgcgacgagcgtgatcgcattgatgcggagatcgcgcgggtggctgccggcaaggtcgcctcgttggatggcaaacgcgcgctggaacgtgcgcggcaggtgatcgcgctggccgacgagctgaccgaggattttcgccgggtacgcgacgatttcgagcagctcaatcgccagttccgtgagcgcatcatcgacgacgagggcgagcgtggcgaggtgttgacgcggctgttcgagggcgtggacgtgatcggcgacagcgaggccggacgcagttttcaagcgttctgggcgctgctcaacgatgccgaacaaagcgcgcagctggatgcggcgctggagacggtgttggcgcgggcgttcgcacgcaagctcgaccgccgcgagcgcagcttcctgcgcggcttgaccggtaccatgctcgaacgcggcggtcaggtgcacgatgtgatgcagcatttcgcccgcagcctgcgcggcttcgtccaaagccgtggctatctggaacaacgccggctcaatcaattgctcaagcaggcacaggccgaggcgttggggctgcgcgagcatctgcgtgcgcagcgctcggtcgggcacgacctcaacctgaccaccagccgcttacgctcgctgtcgcaatggcgtctgcacgatccgcgtcagacccaggtcgatggcagcatccagcgcaacgacgcagcggcgatctcgctggacagcgtcggcgatctggtcgcgcagtcggaaatcgacttccgcagcctgcgccgtgatctgtacgagctgctcggcgaacacgcacagctgtccatcgcgcaggtgctggcgcaacggcaggcagagcaggggctcggcagtgtgatcggctacctgtcgctgggcacgcggcatgggcaggtggatgcgcaacgcagcgagatcgcgcgatggcgtggcggcgatggccagtggcgcggcgcacgtattccgttagtgtggttcagccaggagaaacgcaatgaattggcaggctga

SEQ ID NO: 42287 - DNA, 699 bp, Xanthomonas oryzae pv. oryzicola BLS256
atgaattggcaggctgacaacgccgaaaccgacgcgcacgcgccgagcgcccacgtcgatgcggctgcgcccgaggcggacgccgcgacaggcctgtttcccggcgatagcggtgcgttgccggtggatgcgcggcgcgtgctgtgccaattgctcgccggccccagcgtggacgtgcagcgccacagcaagttgtggccagcgttgctgcgccatgaagcggccgtgcgcagccgcctggccgatctcttcctggaattggtgctcgaccgcgacgccggcgtcgccttcacccgccaggccgacaccggcgagctcgaagcgccggtgctgctgcgctctctgccgctgaccttcatcgattcggtgttgctgctgcatctgcgtcagcaactggccgaagccgatgcgcggggtgtgcgtgcggtggtcgaagatgcgccgttgagcgaggccctggccgtctacgagaagaatctgtccaccgaccgtgccggcttcatgcgtcgggttggcaacgccattcagaagatgaaggacaaccacgtgctcacgcgcctgcgtggcgaagacaaccgctacgaggtttcgcccacgctcaagctgctgttctcggccgaggatgtgtccgcgctggcgcagatctatcgccagctgcgcgagcagcccggcaccgtaggcgatgcagagcgcgcctga

SEQ ID NO: 42288 - DNA, 3429 bp, Xanthomonas oryzae pv. oryzicola BLS256
atgaaatcttcttcctccagcctgtttgccgacgatctgcccgacccgcgcgtgcagcagttccgcatgcgccgcctgcaggtccataactggggcacgttcaacggcttgaccgacgtgccgatcgccgcgaagggcttcttgttcgtcggccgttccggttcgggcaaatccacgctgctggatgccatgtccgctctgttgaccccgcccaatctggtcgacttcaatgccgccgcgcgcgaggccgagcgcactggccgcgatcgcaacctggtgtcgtatgtgcgcggcgcctgggccgaccagcaggacagcgcctccggcgaaatcgccacgcaatatctgcgcaagggcagcacctggaccgcgctggtgctggaataccgcaacggcgagggacgggtgatcagcctgatacggctgttctggatcgctggcagcggtgcggcggcagccgacgtgcgcaagcattacatggtggccgagcgcagtttcgatatcgccagcgaactggtcggcttcgatctggatttgcgcaagctcaaggcgcgtctgggcgacgacatcgcccacttcgacaatttctccggctatgccgagcgcttacgccatcagttgggcatcgccaacgagatggcgttacggctgctgcacaaaacccagtccgcgaagaatctcggcgatctcaatgtgttcctgcgcggcttcatgctcgaggcgcccaagaccttcgacgccagcgagcggctggtgggcgacttcgccgaactcgatggagcgcatcgggcggtggtcaccgcacggcggcaggtcgaaacgctgctgcccgcgcgtgcgcattacgaggacttgcagtcggtgcaacgtcagcgcggccgcttgcaggaactcaagctcggcctggacccctatcgcgagcaacgccggcttgcgttgctggatgcgcgcctgcatgcactggacgtcaacgaccagggcctggccggcgaggagggccaacgccgcgctgcagtggataaccaccaacaacgcttgtccgatctggaggcccagcgccgcagccagggcggcgagcggatcgacgcgctggaacgcgagcagctccaggtccagggcgaacttgcacgccgcagcgacaagcgtgccaaggccgaacaggcctgccaccagctcgaccagactttggccgacaacgcgcatggatttgccgagcagtccgcgcaggcgcgcgccgcgctcgaggacgggcagcggctggccgccgaacaggacgaggcgatcgtcgagcgtatcgccggcaagcgcgaggacagccagcgctttgcgcaggtgcgcgccgagatcgaggcgctcacccgcaatccctccaacattgctgcgccgatgcaggccctgcgtgcacgcctgagcgaagaaaccggcattcccgaggccgcgctgcccttcgtcggcgaactgatccaggtgcgtgaggaagatgccgcctggcgcggtgccatcgagcgcgtgctgcatgggtttgcgcaatcgctgctggtggacgagcgccattacgccgaactggccgagtgggtcaaccgcacacatctgggctcgcgcctggtctattaccgggtgcgcaataacgaacaggcgtttgccggccgcgaacccggcagcgcctcgctgctgcacaagctgcaattgcgcgagcatccctttgccggctggctgcggcgcgaactgggcaagcgttttgactacgactgcctggagagcgccaaggccttgcgcacggcagagcgcgcgatcacccgcgaaggccaggtcaagcatcccggcgaacgctatgaaaaggacgaccgtcatgcggtcggcgaccgtcggcgctggctgctgggcttcgacaaccgcgacaagctggcactgtacgagcgcgaagccattgaactggcacaacgcatcgccgcctgcgatgccgacgtggccgagctgcgtgcgcgccgcgaacgcgatgccagccggcgcctggcccagcacaccctggccaacctggcctgggaggaaatcgacgtcgccgcacagctgcaacgccgcgacgatatcgccaacgccttgcgccagctgcgcgaaggcgatgccaacctgcgcgcgctgggcgaggcgatcgagcgcacgcgcggcgacctggaacaggccaagcgcacgttcgacggtgtgcgcgaggaacggatcgcgctgggggtcgagcgcacgcgcctggaaaagcaacgcctgcactgcgccgacgccgatgcccgggtggtcacgccgctgcagcgcgaggggctggaggagcgcctggccaacctgggcgcgcttagcctggacaatctcgaagcgcattttcgccagatcggcaacgccatcgccgagcagaccagcgccagcgacagcgagcacaatcggctcgaacagttgctgctcggctgctttcgccggtatagccaacagtggcccgaagacagtggcgacttcatcatcagcctggccggcgccgaggattttcttgcccgcctgctgcgtctggaacgcgatggcctgccgcagcacgaagcgcgctttttcgagctgttgcagagccagagcaagaacaatctgctcgccttgcagcgccacaccgccgaagcacgcaaatcgatcgcccaacgcctggacgaggtcaacgccagcctggagcaggtgccgttcaaccatggcaccttgctgaccatcgaactcagcgatcggcgtttgccggaggtgatcgacttccatcaacgtctgcgcgatgtgctcggtcaccaccagaccgaacagcgtgacgtggccgaacagcaatttgccgtgctgcgcgaactggtgcgtaagctcggctcagccgatggcgaggacaagcgctggcgcgagctggtgctggatgtgcgtctgcatgtggagttcgtcggtgtcgagctggatgcggccacccgccagcaggtggagatctaccgcagcggcgccggcaagtccggcggccagcggcagaaactggcaaccacctgcctggccgccgcgctgcggtatcaacttggcggcgaagacggcgaattgccgcgctacgcggccgtggtactggacgaagccttcgacaaggccgacaacgaattcaccgccttggcgatgaacatcttcgagaatttcggcttccagatggtggtggccacgccgctcaagtcggtgatgacgctggagccgtttatcggcggtgcctgctttgtcgaaatcagcggccgtcacgactcgggcgtattgctgatcgaatacgacgaacaggcacgccggctcaagttacccgagcgctcgcgcagcgcagccgccgccggtgcggcgcgcgcgaccgagccgtccgccgccgtcggcggagcgagcgtcgatgaactgcactga

SEQ ID NO: 42289 - DNA, 1164 bp, Xanthomonas oryzae pv. oryzicola BLS256
atgatgttgcctgccgctgcgctgctggccttgcgcgggcagtggcagcgcgcacgcgggcagtggctgatcggcgagggcgcaccgcaggcgatcggattgcgggtgccgacccaggcacaggccatcgcccggttcgatgccttcggtgcgtggttgcaggagtggagccgcacaggcctgccggggcgggtggagtatcgcgcggtgagctggacgcagctggggccgcagcgcctgccgcagacctgggtgctggacgatgcgggccaggccgccggcgcgcttggcgagggcgagcgttgggcgcgtgcccgccaacgcagcgcggccttgcaggcgcgctggccgcaggcggtcgcgctggcggcgcggctacgccgtcaattcgatctgctggccgactggccggaggccgagttcgcacgcttggtggcggtggtggagtggctgcaccagcatcgcgacagtggactgttcctgcgccagcttcccatcgccggcatcgacagcaaatggatcgaaccgcatcgcggcgtcatcgccgactggcttgccggcctgcgtggcatcgccgagccgcgcagctttgccagcctgtccggcctgcgcaacgcgccggatcgggtgcgcttgcgattgctcgacccggccctgcgccaccacctcggcggcctggaggacatcaccgcaccgatcgcgcagatcgccgcgctgcgtctgcctgcgcgccgcgtgctgatcgtggaaaaccgcgaaaccggtctggcctgcgaatcgctgccgggcacgctggtgctgatggcgcgcgggtacgccatcgaatacgtgagcaatatcgcgtggctgcgcgaattgccgctgtactactggggcgacatcgacacccacggcctggcgatcctgcaccgcctgcgcacgcacgctccgcacaccaccgcggtgttgatgaatgaggccaccctgcaggccactccgcgcgcgttgtgggggcacgaacgcaggccgcaccgcgcccaacgcctggctgcgctcagcatccaggagcagcgcctgtatgcagacctgcgcggcggccggttcggtccttcgccgcgcctggagcaggaacgtatcgcctgggactatgcctggccgcgcatccaggccgcattggcggactga

SEQ ID NO: 42290 - DNA, 1536 bp, Dorea formicigenerans ATCC 27755
ttgctcttaggggcaaaattcggtatactaataggagcaaatcccgtgtgtttgtgggtgaaggaggaacgaatgaatctgatcagtcggattccgaaggatttttacaaggtattcggaagtaaatatatggaattctatatgcagtttcttgtggcggtttacgaagagagcagccagtcgtattcgcttttggggttgactgagggcgagtgtcaggcgattatgaatgagcagcttgcccgtatgacgttagactggagtgaggagcgttttgatgaggaaggggagcttttgacgcggtcgaacatggcgatgataagtttacggcattttgaagactggggatggcttagacgtgactatgacgaaacgctaaacagctatgtagtatctttcccggagtatagtcagttgtatgtggagttgttccgtaatctttatagtgatgaggacagcaaggagcgcgagagtgtgctggcagtgtacagtcacctttatacatatagttcggatcgggagaagaataatgatatcctgaaaagtgcactgcatacgtcaagatccctgcttcagatgctggcaaatatgcaggaaggaatgcgcggatattttgatgaattatcgagccagcgaagttttttaggaatccaggaagttcttgtaaaggaaatcaacaatagtgacagccagaaatatgcgattttgacgacaaccgacagcttttatcgttacaaggaagcggtcaaagagctgatagagaagaatcttggggaaaatgagacaaggcgcgaaggttttgtggaaaagctccgggatattcaagttcagctggcgcgagaggagcaggagaagtctgaagaacgaaatgtgcagaataagctgagcattcagcgttaccgcctggagcgggcagtgaagctctgtgacgaagcgaatgaaatgttgtaccgcatttccagagagttcgatgccattgagcgaagatacaatatgctgattgagcagaagactgtatttgcaagccgggctgctgcgagaatccggtacattttgatggaaggcgcggtcgaggaagatcagacaattgcctttgtaaatcttctgactcagagtgaaaaatgtgatgaaattttggacaagctgtctcagaaaatgaagctgaccgaaccataccgtgtgatgaacgaaaagagtctgtatcagagacgtgaccggaaaaaagaagcatttgtaccgcaggcggtgacagaggtaacagaacaggcagattcggaagaaatgaatgagtatgttctgaagccgctttacacgcagaaggaaatccgagagttccggaaacaaaacgagcaggatggaaactttattgtgacgaaagacacagtaaaatccatggaagatctggaaaagctgtttcttgtttggcaggatgctacggaagttgcggaaggaacagaagagattgaggtcggagaagaacttgagaacgagaatggtctgagattctctaagcttgtgattaaaaaatctcagtaa

SEQ ID NO: 42291 - DNA, 690 bp, Dorea formicigenerans ATCC 27755
gtgccccaacatcataataagaaagacaaggataagggaaaacatatggtaaattatatggaagaattgtctgtgacagaggcggagaatctgaagaaaaccatttccgcgctgtttcggcagacatgcattttacaagtaaaatacgatccggtcacattaacgccgagggataaccttcactatgaaatctgtgtgagacaccggaaatttatagaagactatctgtccgtacttgggtgcgaactggtacacgacccacaggaacacattttcaggctgaccggggaaggcgtggctgtggaacgtttgaatgtgacggctacgaagatcattcttcttattaaaataatctatcgggataagattctcggcgaaggtctgaatgcgacagtgacgaatctggcggagatccgtgagtatggaaagaacacgaatctgatcaatgagaagctgactatggcagagtggaaagacgcgctgtatgttatgagcaagcatcagatcatcgaggtgccgggcgcgattcagaacgtagaagatcagacgaagatttacatttacagcacaattaatctgtattgcagtggtgtagatattcaggcattgatgaaagaatatgttgatgaggaaggcggtgcagaagttgaagcaggcgaagaagatatttacaagaatgctgatgaataa

SEQ ID NO: 42292 - DNA, 3333 bp, Dorea formicigenerans ATCC 27755
atgctgatgaataattggggcggtgtcagccacaaggtcatggagttccatgagtatgtgaatctgttcagtggtaagagtggctctggaaaatcaacagttatggatgccattcaagtcgttctgtacggaagtatttctgctacatttctaaataaggcggcggacgatgcgaagaaccgccgaagtgtgctcagttacctgcgaggtgcgcagaaagacggctcttacaatcgtgatggacaggacttctgctctcagatcgtactggagatatttgacaccggaacgaaggtgagcacttgtatcggtgttgcattcgaagttggaaaaaatgatactgatatccgaaagtatacatttttcagccattccgggaaaattccggaggacgagtatctgacggagaaagatgtgccatatacaattgcaggactcagaaagcttgtggaaaagcgggtggaatcttcggacaatcgtggacgaggtgatgtgaatcgcctttatccgtcaaaagaggcatatctgaaaacggtttatgatgtgatctttggatatgtggagccggggcgcatgatgaccatggaaaagagtgcgattgcccttcgcatgacaaatggaacgggtcagtttatccgtgattatatgttcccgaagagtaaggaggacacggtttcgaccatcagtgaccagcttggtgcgtaccgtgagatcaaagagcgtgtggaagacctggagaatcggatccatcttctggatgagatcagccggcagaatctggcacttcagacgacgcgtgcggataagatccatgtggaacaggtgttaaaatatattgatattgaaagcttcaagacgaagattgaggcgagaagtcaggatcttatggatatcaatgagaagattcgtgccagagaaaaacagcagaatgagaataatgagaaaaagacacagcttacgaacgcacttgttgaggtagaagcggaactaaaatccagtgattatggtcagaaggagaaggagctgaagagtcttaaggagaccatcaagcttctggcccgcaacagtgagcagtggcgcgaggttgtaaaaggacttgcccgctgggaggaagatgaagagatcagtgcctatgtgagcaatccggcacttcagaggattgatgagatcaagtcgggaaatgtttcaaaggaagcaattgagaagctaaagaaacaactaagtgacgcgctggagagcattaatgaagaagttgatgaaatcggtacaagaatcagtcagaaccgcaaggatttgaaagagaaaaaggaaatggtggaggatctgaaaaacgaccgcaaaccgtaccgaaaagagttgaaacaggcaaggcaggagttacagaaccgtctgagcacacaatatggaagaaccattcacgtcaacattttcgcagacctttttgatattacagatgagaagtggaaaaatgcgattgaaggtcgtatggggcgtgtgaaacacagtcttgtgaccgcaccggagtacgcccttgatgcagcgaaagtatttcgtaagcttcaatatcttggtgggattgatgaagtagatctgttagatacggccgcaattgtgaagtccgagccaaaagttcatgacaattcgatctatgaggctgttcatgcagaagaaccatacgtggaccagtgcctgcgccgttatctcggaagaattgccaaatgcgagacagaggaggaactccgtgcttccggaaatggtgtgacagccgactgttattcttataataattacattttccgtcatttgaagaaaaatgattacgaaaaatatgcctgcattggaacgaaggtttctaaggcaaagcttcgtgaaatggaagatgaggttctgaagctgagtgaagaaatattgcaagatcagcagatgcagcaaagtctgaaagcagcccagggatttgagcggctgaaccaaagcacagatcagattctgcatttggccggggcaggcgaagaactgcagacattttacgagaaacaggatcagctggagaaggaactgagagagcttcgtgaaggaagcagaactgcggaactcaatcagcagaagacagaattagaagtaaaaatccgggaaattgagaagatatctgaacagcttcagaaagaagtactgggctttgccaagacacagggacaggcagagcaggatatcgtgaatttccagaatcgtatggatttcctgatgcagggatttgtgctgaatgaagaactgcagaccgaagtccaggaagcgttaaagatacaatccgagcagacgtaccgacgtaagaagagcaaagaatctgaagatctgatgaagcaggaagaggaagtacgcgatcttctgacccgtgcgagaaatcagttcaatcaggcatatccatcctatggactgacaggtgtagaacacgaaaatgtttcttatgacaggattttgaatcaatgcagacaggactttgagccgaagtataaagatgaatttcagaaacagtatgatttgatctaccatacgcttcgtgaaaatgtaatcgcgacgatccacggtgaaatcaaagcggcataccgtcacaggaaagaaatcaaccgtatgctggcaaagattaaattctctgacagtatttaccagattgatattcttccggcagaaaatgaaaatggacagttctatgagatgctgatggcaccggaattggatagcaaagtgctggacgatgatggtttcgacggacagatcacgcttggcgaagacacattttatcagaagtacgagcaacagatcctgcgcctgacagagaaattcatgcctccgaaagacgaagatgccaagtccttaagccagcaccgtcagcagatggagcagtacgtggattaccggaattatctgaccttcagtatgtacgaacgagtggaagatgaagatggaaatgtgaagaaaaatgcggtcgatgacatggcagggcgtgattccggaggagaaggacagaacccgaaatatgtggcacttctggcaggatttgcaatgctttatatgcagcagacaaaccgcgattccaagataagactggtacttttggatgaagcattttccaaaatggacaaagaacgaagtgaagtctgcttgcactacgcaagagaactggaattgcagttgatcgtgtgcgtaccggacgagcggctgcagtccttgatccgaaatgtggacagtgtgtacggatttagaagatatcagaatcaggtaagtatgatgcatatcgataaaggagaatatctggatatgatagaggggaagatttga

SEQ ID NO: 42293 - DNA, 1401 bp, Ruminococcus gnavus ATCC 29149
atgacagacacaaatcaacgagatacggagaaaattatgcagttacgatacgagatcccggacacattctggagtttgttccgttcggtaaaccgggagatttacatggagtcgctgttggtgatcaatgaggaatatcagtacagtaattattttctgacgaaagaaatctgtgtgcaggtattgagtgatatgaatgcacagaaacaggttttgcttcaacgggaggagaacgagacggactttgacatgttggagacgacagcatcccgcattttacggtggcttttaaagaccggatggctgaagaagatcgaagattacagtacgatgaccacaaatattgtgataccggattatgcggcggtttttattgaggcatttgagcgactcacgtccgaagagctggaagaaacagaattatatattcagaatgtatatgccacactgttttcctttcagaataattccagagtaaatctgaatatgctcaggacggccctgatcaatacaagaaagctgaacaaagcgctgcaggatatgcttcataatatggacaagtttttcgagaggcttttggatcaggagtcttacggagaacttttgcgggagcatctggacgggtatgtggaagaaattgtcaagaaaaagtatcatatcttaaagacctcagacaatttttatatctacaagatggacatcaaagaatgtctccgggatatgcgggaaaatgaagaatggattgaaagcatccggcagaaagcaaaagcagcaggagatacgaaagaggatgtgttagatctgctggatctgatcgaacggggctttgatgacattgaacacaggatctccaatatggacagagagcattccaaatatgtgcgggcaaccgtgagccggatgaattatctgttaagcggagagaccgataccaaggggttggtggtgcagcttctgaataaaatttctgcgcaggaagaaccggagaggctgcttacagaagcgggaaaacggatgaacctgtctttgtttgagatgatttccgaaaaatcattgtataagagaagaaaacagaggacagactttatcagccagatgggacaggatgaagaatatgaagatctgaaccgggaggatgtgctgaagttaaaccggattcagatgcgctacagcagacaggagattgaggattttatcgaagagcatatggaaaacgaagtgatggacgccggaacacttcatattacagaagagacagcatttgaaaaactgatcctggcatatgactacagtaccagaaagaacagtaaatatcgggtattgaatgaggaggagacagtcatccaaagtggacagtatcaatatccggcattaaaatttgtgcgaaggagaccgcaatga

SEQ ID NO: 42294 - DNA, 645 bp, Ruminococcus gnavus ATCC 29149
atgatcgaatattacgaacagctttcggaagaagagcaggacgatatcaaacatgtgatccagacattatatcgtcagacctttcttctggaacgaaaatttgaaaaacggaccgggcggatggttccggtcagggagtaccgtgtatgcagcaagcacagggaatttctggagaaatattttgcagttgccggaatcacactgcaggaaaatctgcatatgggcgtcatgtacatccagggagagacactatggggagaaaagctctccagacttgccacaatctatattctggtgttaaagctgatctatgatgagcagatggcagcagtgtcatccagcagccatatcgtgaccactcttggagcagtgaacggaaaagcgggagaattccatgtgttaagcggcctgccgtccccgacagagatgcggaggactgttgcatttttgaaaaaatatcagattgtggaacctgtggatgtgatggaggagctggatgagaacagcagacttgttatttatccgtgcatcaatacagtgctgcttggagatgatatcagagaactattagagacgttcagcgaggaggaagacagtggagacaaaacaggcgttcaaagcgctctcgaaaatctgcctgaataa

SEQ ID NO: 42295 - DNA, 3357 bp, Ruminococcus gnavus ATCC 29149
gtggagacaaaacaggcgttcaaagcgctctcgaaaatctgcctgaataactggcattacatagacagaaaagtacttactcttaatcagggaatcaatttctttaccggacattccggaagtggaaagtctacagtgatcgacgccatgcagatcgtactgtacgcgaacacagacggaagaggattttttaataaggcggcagcagacgactctgaccgttctctgatcgaatatttaaggggaatggtgaacatcggggaaaataacgaatcccagtatttgagaaaccagaatttctccagtacgatcgttctggagctggagcagacagatacgaaagaaaagcagtgtgtgggagtggtatttgatgttgagacagccacaaatgagatcaatcgcctgtttttctggcataaaagcgggcttctggaaaatcagtaccgggcggataagcgctgcctgacgacatttgaagtcaaagaatatctgcagcggacattttcaaaggaagagtattattgtggtccgagcaatgagagattccgcagacagatgtatgacatttatctgggtggtctggatatcgaaaaatttcctcgtttgttcaagcgagccattccgttccgtatgaatatcaaactggaagatttcgtgaaagaatatatctgtatggagcaggatatgcacattgaagagctgcaggaaagtgtgatgcagtatggaagaatgcgcgggaaaatcgaagagaccatggaagaaatcgggtatcttcaggagatccggggttcctatcggcagtatgaagaaaaacaggaagagacggcgtcctgtacctatcagatttccaggctggaaatcctgcatctgcagagtaagatccaggaactgaatgaccggatgaaagagacacagacggagattgcaggacaggaagcgaaaagagtcaatctggagaaagagcaggcagaacttcagaaagaatacgaagcaataattttgaagattgcggacagtggttatgcagccatggaaaaagacctggagagtctgaacgaagccctggaacggctgcagaacagtaaggcaagatggaaaaagactgcagatggtctcaaagagtggaaagaaaaagatgtgacgccgaatcagaccttgtgggatattgaccggtttgtttctggaaagatcacggaaggtgagctggaacggctgcagataagtctgacacagatccgggaagaactggaagaagagcgtcaggagacggatgccagacttcgcgcagtcaaaaaagaagaaaaagcggcacgggaagaattaaaagagctgaaacagggaagaaaagcctatccaaaagaactggaagaagcgagatatgagttgagaaaccggctgcatgagaagtgcggcaagtttgtcaatgtgcagattctggcagatcttctggatgtgcgggacgaacgctggcacaatgccatcgaaggatatctcggaaacaacaagctgcttctggtcgtggaaccaaagtacgcgaaaactgccatggaaatctatcaggacatggataagaagaaatttttccgggcagcagttctggatacagaaaaagtacaggagacagaatgggaagtaaaagaaggagccctggcacaggaactgatcgcaaaagagccgtatgtgcaggcatacatcaatttcttcctcggaaatgtcatcaaatgtgaaagtatcgaagagcttcgtcagaaccggatcggaatcactgcagactgtgtgctgtaccacagtttccgtctgcagcatatcaatccggaaaattatacgagaagggcatatatcggagagaccagtatgcgtcagagaatccgccgtctggaagaaaaatgtgagagtcttcaggaggaacggattccactgcaggaaatgctggaagaaatccgtaggatctctcagctggaaggactgacacagcctctggaggattacagacaatggctgtctgatctgcagaaaattccggcaaaggaggcagaaaaggccagacttctggatacaatgcagaagctgcgagaggaatccgttctggtgtgggagcagcagaaacaggaaatccagcagaagcaggaagcaaagaaagcagagattgaggcagttcagaaaaccatctggaatcatcaggaaaacggaaaacgattccagaacatgcaggtagattttaatgaacagttagtgcagaaagaaaatgaattccggcagcaggacagagaaaaatatgagccggaatttcaggagtatctggagggcagacagagccgcaattatgagtacctgatgcgggaacgtatcaagaaaaaacagcctttggaagatgcgcaggaaaaagcatatgaaaaactggtagaagcaaggagtgcatatcttcgaaaatatccgaacagaacctattctgcaacgatccgtgacaatgacgtgtacgaaaagcagctttcaaatcttgagtgcgataacctggaaaaatacagggaagaagcacaggaacaggcgagagcagcagtggaacactttaaagttgattttgtatccaagattcgttatgcaatcaaagaggcatatcagaaaaaagatgaattgaaccggatcatcagccgtctggatttcggaaaggacaagtatcagtttgtcattacgaaaaacaaaggtccggacggacgattctatcggatgtttatggatgacgcattggatatcaatccgtctcagttgagtgaccacatggaaaatcagatgaacctgtttaccatggagcatgaggaagaatacggagatctgatgaatgagctgatcgagattttcattccgccggagaatgccaccagggaagagctggaggaagccagaaaaaatatggataaatatgcagattatcgcacgtatctttcctttgatatgcagcagatcgtgcagggagaaaaggatatgcggatcggtctgagcaagatgatcaagaaaaattccggtggagaaggtcagaacccactttacatcgcgcttctggcaagctttgcacagatttacagaatcaatctgtctccgaagatcaagcgtccgccaaccctgcgtctggttgtcctggatgaggcattttccaaaatggatgcagagaaagtagcaagttgtatttctctgatccggggactgggatttcaggcgattatcagtgcaacaaatgataaaattcagaactatctggaaaatgtagacaagacatttgtgtatgccaatccaaataaaaggcatatttcaatacaggaatttgaacgaatggagtttgaacagctgcaaggggaagaatga

SEQ ID NO: 42296 - DNA, 1260 bp, Ruminococcus gnavus ATCC 29149
atgatgacgtggatattgggaaaaattgtggaattgctggaaagtggtgaaacaaactggcgtacagaaaaatgcggaagaaaaacattgaataacagcgccaaaagcgccagtgaaataccacctttgtatcaaggctgttcacgggaaaaagcaatacaggaagcgattgatctgcaggaaaaaggactggtgaagatcaactggctgatccgagggagcgatatcaaaagtctggtgtttcatctggaagacagagatcagttctatcagttgtatcgtgaaaacgtaaaaccgaggtttattcccaaacaacagagattgtggaagtatcaggaatttttgagaaaagaaatgtctgtggttcaaaaaccatggatccggagctactatgtggatcttctggaaaaatctgagaaaaataatggaaactgggaaccggatgaaagactgaaacaagtgcggcagtatgcaaaatgctttcgggaactggataaattgcagaaactgacttatgcgaaagtatttgcgagcaattctctggagggatccaaaaatttcacgaaagagatgaaacaatatgtcatccgtcaggccagaaaaaccaatccagacagaacaaagcttttggatgatatagaagttttggaagagattgtattgattcgagactgttatcagagtatgtatatcaaaggagaattgctgctgtattttgtagatgacagaggaagaacagccgctgttaatacgaagatttggaaatatggaacaattctggagggagaatcattattgcatgcagagctggaaccagagcagccacagatacaaaaagtgattatctttgagaataaaatgaattttgtgatggcgccttatgaagaaggaacattatatttatttgtgggtggatatccgggaccgaaagtttgccggattttacataaactaaataagatttcgaaaaagagacagcgccatatagatgtatatcacagtggggatctggattatggcggaatccgcatttttcaatacgaaagaaatcaggttttcccggatttgaaaccattacagatggatgcagatacttatttacagcatcagcagtattcgtatccgattcgggaagagacaaaaagaaaactgaaaaaactggaagatggaaatgagcagatcaaacagctgttggaacttattattcaggaaggcagagggattgaacaggagagttttattgaggtagatctctgctga

SEQ ID NO: 42297 - DNA, 1938 bp, Burkholderia pseudomallei 305
atgcgaaggccgatttgctggcggcacgcttgtgtagccagcgagaagaccgcgggagatatgggggcaaggtcaagtcgcaagtcctccaccgtcgctccaaccccgggagtgctggccttctggatgaggtgcaaatattcgtctggcgcgcttcctgcgaatttcggcttgaacgcgtcagtgccggtaattggtgcgtgcggtgtcactcgcgtgacgacgtcgccgaactcgctcataaacgcagacagcaatcgactggcttggacagcttggatgccgaagacttcgcgtacgcgcgcgttatcgagctggccttcccaacgcaacaaaatttccatctcgcgaagacgttgttcggcaggagttagcggtgtccgcatgaatgttatcttgtgtgataatttatcttgcaagataataccgcaaaactgcacagaagccctacccgagggaataacgttgaactcatcaagtctttcgccggcaccgagggccggtgcgtccaacacgcccgtgttcttcgacgccgaacggcagaggttttttcgtccgctcaatagctccaggcgtgaattagtagcggcatgcttgcgtgcactttatgaccgcctccatgggcccgcagccgactatgcgcaccaccttactcgagacgtccttcgcgaactactgctgccggttgttcggcaataccagactacgctggcggatgacggctccgacgatgaattcagcgccgtcgatgcgagcgaccctcaactgctggtcgccatggtcattcgggcgctcgtcgcagacggttggctagagcagttcgctgaccggactggcttggttgcagcttttcgtttttcgcgtcccggcaagcttttttcggaggcgctttgggcattggaccgcccaagccgaagccggcagcgcaacatgcgcgggtgccgcaatgcgctcgaggctgcgttgtccgaacgaggcgacgcacatgacttggtggatgcctacgaatacgccgagaaggttatcgaggacctcgcggacggcatcgattactttcaagaactggtccggcacttgatgcaagccgcgtctgctcatacgcaatggaacgaattcgttgactttctcgacagattccagcgggactactccaagcaacttacagcggataacgcgacgctgaaccgccaagccattcggcaaaagcttgagaaactccgggccgttccggaggcgaagttcaatcgaatggacgcgcagttgcgcgatatcgcgcactggatggcgaaggagtacaccggaagctcgctctatgattggctgctcggtcgtattgaagacatcgtagacgcggcgtgcgagtctaagcagccgggctttctcaaggccatggagacttatctgaagcgtgtgaacggcctcgctttgcagtcgatgatgctacgctcggggcagactcggcatgcctacttagcagccgttcagaaagtggccgagtctcccaagttggaacaggaccgcttgctgaagcttgttggccagttcctcgcaccagcggaggtgcgcgtcctagacccagctagcttcaagctgaagactgcaacgcagcgccgcagagcagtaaccgtgtctattcgaccgcgcccgacaagggaagagcggctcgctgcggcgatggcgcgagcagaggccgaagtgttctcaataccgaacgaggatgtcgcgcaggggctgcgtgcggacctgcgactcttccaacatccaatccgcgtttccgcaatgcctacggcaagtgcccgcgacgtcattcgcgcaatgcaagcggtggaagccgcgcgaagcgccatcggcggggacctcatcgtcaagaagctgccgacccgtttggagaatgagttctacggggccaacgactacgaaatcgacctgaaaaaatga

SEQ ID NO: 42298 - DNA, 672 bp, Burkholderia pseudomallei 305; identical to SEQ ID NO: 42091

SEQ ID NO: 42299 - DNA, 3633 bp, Burkholderia pseudomallei 305
atgaagctcgaccgcatcgttctggtcaactgggggcagttgcggccgggcgactatgaccttggaaacatgactcttcttaccggcccgacgggcgccggtaagtccactatgctcgatggcctccagaccatcatgactgccgcgtaccagggtatcgtcgcatacaaccctggccaagaagaggtacagcaggggcaacgcagtgggaagtccaagcgcaccttggagtcatttgtcgtcggtgctgagtacagtcgtttctctcgacctcatggcgcgcacgggtatatggcggctgtgttccgccccgggcccgatgaggactcggccaagacctttacggcgctcgtcgccgcatcggcacaggtggatggcatcggggagcgcagggttccgaagctggagcgactcgaactagttatcgtagacgacgccgcgctgaccgttgacgattttctaaaggacgcggagcagagcgagtgggtggctgtcgaagaaatcgtcaagcgattgaaggctcggtattcgaaggtggtgacctatgacgggcataagcgagactacctttgcgcactctacgggcgcttccgggggcgcatctcgattacctgggatgaggcccagaacgctgcgaaggcttggtgccagtcaatagcttacaaaaaaattggctcggtccacgacctcgttcgcgatgacattctggagtatgacggcaagcagttgcaggagagcatcactcgcatcagcgacctgatgcgccaagtcacgaacctgaagcaagaagggcagcgactggaagcgactgttgggcggttgcgagggttgaagactgctatcgcgcaaacgacgtcggcgtttgaagagcaagtccagtatgacttgctgctggccaagatgctggtggcggcggacgacgaacgtatcgcccaagagcagaaacgcatcaacgatgactcggcactggtaacgcggtgcgagcaaaaggtaaaagccgaggagcgactgaaggcaggcgtggaccggagccgcatcgacattgcagcgaagctcagtggaatcgccgccaacgccgagaaagagcgcctggaccagcagctcgagctcgccaattccgcagctcggcacaaactggctgagctcaatactgggcttcaagaggccgcccaaatcgtcaatgcggctaccggtttgttgcggaagcccattccggagcagttccccaagctcaaggcgtcggttgacgcggtcggtcgagttacagcatcgactgacgttgctcgcttggacggtctgttgggcgctgtcctcgatgcctcaagtgatgcgcagcttaacgtcgagaagctgttccgattgacccctgcattcgctggtgtggaagagggactcgccgcgctgcactcatatctagtggggaccgaagatagtgtcttgatggctgttgcgtccgagacgtcggaattgacgcaacgtgtcgaagccactcgcaaggcgcgcaaggaattggctgaccgcaaggagctgttggcgagcggcgctagcgattacaaccgcgacactcgcatggcgcttcctcgcatccgagagtgtctgcccgaagctggtgtccaagttctctgcgacctcgtcgaacctgtgtcggatgaatggcaggaggccatcgaagggtacttggacaatgcccgcttcaatctcattgtgaagcctgagtgggaagcacgaactatcgatttgcttcactcatggggctcgcgctgtaaggtcatccagggtaaacgatgtcttcagcgtgccgatgccggtcgtgtgccatctgactctatcatccatgagctccgcactgaccatcccattgcacgtgcgtatctcatcgagcagtatggcgccgtcgtcaaggtcagggactccgagcaactgcgcgataccgcgcgtgggttgaccaaggacggcaaaggaagcggttctcgcactatgtttgttggtgagcggcgggaccttgttcttgggcgcaaagctcgcgagcaggcgctgcgggctaccatcgagaaactcgatgcggcagaccgaggaattcgagagttcgagcaactgcaggatacgctgtcgagcgttaaacggcttcttggcaacctgcgtgaacccgtattcgatgcgatgccgcttggccaagcagcgggcgaaatcgacagcactcggcgctcgcttgtgcagctggacctcaccgaggtggaacagttgcgggcggagcgagcgaagctggaactgctcatcgcagggcacgatgcggaaattaccgcggtaaacaaagagattaccctggcgagtcagcgtatcacggacgcccaaggcgccattgagcgcatcaatggaggccgagacgcgcgatttcgggagcgtgaagaccagattcgtcggctcgggcagatgtgcgaaacaaactcagagaaaacctacacggttattgccgaggaagtagagggcttgctcaaatcccggaggtttgacgtgcactccgttcaggtgcggctcaacacgctgcgcgcgcagccggacaaattgctgggcgatgtgcgggaaatgctcgcggagtacaacgcgaacgcgcgccaagaggagcgcttccagtcagcgctgcctcatctccacgacgccaccatgttcgacccgtactatggcccccttattgcgctcggccgcgcggtgggtgcactccacagcgagcttgagggcattggcctctacaacaatcgggccaaggtggaagaagcggagcgctctttccatgacgtgttcaccaagcagttttgcgtcgaaatcaaaagcaaggtggatgatggcgtccgactgctacggcaacttaatatggagttggaaaggcttaagttcggcacggaccgcttcagcatcgactggtcgaagtgggagccggagttccaggagtactacagcttcttctcggccgtcaccgaccttgcggactcagtcgaaacggtcgacctcttcggagagacggagctcacgccaaagcacgtagaggtacgcgaccgcctggtgaagctcctgctcgactcagaccaagagagagcggggcgggagctattgcgcattgccgactatcgaaactacaggcgctacgaaatttggaatgattcagacagtggggggcgcatcgcgctttcgacatggggcacggggtctggtgggcagcttgagacgccggcttacatagttcgcgcggccgtggtgacgaaccggctaaagttcttcgagaagggacccagcctgaagatgctcgttagtgacgagtcgttctcgacgatggatgaacctcgcgctcgggccgtgctgcagtacctacgcgaaagcctcgatattcaggtcatcagtgcgatgccgacacgaggcgctggtggcttacggccagagttcgaccgggagtacagctatagccgggttcctgttgacgctaacggcgaactcgacttcatcctcgaatacgacgagcgcatcttcaagaaggacaagatgcgagagctctgggaaaagcagcgggcggcggcccgtgcgcaggccgagctggcgtttggcgccgccgaggccgcacagcaggcggaggcgcttaaatga

SEQ ID NO: 42300 - DNA, 1533 bp, Bifidobacterium dentium ATCC 27678
atggaaggcgaatcgccattggctgacgtgagacgagaaatggagcggctacggcccgtgtacgagaccggcgtgctacgactcctgctacgcggcaattcgatgttgtacgtcgcattgctgcgttcctcgttcgatccgctcaccggcgaactgccacgcgatgtattggaggagcgtatctcacgcagcctgtcgcggctggccgaaaccggcgattatacggtgaaagacgaccagacggtaagacaggccgcgcatgcgatcctactcgaactgtcccgtgaaggcgatgatgactacgcctggctcgccaattcactggatgtcgcctcgcaccgttacctgtaccgtctgacggctcgcgcacatcgtgcgattgaagcgttgcatcgactggaagacaccacgcaggcgttatccggcgcgcaagccaacagcatcatcatggaaatcgaacacgcacgcatgcaactgaccgccgacccacgtgaacgcatcaaactgctcaggaaggacatcgaggaacgtcaaaaagagatcgacgagcttgaacgcaacgaaaccatcgaaagactgacttccgagcaggtcggcgacatcatcaacgtcatccacaacacgcttcggggcgtgccgatcgatctgcgtgaactggcgctcgccgaacgtgacaacggcgacgcgctgcgccggcgcatgcagtcgggtgccatgagtgtggaagacatccttaccgcctatcatgacgaataccgtaaatcgttccgtgaatccgacagcggcagacgcttcgaggacgccttccaggtgatcgtcaccgacgaaggacgtcaggaaatcgacgatgccgtacgtgacatcgccaaaaacccgtatctggacggtgagccgggcgcgctgctcggtcaggttcgtgccgaactcgaacgcatttattcgggcatcgaggatgtgcgcaggcagacccgcgcctccgatgaggcaatcagccgactcgtccgccagcagaccgacacccgctaccgtaccatgctggccacattgaaccagctgtttgccaaaaccaacgccgaagccaaggcgagtccgaacgccacggaccggccatatcacactgatacgggtctgtcacagattgcggtattgcctaccaagccggccaagaccatggtacggaacgccaccgcggcactgaatgacagcgctccaaccgtcggcctgcccgacctcaaggccatgatcgaagtgtgcggaccacgtctgcgccacatggtcgatctgattcatcgcaaccccgtcatgtcacatgacggcacgcgcgtggactttgcggcaagctttaaccgactgccggccagcgaacgccgagaaagcgaaatcatcggcttcctcagcgcgttacgcaccgaaaacgacatggcatgcgccacctggaactgcgtatcgctcgacggcacccccagaacatggcgaaccagaccgatactcgctaccgcacagacgcttgatgacatcatcagggaaggctga

SEQ ID NO: 42301 - DNA, 708 bp, Bifidobacterium dentium ATCC 27678; identical to SEQ ID NO: 41971

SEQ ID NO: 42302 - DNA, 3510 bp, Bifidobacterium dentium ATCC 27678; identical to SEQ ID NO: 41972

SEQ ID NO: 42303 - DNA, 1575 bp, Bifidobacterium animalis subsp. lactis HN019; identical to SEQ ID NO: 41902

SEQ ID NO: 42304 - DNA, 810 bp, Bifidobacterium animalis subsp. lactis HN019; identical to SEQ ID NO: 41925

SEQ ID NO: 42305 - DNA, 3498 bp, Bifidobacterium animalis subsp. lactis HN019; identical to SEQ ID NO: 41904

SEQ ID NO: 42306 - DNA, 1221 bp, Bifidobacterium animalis subsp. lactis HN019; identical to SEQ ID NO: 41905

SEQ ID NO: 42307 - DNA, 1512 bp, Dethiosulfovibrio peptidovorans DSM 11002
atgcaattggagtgtagttacatccatagtctaacatacaggaacttctggaaggggatcttgatggatcttgactaccgaactttagagtatcttcggcaaaaccatccggcctggcgcttgcttcgggcacagaacgctcctttgatcgccagctttctctacagggtgttcgtagcccccaatattagggttatctctcagagcgatctagcggagatgctggaggacgatctttttgtactacgacaaaacgctggaaccgatcgtttcccaggtacggctttggggtatcttaacgactggtccgacaacgataaggggtggttgcggaagttctatccctccggaaccgacgagcctcatttcgacctgactcctgcgactgaaaaggccttggtctggcttgaaagtttgatcgagagggttttcgtaggtaccgaatcccgacttttaacccttttcgagctgttgcgtcagatgagcgagggaacagaggctgatccggatataagggtggcggagcttagaaagcgcagagatgagatagacgatgagataggtcgtgttctttccggagaggtttcccttctggacgacactgccttgaaggatcggttccagcagttcgtccagatagcccgggctcttttgtcagattttcgagaggttgaacataattttcgatccctcgatagacgggttagagagcgtattgccctctgggatggctcgaagggggctttactggaggagataatgggagaaagggacgccatctcgagctccgaccaggggaggagctttcaggctttctgggattttctcatgtctcagtccaggcaagaagagcttacctcctatctggatcacgtgttgtctctggatcccatagctgagatggagccggaaccgaggttgcgaagggttcactacgattggctcgaggcgggagagcatgcccagaggacggtggctaggctttcggaacagctccggcgttttcttgacgatcaggcctggttggagaatcgccgtatcatggatatattgcacagtgtggagagccacgctgtggcgttaagggacgaacacccctcggggggttttacctatatggacgaaacctctcctactgtagatcttccaatggagaaaccgctctataaggcgccgtttaaacctcttttagatcaggtgatactggaggaagggcattccgatttggatatggatgaactgtactcccaggtgattatcgacagggatgctttgtctcgaaatattcgaagagagcttcagactagggggcagatcagtctgggggaggttatcgccctcaatccccttcgtcaggggctgaccgaactggtggcctatctcgatctgtcttccctgtggccctacgtggtggtggacgaggaagagaaggagaaggtgtgttggcggaacgaggatggagctttccgaagcgctatcatgcctcggattatacttgcgaggagcagatga

SEQ ID NO: 42308 - DNA, 585 bp, Dethiosulfovibrio peptidovorans DSM 11002
atgaactgtgccgaaacggagtctctttccagcgttgtgattcccctgttgaagggggtggtttatcgagacgagaagcccaagatctgggaggatcttctcaggcttcagggttttgtccgagattatgtaaaggtcctcgggctggagctgaacctggacgagtcggaaggctacgcttttttgggctctgtcgaggaggaagagggggcagatcgtcccaggctggtggcgagacgacagctttcctatccagtaagcctggttttggcgttgctaaggaaaaagttggccgagttcgacgctggaggcggcgatgtccgtcttatactgtctcgggacgacgtggtggagatggtccgtattttctttcccgaaggaagcgacgatgtccgtctgatcgacaagatggactcgacgctgaacaggatagccgatatgggttttatccgtcgactaaagggcgaggaggagatgatagaggtgcgtcggattatcaaggctttcgtcgacgcccagtggctttccgagtttgatcgacgattggacgagtatcgtcagaggctggtggaagacgatgagtga

SEQ ID NO: 42309 - DNA, 3369 bp, Dethiosulfovibrio peptidovorans DSM 11002
atgagtgagcctttgaatctggagttcatggccgacgatagtcttgccgggttcagacttcagcgtttcgaggcctttaattggggaaccttcgacggcaaggtctggacgctccggctggacggaaaaaactgcctccttacgggaggcaatgggtcgggaaagtcgaccctggttgacggggtgaccacattgttggttcccagccatagggtggcctacaacaaggctgcgggaggggacgctcgagaacgcactcttcgatcctacgtccgtggttatttcaagtcggagaggcaggaaagcctgggcagcgtcaagcctgtggctctcagagacgataagagctattcggtcatactaggggtttttcgtaactccggctacgagaagaccgtgaccttggctcaggtgttctggacgaaggatccctcggcgcaacccgccaggctttacgtcgcctgtgaggaagatctgtctattctcggtgatttttccggtttcggaaaggatatatcggatcttaaaaagcgtctacgccgggcaggagtgaccaccttcgacagttttcccaattatggaggctggttcaagcgtcgtttcggcataaaggacgaccaggccctcgatctgtttcatcagacagtgtctctcaagtcggtggggaatctgaccgattttgtccggagccatatgatagagcctttcgacgtggtttcccggatagacgcactgataggccatttcgagagtttgaacagcgctcacgaggcggttttgaaggcgaagcgccagttggaccagctggagcctctagtggacgattggaaacgtcacggcaagcttgccgattccgtcagggagctgagggaatgtcgagaggctttgcaaccctggtttgccagcctgaaagtggatttattggagaggcgacttgccacacttcgaagcgagctgaataggcatggcgccgccgtggtggatctggaggagaggcgacgtttccagaagaagcaggagatcgagcttcgtcgcagtatcgccgaaaacggtggcgatcgtctggagaggataggtcaggaaatagccagggatcgagaggagatggagcgccgtaagatccgggagtctcgatacagggagttgattgaggtcctggaggaatctcctgccacagatatggaggcttttgtaaggcagaggcaaggtctgtccgaattgagagaggaatacgatcggaccgatgtggagacacagaacgagttgaacgagtttggagtggctctttctcgggagagggacgagttccgtcgattgacttccgagatagatggtctgaaggctcgccgaagcaatatagacgagaggcagatagccataaggaagactatctgcgatgctctttctctgtccgaggaggatatgcccttcgtaggggagcttgttcaggttcgggaggatcagagagactgggaaggagcggcggagcgcctcctccgtaatttcggactctcccttctcgtccccgaccggcattatgcttcggtggaggagttcgtcgacaggacgtctttgaaaggccgtctggtatattttcacgtcagggatggtggcagttccggtgtaacctctctcaagcccgattctctggtgcataaacttcaggttaagcccgattctcccttttacgattggcttgagagagagttctcgcgaaggtttaacctgatatgttgtacctcgtcggaacggtttcgccgggagatctcggctattacccgttcaggtcagataaagaccccgggaggtagacacgaaaaagacgaccgtttcgatttgaacgacaggagtcgctacgtcctaggctggagcaatcgggaaaagatcgccgccctggaggataaagcgcgagcccgttctcgtcgtatgtccgagttttccgctgaaatgaaggtcttgagcgatagacgggaggttctgaaggttcggctccaggccctgtcggggcttttcgagtatcgggatttcagggagatcgactggcgttctgttagcctgtccatctccaagctggaggacgagagaaaggttcttgaggcttcgtcggacaggcttcgggttctgtcctcccagctggtgacccttgaggcggagatatctaaaatcgaagatctgttgaaggacaagtacgataaaaaatccagaacggaggagagaatcacctcggtgggggagtctttggaggcggttcatcagattatggaacaggccgacgaggatttggttcggcgttttccctctctggagaggatgagagacgatgcgataggaaataaacctatcacgttggattcctgtattgcgagagaacaggagatgagagcctggcttcaggccaagatagacggagaggacggtaagatcgcgcggcttagggagaaaatagttaaagccatgacggaatacaggagagagtggcccctggataccaaggatgtcgacgccgacgttggttccggaggggatttttcgtccatgctggacagccttagatccgacgatttacctcgtttcgaggagcgctttaaggagttgttgaacgaaaacaccattcgagaggtagccaactttcagtctcagctgagcatgcagagggagactatcaaggagaggatcgatcttatcaatggctctctttttcagatcgattacgatcaaggtcgttatatacgtctagaggctcagatgactcaggatgccgatatccgagattttcaaggcgagctcagggcctgtaccgaaggggctctcaccggatcggaggaatctcagtattcggagtccaagtttcttcaggtgaagcggattatcgagcggtttcaaggcagggaaaactactccgatatggatcgcaggtggacttccaaggtcacggatgtccgtaattggttcgttttcgccgccagcgaaagatggcgacaggacgatagcgaatacgaacattacgccgattcggggggaaagtcggggggacaaaaggagaagctggcctacacggtcttggctgccagtctggcctatcagtttggtctggagtggggggccgtgcggtccaagtctttccgtttcgtcgttatcgacgaggctttcggaagggggtctgacgagtctgcccggttcgggctcgagctttttaaaaaactgaatctccagcttctcgtggtgactccgctacagaagattcacgtgatagagcctttcgtatccgccgtcgggtttgtccactgcgaggatggaaagcggtctgttttgaggaacctatccattcaggagtatcacgatggcctggacgactccggaagagcttag

SEQ ID NO: 42310 - DNA, 1182 bp, Dethiosulfovibrio peptidovorans DSM 11002
atggcctggacgactccggaagagcttaggtcctatgtccagcggctctgggatagaggtgtcatcttaggggctaccgtcgtgggagagtctctcttccctaggcgattacctctaaaaaagcctacctccggtgaactcagtggcagcttcgattccgtccgtcgctggatatcccttttatccgagggggagggggattacagggtggaatggcgtaccgtcaaccacaggattctcggggaaaacagagttcccttttgtgtatgggtggattctttggaagatgcattgtccatgatagggaagaaacgtgctttccgcgatttttcccgtcttgtagattccacggaagaacgatgtcctcagcttatatcttggattgccagaagaccgttacaggctttggctctttacaaagattggtctcttctattggatttagtggagtggatgatagaccaccccaggccctcgatttacgttcgacaggtggatttgccgggagttcacagtaagtttatagaggggcatcgttccgtcttatctgagcttttcgatctggtcctttccaggggcgttattgaccaaacggctacaggtgccagcggtttctgtcaccgatacggttttcgggagaagcctcggatggtgcgtttcagggttcttgattcggcgttgtctcttccctacgccgggccggatcaggatgttaccctcacgaaagaagcatttgcccgtttggatctagacgtttctaaggtgttcattacggaaaacgaggtcaactttttggcttttccgagggtccccggcggtatggtgattttcggtgccggatacggtttcgacaatttatcctcggcagtttggctccggaacaggcaggttttttactggggagatctggatacccacggatttgcgatcttaaaccagtttcgatctgttttcccaagagcgagctctttcctcatggatcaggaaacccttttgaggcatcgtgccttctggggtttggagacccgaccggagatctgcgacctccctcgtctcacggaagaagagaatgctctatatcgacgattagtggagaacgaatggggagataggatccgtctagagcaagaacacatagggttcggctttcttatcgacgggctacggcggttaggttcatag

SEQ ID NO: 42311 - DNA, 1419 bp, Chthoniobacter flavus Ellin428
atgcttggcagtcggcttttcacggaacttaatgcgcggttctttcgcatccttacggggccgaacgcgcgcttgtacatcgacgcgctcgatgccgtggagcgggaaatgccgagccgtggcgatgcgctcgaatacgccgaaaccctggccatcatcgatggcgtcctcgaaaatcgccagctcgagccggaagaagaccccgaacctgcggacccggcgcagccatccagcatcatttatcgacggctgctggcggccggttggctggaggaagaaaagcattccgactaccggcgcctggtctttctcgatccggccgcgcagaccttgctggaagcattccggaccatcatcagccaaagtgtcgcctctttcaccggtcgcctgcgactggtctgcgaccggttggccgagctgcgagcgccgcattcccgcatggagttgatctgggaggagttgaaagcctgcctggcccagacgcgttccggcttgcgcgaattgcggctcattcgcaagcaggtggaacgctacgcgcaacggcaattgaaggcggtcaccatctcggaagcgctggacctcatctacaatgagttttcgcagctcatcacccagcgctgttaccgggagttgatccacgcccggctgccggagcggctgcgggaagccatggccggtctcgccgaactcgagcaggatgatctcgccctgcaacggctgcgcgaagactttgtgcgcacccagcccgacgtggacgccggccgcgccatgacggaaatcgtgaatacgatcgaagcgctctcctttgcgctcggcgatgtcgaacccacggccgatcgcgtggatacgagtacggcggacttcgcgcggcgctcgcgctcccgcattcgctatatccaggatgtgggttcggcgcggcgccagcaggtgaagaccattttcgattacgtgcgcgagcatttgcccaccacccggctggccgatctggaggaaaagatcgcgctacccgccttggcgatcgccgataccgggctgctcggcgtcgcttcgttgcgcgcgcgccgcgaggtcgctccccgggtccgccgccggccggtagtcgcggaattgacggaagcggatcgggaggaaagtctgcgcgagatgcaaagcaacctgcgcaacgcgctccgcctcgatcgggccaatcatttcgtggagcgccacgatctggcctccggtcagcggatccgctccagcgaaatgaaaatccaatccgaggacgacattctcgacgtgatctcctgtcttgtctttgcgccggcgggcagcaccaactatcgcctcaccaccgatcggcaagccgacccctcggcgccggtcgcttttgacgcgaaggccggtttcgagatcgaacggtttgaaatcgaacgcaaatga

SEQ ID NO: 42312 - DNA, 627 bp, Chthoniobacter flavus Ellin428
atgatcgaagagctgccatctgccccgttgctggggaagtttctcccagagctatccgactcggatcgcgagcaactccgcgccacggtcagcgagctattctcccgccaggcgatcctgcgcgatctgcccggcgaccgtgagctctacgactggggccggacgcacttcacgtgggtgcgcgaagtctgctcgctcatcggcttcgacgtggtcctcaacgaagacgaccaaatgctttacgcgctgccgtgcgaacgaacgaccttgcggcgcttgcgcgcagagtggacgctggtgctgctcagcctgtggtacgatttcgatgtgcagcttcgcgccgagggagcgcccgtcatctttacggtggaaacgtttaatgaatccttgaaaaccaagctcggtgaccggcagccgacgatctccgcgttgcgggaaatcctcgccttctttgcctcgcgcaaactcgtgcggatggagtacgcggacgaatttcatcgttcgcggatcgaggtgttgccgacgattcgcttcgtgttgcccttcggcgaaattgaaaaggtggcgacgatgctttccgagctgatgcacggccccacggaggaggcggaggcggagcatggctag

SEQ ID NO: 42313 - DNA, 3351 bp, Chthoniobacter flavus Ellin428
atggctagtcgttgcattcgtctcacccgcgcgcacgccatccagtggtttggttactgcgacaccttcgatgtgcacgggaatatcctcatcgccggccgcaccggcgccggcaaatcggtgctgatggatttgctgcagttggtcatcatcggtgaccagcgcgcgcggtacaacgccgcgagcgatgggcgcggccaaacctcgggccgtgacaagaagagctattgcctctgcgacacgcaggaggatgtgaatggcgtcccgcagtttgcccgcgagggcggcatcacttatatcgcgctggagttcacctggccggacggtgagacgtgcgaaacctggggcatgcgtatcgagtacgcggacaccgagacgcaaactccggaggaagaattcttccgcattccggcgcggctggaacgcagcgatttcgtgaccgccgatggcttcgccctggagctcgacggcttccgcctgctgctgaaaaaacacgacggcgagacctatcgcaacgtcaccgaatatcgaaagcgcctggcggatcacctgaactttcaccgcgagaccgtcgacttcctgatgccctcggcgatgtccttcgcctttctgccgaagttcgacgagttctgccgccgttacattctgcaggccgaggatatcaaaaccgagcccgtgcggcagagctatgcgagttatctcagcatcaccgcggacctggccaagctccgcgacaagcgggatcgcctggaacgcgtggtcagcacccagcaggagttggaagacgccacgcgagacagcgacgtctatcgtttcctcgaggcggaattccgccgcgaggcggcccgcgcggaaaataccgagctcgagaaaaagctggcggagatcgatcggcgccaggcccggcaacgggaggagtacgattcggtgatcgagacttttgccacgaaaacgcaggacctcgaatcgctcaaaaatctctttcgcgacgaaggcggaacgctgctcctggagctggcggatcgaatcagagcggccacggcaaagatcgagcagctacagcggatcggcaaaacggtggaggaagaaaaagcgcggcgcctccgcctggcgacggcgtttcaaaaagaagcggccgccttccttgcggagcggaacagcggcaagaccgccgagctggagcacgcgctgacgatcttgcgcgaggcgcggccggatgatttgaaatccgccctgcaccagttggccctggcgatccgcggtgtggccgagcgactccgcacgtcgatcaagggcgagagcgagacctatcaaaagacgaaaggcgaactgcagggccttcaggaacagctacgcaacctggacttcaaccgcatcgtcccctcaccgctgctcgatgagttgaacaagcggctgccgcggcgcggacgggagaacccggctcggcagctccgggaattgtgcgaggtgaacgacgaggattggcgtcccgccgtcgaactcgcctttgcgcgcaagttcgcgatcgtcgtccatcgcgacgactacggcgaggcgctgcgcatctacaaagacttcccgcaggacagcgaacgcgaatcgctcgtcgatcccgagcgcgccctcgcccggcaatccaccgcccgcgaaaactccctcgcgcggaaactcgaatgcgccgaccccgtagcgcgcgccgtggtggacgaactcttcggcaatgttatctgcgtcgatggcctcgatgatttgcgcaagcatccggacgcgatcatgcgcgacggcttccgcctgcgcgggcttttcgccgaacggccgcggcgctacgaccagcgcccatgcatcggtagcaaaggtctcgaccggctaaaggcgcacctttcggcgcgagcggatgaatgctccgcccgcctgcgtcacatcgaaccattgctagctcgggaggcgaaactcgagagctcgatcagcgagcaccgcctggattccgaaaatatcgaggccgacctcgcggcggcgaaacaactgggtgagctggaaacggaacgcgcccggctcatccagcgcaataccgatgccaccactccggcgctcgaagagcggatggagacgatcacccgcctggacaacgaattgaaggtcctcgaccgacgccgtctcgatcttcatggccgcctgcagtcgagcgaacgcggcgatgccgagaccaaactcgaggacgcgcggggaacccgggaccgcgcggaaaaaacctacgatgccgtcgtcggtgaagtcggcgaaaagctggtcattgcccgctgcgacgagttgcgcacgcaattgcgcaacgattgcggggcggactccatcgcggcagcccgcgccggccagcgtcgcagtgaactcgatgccagactgcccggtatcgcggatcgactcgtgttgctccggcagggcttggtggaccagcatcccgagctgcgtgccgagccggactttgacccgcagaccaagtggaatccgtcttatcaaaacctcctggaacgaatccgggtaaaagacatggaggaacgcgagcagcaggcgcgggaggaagagcagcgctggcaggaccttttccgcaccacggtcgcggcgcggctggccagcgcaattcgcgatgtgcgcaagacgatcggcgacctgaatctgcaactgcgcaaaccgatcggcgacagccagtatcacatcaaggtcgacgacaatccggcgcgcgaattccaggagtaccggcgcgtgctcgacgcctgcgcgttgactctggatggcgaatcgatcttcgcctcgctcgaagccgacacgcgcaatgccgtggagcacgtcttccgcgcgctggtcaacgaaccggaaggcaagctcgcgcaggcgttcctcgattaccgcagttattttcgttacgacatggaagtcagcgatccgcgccggcccgagctgccgccgaagagtctcaatcgccacgccgataaattcagcggcggggaaaagcagacgcccttttacatctccatcctcgcttgctacctgcgcgcctacaaacggcaccttccccagcgctacaccgagccatcgctgggactggtgccgatcgatgaggccttttccaagatgtccggcgagcgcatcacggatgcgatcaaggcactgcgcgacgtcgatctgcagggcattctttccatgtcgagcggcaactggccgtacgcgatcagtgaatgcgaccaggtgctggccgtgcaccagcgggagagctttgccaatggccgcaagcagatccgcaacatcgctgcgctgctcaatcgccaacaggcgctcgagcgttcgaaggactggacatga

SEQ ID NO: 42314 - DNA, 1224 bp, Chthoniobacter flavus Ellin428
atgagccccgcggttcgactggtggccaggttttaccgcgaacggcggatcggccgccgcgcctcggcggtccgcgatctgattctgcatttcaacaatttattgcgtgacgcgggatgcctgcacggcccgctgcgcacggaggccgagcaggagtttcgtgacctcgagcgccgcggcttggtgaaactggaatgcgcttcccgcgatttcagtgccattcttcatgtgcgcgtgccgcccgccagcgaggcatcgtttttcgctcacgtcggtgaagtggcgccaaacgccgagcgccaccaattggcggacctctttgaaaaagcggcggaatcgcccgtgccggaggagctggccgaaggatggcgcgtcttttgccaggagtgcgcacagatcgcacgctctggagagggcctggctccgtgcttcgatcgccgcagcctggagcagaccgcgcagatcctcgatgccttgccgcggttgctggcctggaaaagcgaatcgtttctccgcttcgccagcgccgcgctgtttggcaactcaaagacgctcgaggaaaagctccaatcgaaaatcgaggcctgtctccaccgtatcagcgccggccgattgcagacccttgctgatctgggcatccgcgaaaatccgcgcggtgtcatcctgcacggccctttgcaaatcaccctgccggaccggacgctcgatctcggtggcctgcggctgccggtgcaaatttccgccgcggatcttcaggcggcgaatctccgtacgacagccacgcgctgtgtgaccgtcgagaatgcggccatgctgcacgagctcgccaaatttcagagcggcatcctcctggccagcagcggcagcaagggtggctttgcccacagtgccattctcgatttcctgcgcgccctccccgggacgctggagttctttcacttcggcgactccgatccggcgggcttcgacatcctgcgccatctccgggaacgcacccagctctccatcaccgccttgcacatgtcgtatcgcccctcggccgttccggtgctgttgagcaaggaggacgtcaaaattcttcttcgcgcgctcgattccccctatctcggggaagacgagaagaacacgttgcgcgaaatggaacggttgaatgacaaaggcgccttcgagcaggaaagcctcggcctgccggtgagccgctggccgttttacgtgcgcgggtag

SEQ ID NO: 42315 - DNA, 1509 bp, Bifidobacterium gallicum DSM 20093 = LMG 11596
atggcggacgccgtcaacgaatgggagcgtctcgcccccacctacaacgaaggcgtattgacactgctgcgacgcgaccaatcccagatgtacatcgcattactacgctacgcattccaaccactcggcgcggaactctacaaagaacgactcatcatgctcttcaacgagggcctacgccaactcacccaagccaacctcatcgaccaagacacacgagacaatcccgcatccccactccacaacggcgaaacactactcgtggaactgagcaaagaagaacgcggccgatacctctggatcgccagcatcctcgaccaacacacccaacgctacaaatacaccatcacgccacgctgccgacgcgccatggacgcactcgaacaactcgaagacagcaccaccatgctctccggcgcacaaaccaacagcatcatcgacgtagtggaacgcgtacgacgcaaactcaccaccgacccagccgaacgcatccaactactcgaaaacgacatcacccaacgccaacaccaaatcgacctactcaaagccggccttgacaccgaaacactcaccccacgccaagtaggcgatgaaatcggcgtaatcctacgcatgctacgcggcatcccacgagaactcgccgaactagctatgaccgaacaacacaacgccagcgacatacgattacgacaacaagaccacaacctcgacgtcgacgacatcctcaacctctaccaccgcgactaccgcatggcattcgaagaatccgaacaaggccaacgattccacgaagcgttccaaatcctattcgacgaaggcggcgccacccaactcgccgactcaatcgccgccatccgcgccagcaacctcgtcacagacgacaacgcacgactgctcaacaccgtcagcatggaactcgaacgcgtcgaatccggcatcctcaacgtacaagacaagcgacgccaatccgacatcgccgtccaacaactcgtcaaccaagtcagcaacaccgtctaccgcaccatgtcaacggcactgaccacattgtttacaaccgccggccacgtcaccggaccagcatcagcatccccattcatcacccaatccgccgaaggcagctatctacccgttccagaacgcgcgctcgcaacagttgtgaacgttgacgttcctgagctcggggtttcgggtgacgttgaaccattcgacgtgggcgacatgatccgtaggggaggcccgcaagtgcgacgcatcgccacgttgattctcgagcagcccgtgctgcaggacgatgggatgatcgatttggctgccagtttcaacactctgggcgcccaggaccgtcgcgcttgtgaaatagttggcttgcttacgctcgacggccgtcaggagcctggcacatcgctgtggcggtgtgtgggcgacgacggcactcccgtgatttggcgcaccccttcttggattatttccgcagaccacctcatggcaatcgtaaaggacatgacatga

SEQ ID NO: 42316 - DNA, 789 bp, Bifidobacterium gallicum DSM 20093 = LMG 11596
atgaacgacacgatcgataccagtttcgacgaaaacgacaccaacccggaagacatcgccaaccccaacgctttgttcccggaggactgttccgtcatgagccttgacgcgcgccgtgcagccatcgcgctcaaaaccgaacgctatatcaccggtgaacttgtcagcatggtcaacgaccactatgaagaagtcgtcacttcgttgaacaacgacctgctcgaactgcattattcggacacttacgatgtcatgtatgccacgcccgtatcccaacaggaagggttgccgcgttccgtcaagaaacggtcacgcctgaacgccccgatgatgcaattgctgtgcatagcgcgtgaccgtgtcgccgaatgcgaagcgcaacgcatcattcccgaggaatggtggatttcgcgcagtctgatcaagacggcgttgaccacgggagccggataccttgcctcacgcattgatgaagccggtatcgacgctgaagtcgacagcctgattcgtagcgccatcaactacgggtacttccaatccttggaggacgatcccgacacgtatctggtccaacgcattgtgccggccatcatgacgcttgaccaggtccggcaatgggcggcccaagccaaccagccgcccatggatacggcacccgacatatcaacggttgcaccacgcgccaccatgaatgatgtgataacggatgagcccaccacgcccggcatggaagtcacggcggtaaccacgcaatacacgatggacgacctcttcgaagaaggacaatga

SEQ ID NO: 42317 - DNA, 3468 bp, Bifidobacterium gallicum DSM 20093 = LMG 11596
atgcgcgacgataccacagcgataatcgccaaccgatggatgctccaccaacgccaactggtcaattggggcagctatgacggctaccatacattcgaaccgtcatgtgatccgacgatgcctgtcacgctgttgacaggggccagtgaatcaggcaaatccacgctcctcgacgcgcaaacctcactgttctatcccactggcatcccgttcaacaaagcatccaactcaggtcgtagcgaacgtagcgactacacctacattcgaggcctcatcgccaaaggtgcggacggtaacgccacctatctacgcggtactggttccacaggcatgccgatgcccgtgtggagcgccatcgtagacacctacatcaatcacacggacggttccacaatcagttgcgccaaattcatgaccctcgcagccggagccgatagcagcagcatccacaaatggttcctggtcagcgatgaacccatcgatccgcgtcttatggaccggtatcgcaatgaaccattcaacaaatcgcaattgcgggccacctatccgaacgcccagatttacacaacccaacagtcgtttcaagaagtcatgtggcgtcgactcggtgtcaacgagcatgcgtgccgcatgctgtaccgcatgcagtcggcgcaaacacccaaccagcttgacgacatcttcaaacaaggtgtgcttgacgttccgcaagccttgcaatacgccaaagacgccgttgaagactacgaacgctacactgagattttcaacgaactcaagagcaaacaacaacggctcaaccaagttcaagccatccttagccaatacgagacctacgaggtcagccgtcaacgcacgcgccaatatctgccgattgatccgcaaacatcagaaggtgaatccgtcatcctcgcatggatcaatacgagtttggcacaccatgtccgtcaatccattccgcagttggtcaccgagcgtgagcataacaaccgtattcttgcttcggtccaagaagatgccgccaaaaccgaagaacgcatcaaggaaatccaggcgcaacttgacaaacatggtggcacccagcttccacgactcgaggaacaacgacgccacgcagtcagtgatgaacggcgcgcgcgtagccatgtcaatgagctacgcccactgctcgaaccattggacctcaccatgcccgacaatcaggaagcatgggaaacgctgcatgatgaagcttcggatttcttaaatcatgagcatgagcgccgtatggaactcgacgatgcaacaatgaacgccacgctgtccgtccgagaaacccaacaagtccgcgaccagatcaaagccaagatcacacaaacccaacagcaaggcgtgcgtatcgccgccgacaatgaacgcgttgccgcacgcgacgcgctggcccaagccgcaggtttgagcgcacaagacctaccctatgtggcggaactcatggatgtgcgcaaagatgaggaacaatggcgtgatgccatgaatgtcgtatatgcgccattaagccagatcattctcattgaccgtcgccatgaacaaggattcgccaaagctgtcagcgagcatctggatgcccatgcgatcatgcggcgcaattggcggttcgtggacctcgatcagcattatgacgatgcgcccaatgaaagcatgctttcagaaaaattgcggttcaacgataccagcccgttcgccgcatgggtacgccatgctgtgcaacaaccccaatatgacgccgtttgtgtggagcatatcgatgacagcatcacaacacgccaaatccaaacggatggacagttcaaggaagggacccgaggcgcgtatggttccaagaacattgccgacctgatcggattcgtagacccggaatacttggcgcaactggacacacagtatcgggcagcgcagctgcgttacaacgaagcggaaaaagccaggtccgcagccaaggaagcattgaagacgttcgaaaaccagcatgacctctatcgtgacgtaaccaagctgacatggaacgaggtagacgtgcgctcagcggtgcgcacaatcaaagacctggaagaacgcatcacacgcatcacaagtgatcctgatatccagcagcttaccgaacagcttgaacgctgccagcaggacaaacgtgacatagaccagcgtgtggccgaactgaccaaccagagtaaccatcagcaacgtttgattgaacttgaacaacactggttgaaaaacgtgcctgaatcggccgtcgggaagacacatgtcacaccaacggcacagcgtgaactggccgtcctggatccgcacgccatcgaattgatgcgccaaaccatagacaaccagttcggagcagccaacacgactgatagtgaacgcgcggcaatcatcgtgggatcaaccaaaacaggtgacacgaaagtccctgacgacgatgacatcgcgcggttcagggacatgatccttggaaaaatcagtcaggcagccatggccaaactcaaagaatgtcgcaccttaaccgatgagcaagccacagtagtcgaacaaagcatgtccgcatacgtggcgaaccatgccgacgtggtgggaccattggaaccatcggtcaacgatattgaaggatatcgcaacgaacggcggcagttacaaacccaaatcgcgccgacagcgttagacgaacaataccgactctgcctgggacgtatccaagattccctgacacaaatcaacgcggcattgcgcagtgacacgcgcaaaatcacagatacgttagacaacatcaatacgatgttcgaaaagttgccatacggcccaaaaagcggacgcatgcgaatccaagtgaccatcaaaccgccgtcacacacgttcaaaaacgcgctcaacgatgcaatcgacctgatgcgcgactggagtttacaaggagcacatacgcgtagccaggacgaagcgacattccaagaactgcagccaatcatcacaatgttgaccacactgctcggcaaagtcagaaaccaaccaggcgttgaacaatacggagccttcgacctcgacccacgctgccgcacagcattcgccgtggacgtggataaccccgacggcacaaaagaacatctgaacaccacaggcggcaaatcaggcggcgcattacaagaattgacgtcgttcgtgtacggcgcggcattgatatacctactcggaggagacgtggacggccatccgggatacaccacaatcttcctggatgaagcattaatcaaagcagacggcaattacacggtgcgcgcactcaaagtactgcccatgctcggattccaaatcatcgtctcggctcccgaaagcaaaacatcagaaatcatgcgtctagccaccaaagccgtggtagccgtcaaagatcccaagcaggaacgcaccacgctacggcgcgcagaacgggaaaacatgccgtga

SEQ ID NO: 42318 - DNA, 1167 bp, Bifidobacterium gallicum DSM 20093 = LMG 11596
atgcgaagcgaagtgaccaagcgcatcggcggccgttccgtaagcttaactggtgccattatcatcccggatcaggaagcggcactgcgggttgctgatgtcgcaatacggaagcaatacgcacagggaatgactcgcatacgccagttgcacgatcagcttgccgtcagtgatcagacagctaggcgcgttatacacctcatgcgaaccgagagtgatattgactttttgttgcttatccaagcgacccaatgtgtcagtaatgtgctgaaggaaatgggatacagacttgattccggattccttgatattggctgtgaagactgcgcttcaactactactgtgccacgatgtgcacctcatgtgcaatgtgtcactgatgagcagggcaaaacatcacgggtgattcatttgccgtggtccgctcgggaactgccgctcgcaggatttagtgcgaaatggttaggttcgcaatcatcagttagaagacgagccttgactgcattgcttggtttggatggaatacagttcgtggaacggccgggggaattgcgattacgatatcttgctaacgagtatgaactgttaatcagcaaaccgtggacaccagacacggatcaccaagtggatatggtgattattgtcgagaacaaagatacctatcagcacatgccaaatatgccacagtttggtcgaggtgttgttgtgtttggacaaggacgcgtagcgcaaaaactggtatcacaactgctaccttggatcacgcaagtgcctgtggtgtattggggtgatatggatgccgatggtttggaaattctggacggattacgtgggtctggggtgtgcgcctattcagtgcttatggacgaaaatgcgtatgcggaatatgcggatttcgctacagcgctagatgcggcgagccgacctatcgtattacatgcgcccaagcagactccatcattgacgccagatgaacgtgatttgtatgtagctttatctgagggaggctcacattccgaggcgcctcgcatagagcaggagcgtattccgttagacgtggcttgccgtgcgattgctgcgattatgcgcaatatgcagaaggaaaatggcatgcgccctgatgaagatgcagattgttgtgtggatgatcagacgggggataggtag

SEQ ID NO: 42319 - DNA, 1497 bp, Bifidobacterium pseudocatenulatum
  DSM 20438 = JCM 1200 = LMG 10505
atggaacggcttcgacccgtatacgaaaccggtgtcctacggttgctgctgcgtaacaattccatgctgtacgtcgcgttgttgcgttccacgttcgacccgctgacgggggagctgccgcgcgaaatcgtcgaagaacggttcgcgcgcagtctcaaccggctcatcgaaaccggcgattacacgctgaaagacgggcagactgcgcgcgaggccgcgcattcggtcctgcttgacctcgcccgcgaaggggaaggcgactacgcctggctcgccaattccatggacgtggcctcgcaccgctacctgtaccgtctcacagcgcgagcgcaccgtgccatcgaagcgctcgaccggcttgaggacaccacgaaagcgctgtccggcgcgcaggccaacagcatcatcatggaaatcgagcatgctcgcatgcagttgaccgccgatccgcgcgaacgcatccgcctgctgaagagggacattgaggaacggcagaaggaaatcgacgagctggaacatagcgaggccttggaaaagctcacgtccgaacaggtcggcgacatcatcggcgtgattcacaacactctgcgaggagtgcccatcgacctgcgcgagctcgccctttccgaacgggacaacggcgacgcgctccgacggcgcatgcaggccggcgccatgagcgtggaaagcatcctcaccgcataccatgacgaataccgacgtgcgttccgcgaatccgacagcggacgtcgtttcgaagacgcgttccaagtcatcgtcaccgacgaaggccggcgcgagatcgacgacgcggtgcgggacatcgccagaaacccctatttggatggcgagccgagcgtgctgctcaaccaggtgcgttccgaactcaaacgcatctatgaaggcatcgaggacgtgcgccggcagatccgcacgtccgacgaggcggtcagccgtctcgtacgccagcagaccgacacgagctaccggaccatgctcgccaaactcaaccagctgttcgcaaagaccagcgccgaagccaaagcccatcccaatgaccaaagccggccctaccatacggacgccgggcaggcgaaattcccgacattgccatctcgtccggccagatcaatggcgcgcgccgcatcatccagcctgaacgacgccccagcggcgaccatcgaagcgccggacctcaagaacatggtcgaaatatgcgggccgcggctgacgcgcatgatcaggcttatccgcagcaatccggtgacgacatcggacggcatgttcgtggacctcgcggcaagcttcaaccagctgccgaaagccgaacggagggaaagcgaactggtcggcttccttagcgccctgcgcacgcaggacgactcgtcatacgtgacatggcgctgcatatcgatcgacggcagcgaacgcgtatggcgcaccaaacccattctcatcaccgaaacgacgctcgacgacatcatcgaggagagataa

SEQ ID NO: 42320 - DNA, 783 bp, Bifidobacterium pseudocatenulatum
  DSM 20438 = JCM 1200 = LMG 10505
atgacggactatatcgaagccaacatcgaggaaacgatcctgacagaaggggagccggtattggaagaggccggcagccagcaggcctcgaccgcgctgttcaacggcgacaccggcgacatgcccgtcgaagcgcgcatggccgcgatcgcgctcaaacgcgaacgctacatcgacggcagcctgtatgacctcgcctgcgagaaccgtgaggtcgtggaacgttcgctcaacaacgacatgctcagactggtcgacaacacgaaataccgcatcatgtacgcgtcgccggtcaccgactcggagacatgcatccgttcgttgaaaacacgtatgagcctcacccgcgaggaggccgccacgcttgccgcgctacgcatcaaagcgttggaatacgaaaaccagaacgccgaaccatgcgactggcttatcagcttcgacgacatccgcgcattgctcgccaccggcgcgggattcctcaccgccagcaacgacgaggaaggcactgcgaagaaaatcacgtccatcatctcacgcatgcgcacctacgggtatctcgcgccgatcgaagacgacgacatgtacgtcctcacgccactggtgcccatggtgctcgaccgcggcctcgccgaccagtggctcggatccgaaaccacggacgagaacgcattcgccgacggccgcaccaacgccggcccggacgacaggcccatggaagacatagaacaagacgcattcgatttcaacaccgacgacaaccgtttcgacgaggaggaacactga

SEQ ID NO: 42321 - DNA, 3552 bp, Bifidobacterium pseudocatenulatum
  DSM 20438 = JCM 1200 = LMG 10505
atggcagacggcatgaagatcgtttccgacaagtggatgctacaaagccgacaaatcgtcaactggggctcatacggcggctggcacgaattccgcccatccatggacgaaaccatgccggtgaccctgctcgccggcgccagcgaatcaggcaaatccacactcgtcgacgcgcaaatctcactcctctacccatccggaaccccctacaacaaggcgtcgaactccggacgttcggaacgcaacgactacacctacctgcgtggcatgatcggcgtaagcgatagcgaaaacggcgaaacgccgatcttcctgcgcggcaaagacgccgacggcaccccacagaacatctggggcgcaatcgtcgacacctacgtgaacaaaaccgacggaggactgctctcctgcggcaaattcctctacctgaacgccggagacggacaagacggactacgccgccgctacatcacctggaaccgaaccatcgacccacgactcatggaccagtaccgcaacacaccattcacccggtccatgttcgaaaaaacctatccggaatgcaccacgcacaccaacgccgcggcattccacgcctccatctggcaggacatgggcctaagcgccgacgcctgccgcctcctgcacaaaatacaatcggcggacgccccctcaaaactcgacgacatcttcaagcaaggcgtgctcgacatacccgaatccatccgcctcgcccacgaaaccgtcgacgactacaaccggttcaacgaaaacttccacagcatggaagacaaaatggcccgcgtcgccatcctgcaaaacatccagacacgctacggcgaatacgcaaagcaaaccaccgaacgacgcgaatacgaacccatcaaccccgacagcgaacatggcaacgcaacactgtccgcatgggcgcgctcgcgcatggccagcgaagtgcgcgctggtctgccggccgcgcagcgcaaggtcaaggagtcgcaggaggccatcgatcgggcgatgcagcgcgtcggcgagctcaacacgcgaatcgacgccgtcaaggaacgtatccaaggcatcgacggcggcagtctgcagcagctcggcaaggatcttcaacgcgtgcgccaggacatcgacgaggcgagcaggcaacgtcatgccatagccgaacgattcgaacaggtcgaaggcaggcttcccgacagcgagcagacatgggacgccaaacgcgccatgctcgccgaaacgctcgacacatacgaggaacggttgaaggacgcgaacgccagattccagcagctggtaggggagcgtcacgaccgccagcgcgaccgtgacagcctacgacgggactatcagcgcaaactcacgcacaggacgcgcatcagcgatgacatggacgacgcgcgcacgcttatcatgcgggcgaccggattggacgcgtccgaactgccgtatgtggccgaactgatggacgtgaacgaacaggacgaacagtggcgtctggcaatgaacgtcacctacgcgcccatcgcgcagaccatcctcgtcgacaaacgccacgagcaaggattcgcggcgaaaatcagcgccatcgacccgaaactcatgacacgacgcacgtggcggttcatcgacaccggcatgcaatacgaatcctctgccagcgaaggctggatgtcgtcgaaactgcaataccgggaggactctccgttcgccggatggctgaaaaaccagacgacgtcgccacggttcgacgcgcgttgcgtgcacgccatcgacgacatgaaccatgacgaacgacaagtgcaggccgacggacaaatcaaatccggcgaccgtggattccacggcagcaaaggactacaccaggtcatcggcttcatgaacgaacaatacctggccgaactgaaaaaccaactcgacaaggcggagcaggcgttgcagaacgccgaccgtcgaagcgaacaaatgtccaacgccatcagcctgctgcaagacgagcacgagctcgcacgaatcgtagccgacatgccatggagcaaaatcgacgtgaacggactacgggaacaggaaacgcgaatccgcaggcagatcgaacgcatcgaaaacgacccggaactcggccaactgcaaaccgaactgaaacagctcaaccaacaggccaccgccgaaaacagaaaccagtaccaagccgaagacgacctcgacaaggcccaacacgccgtccaagccgaacaagcatggctcgacgcctacggcaacgacgacttcgacgatgccacactatccagcatggtatcgaacctactcgccgacgcatacgagaactgcttcggcgcatccgtacgcgcgcaagaccggccaaaactcatcgcaggcctcttcgaccatgaaagcgaaacaccattccacgcgcgcgcgctacgcaacatcgcacgcatcgcacgcacacgaatccaagaaatcgacgccagatccaaccaactgcgcgccgacacggaacgcatcatggacgactacctcaacaaccactccacagatgacaacaccgtcatggcaagcgtggaagactaccgatacttcctcgacgaactcgacgaactcaacatgctcgtcacccgcgccgcaaccgacgaagaatacgccaacagcgtcaaaaaactctacatgagcttccaacagctcaaccgcgcgctacgcaccgacgaagaaaacatcaaagaacaactcaaccgcatcaacagcatgctcaaaggacaacaattcggcccacaaggcggcagactatcactcgacgtgaccttcagcccaatcgaccgacaattcgaaacaaccctcagccgcatcctgtcaaaaactggaagactggacgcgcaacgcaagcgacaatcccacggaaacacgcaaagcattcaacaactgcgaaacattcgtgaacagactgcacaacgaactcgacaaaatacacgacaccaacggcatcaaagcatacggcgcacgcaacctcgacccacgcgtacgcagctcattctacgcaatcgtgcaccacgacaacgcccccgacgaacgcatcagctccaccggcggaaaatccggcggagccctccaagaactcacctcattcgtctacggcgcggccctcatctacctcctcggcggcgacctcaccgcacgccccacctacaccacgctcttcctcgacgaagcactcatcaaagccgacggccgctacaccaaacgcgcgctcgccgtactaccccgactcggcttccaaatcatcgtctccgccccggaaagcaaaaccgcggaaatcctcaacgtcgccaacagagcatacgtcgcatacaaagacccatccaccggcaactcatacctacaggaactcgacagcgaaaccatcacacaggacgaaacacagcccaccaccgcacccgcgaaaccaacaacggaggcataacccatggcaacggccagaagcaccaccaacagcgacatccacagccaactcaacggatacgtcaccgactatctcaccaagcacatgtatga

SEQ ID NO: 42322 - DNA, 1122 bp, Bifidobacterium pseudocatenulatum
  DSM 20438 = JCM 1200 = LMG 10505
atgtatgacgccaacacctcctggccattgcgcaaaaccatccgactacccaaacaagccgaactcgaagcccattacacgcacatccgcgcccaagacgaagccatccgcaactgggcacaacaacaccactgcgaaaccagcgaaaaaaccaaaatcatctccaacggaatcgtccgacaaaccagccaactcatcgactcggtaaccatacccgacctcaacacggccctcaacatcaccacaccacaaacacgcaaactctaccaacgcgaacaccaacgcgcacacaccatcaccaaccaattcaacctcgactccaacacctccataaacatcgccaaaatcctcaaaaaccacgacgacaccgacttcaacctcgtcatacaagccgcacactacttcgccaaccacaacaccgaaaacatgaccccacgcatggtccccatccccggattcagcgcaaaatggctaggcaaaacaacatcaaaccgctgcaaagcaatctgcaaactcctcaaacgagaacaactagccctcaacgaccgccacggagaaatccgactccgactcctcgacacacaacaccacaaccaaccagacctcatcgtgacacaaccatggacagacggcgcgccacacgacatcacccacatcatcatcgtggaaaacaaagacacctaccaagccatacccacaacagaacacgccatctgcatattcggcagcggacacgcggcgacccgaatcaaaacactactaccttggatcacaaccacaccccacatcatctactggggagacatagacgcagacggcctcgaaatactctccgaactacgacaaaccggcatcacctgcgactccatactcatggacagcacagcatacaaaacatacgaaccatacggcaccaaactcgacaccaaaaaacaacccctcaaaacacgcgaccccaaaccaacaccaggactcacacaacacgaaagaaacttatacgaacaactctgcaccgggaaaaacacaacctacctacgaatcgaacaagaacgcatccccatcaacgacgcaatgacaatactccacaaccaacaccaatggaacacaacacaccacaaatag

SEQ ID NO: 42323 - DNA, 1497 bp, Bifidobacterium catenulatum DSM 16992 = JCM 1194 = LMG 11043
atggaacggctccggcccgtgtatgagaccggggtgctgcgattgctgctgcgcggcaattccatgctgtacgtcgcgctgctgcgctccacgttcgacccgctcaccggcgagctgccacgcgagatcgtcgaggaacggttctcccgcagtctgacccgacttgcggaaacgggcgattacacgcccaaggaagggcagacgtccgcggaagccgcgcacacgatcctgcagcagctgacgaaggaaggcgaaggcgactacgcttggctcgccaattcgctcgacgtcgcagcccaccgctacctgtaccgtctcacggcgcgcgcccaccgtgcgatcgaggcgctcgaccggctcgaggacaccacgaaagcgctgtccggcgcgcaggccaacagcatcatcatggagatcgagcatgcgcgcatgcagctgaccgccgacccccgcgaacgcatccgcctgctcgaacgcgacatcgaggagcggcaaaagcagatcgacgaattgaagcacagcgacacgttggacaagctcacctcccaacaggtgggcgacatcatcggcgtcatccacaacacgctgcgcggcgtgccgatcgacctgcgcgaactggcgctcgaggaacgcgacaacggcgacaatctgcgccgaagcatgcagtcgggctccatcagcgtggagcaggcgctcggcacctaccatgacgaataccacaggtcgttccacgaatccgacagcggccggcgtttcgaggacgcgttccaggtgatcgtcaccgacgagggacgccgcgaaatcgacgaggcggtgcgagacatcgcccagaacccgtatctcgagggcgagcccggcatcctgctcgcccaggtacgcgccgaactcaaacgcatttacgagggcatcgaggacgtgcgccggcagatccacatatccgacgaggcggtgagccgtctggtgcgccagcagaccgacacgcattaccgcaccatgctcgacaagctccacagactgttcgtgcgggccagcgacgacgcgaagacgtaccccggctcggacgaacgcccataccgtacggacaccggcacggcgcaattccaggcattgccgtccaggcccgcgaaatcgatggcgcgcgcggccacggccggattggacgacgcgccttcgacgaacgtcgacgcgccggacctgaaggccatggtcgagatgtgcggcccgcggctgacgcacatgatcggactcatcaggcgcgatccggtcaaaacggcggacggcaggttcgtggatttcgcggcgagcttcaaccggctgccccgggaggaacggcgcgaaagcgagctgatcggcttcctaagcgccctacgcacgcaggacggaccggcaaccgtggcatggcattgtgtatccatcgacggaggcgagcgcgtgtggcgcaccaggccgatcttcaccaccgaggcggcgcttgacgagatcatcgaggagggatga

SEQ ID NO: 42324 - DNA, 846 bp, Bifidobacterium catenulatum DSM 16992 = JCM 1194 = LMG 11043
atgagcatgacggacaacaccgacggattcgacactggcatcggcatcgaagaggagacaggcccggaatccggcatgccgtccgaagggccggccatgacgagggacaggccggcattgttcgacggggatacgggagacatgcctcttgaggcgcgtatggccgcgatcgcgctgaaacgcgaacgctacatcgacggtagcctgtacgacagggcgtgccagtaccgtgaggccgtggaacggtcgttgaacaacgacatgctcagactggtcgacaacacgaaataccggatcatgtacgcgtcgccggtcacggacgcggagacgaacatccgctcgttgaagacgcgtgtgagcctcacccgcgaggaggccgccacgctcgcggccctgcgcatcaaggtgctggagtacgagaaccagaagacgaagccgggcgactggctcatcagcttcgacgacatccgcgcgctgctcgccacgggagcgggcttcctcacggccagcaacgacgaggagggcacggcgaagaagatcacgtccgtcatctcgcgcatgcgcacctacgggtatctcgcggaaacgggggacgagaacatgtacgtgctcacgccattggtgccgatggtgctcgaccagaagctcgccgaccggtggctcggctccgatgatacggacggcgatggtatgaaagacgcggatggcgatggttatgacgattcgtccatcggcgcggatggtggcgatacttccgattcgaccgggacggtttcgtccggcgtcgagcaggacgcgttcgatttcgattcggccgatgacgcttttgatggaggggaacactga

SEQ ID NO: 42325 - DNA, 3459 bp, Bifidobacterium catenulatum DSM 16992 = JCM 1194 = LMG 11043
atggaagacggcatgaaaatcgtttccgaccgttggacgctgcaaagccggcagatcgtcaactggggctcctacggcggctaccacgtgttccgcccgtccatggacgatgcgatgccggtgaccctgctcgccggcgcgagcgaatcgggcaaatccacgctcgtcgacgcgcagatctcgctgttctacccatccggcaccccctacaataaggcgtcgaattcgggacgttcggaacgcaacgactacacgtacctgcgcggcatgatcggcatcagcgacggcgaaaacggtgagaccccgatcttcctgcgcggcagggacgcggacggcaccccgcagaacatctggggcgcgatcgtcgacacatacgcgaaccgcagcgacggcggactgttgtcctgcgcaaaattcctctacctgaccgcaggcgacgggccggacggactgcgccgccaatacgtcacctggaaccagaccatcgacccgcgcctcatggaccggcaccgcgacacgtcattcacgcgaggactgatggaacagacctacccaggatgcacgacgcacgtcaacgcgcaggcgttccacgcctccatctggcaggacatgggcctaagcgccgaagcatgcaggctcctgcacaagatccaatccgccgacgcgccctccaaactcgacgacatcttcaaacagggcgtgctcgacgtgcccgaatccatccggctcgcccgcgaaaccgtcgacgactacaaccggttcagcgagaacttccacagcatggaagacaaaatggaacgcgtcgccatcctgcaggacatacaagcccgctacggcgaatacgccaaacaagccagcgaacgccgagaatacacgcccatcgaccccgaccgcgagcaaggcgagacgacgctcgccgcatggacatggtcgcgcatggccagcgaagtacgcgccggactgccatcggcgcaacgcaaagccaaggaatcccaggacgccatcgaccggtctcagcagcgcatcgacgaactcgacacgcaaatcgaagccgtcaaagaacgcatgaacggcatcgacggcggcagcctgcagcaactcggcaaggacttcgaacgcgcacgccaggacgccgacgaggcgcgcagacaacggcacgccatcgccgaacggttcgaacgcgtcgaaggcagactccccgccgacgagcagacatggaacgccaaacgcgccgcgctcgccttgtcgctcgacacgtacgacaagcgtttggaagacgcgcgatccgaataccagcggatggtggtggaacgtcacgcccggcagggcgaacgcgacctgttgaggcaggattaccggcgcaagatcgaacacaggacgcgcatcagcgacgacatggaccatgcgcgcacgctcatcgcacgggcgacgggcttggacgagacggaactgccgtacgtggccgaactgatggacgtggacgagggggacgagcaatggcgtctggcgatggacgtcacgtacgcgcccatcgcgcagaccattctcgtggacaagcggcatgagcaggggttcgccgcgaaggtcagcgcgatcgatccgactcgtatgacgcggcgtgcctggcgtttcgtcgataccgacgcgcaatacgattcggcctgcaacgaggggtggatatcgtcgaagctgcggtacaaggaggattcgccgttcgtcggatggttgaaggagcagaccgcgtcgcaacggttcgacgcgcgttgcgtggaggcgatcgacgacatggaccgggccgaacggcaggtgcaggtcgacgggcagatcaaatccggcgaccgtggattctatggcgtcaaaggcctgcgtcaggtcatcggcttcgtgaacgaacggtatctggccgaattggaacgccagcttgacggggcggaacgggcgttggaggacgccgaccgccgcggcaggcagatggccaacgccatgactctgctgcaggacgagcatgagctcgcattgaccgtcgcggatctgccatggggcaagatcgacgtggacgggctcgagacgaaggcggaacggatccgtctgcagatcgaacggatcgaaagcgatccggaactggcacaattgcaggacgagttgaaacagctgctacggcagaaggacgacgagggcaagaccaggtaccgtgccgaagcggaattggaaaacgcgcagcatgccgtccaggccgaacaggcatggctcggcatgcatggcgactccgatttcgacgatgccgcattgtccgacatggtgtcgaatctgctggccgacacgtatgagacctgtttcgacacgtcgcgtccgcaggaacggccgcagcgcatcgccggcggtttcgaccgtgaggggacggcgccgttcgacgtgcgcgtgctgcgcagaatcggcaacaccgtgcgtgcgagactccagcagatcgacgagcgtgccgtccaattgcgcgccgacacggaacgcgccatgggcgactatctgaagcaccattccacggagggcgacaccgtcatggcgagcgtggaggactatccgtatttccttgacgagctcaagaacctcaacatgctcgtcacccgcgccgcgaccgacgaggagtatgcgaacagcgtcgaaaagctgtatatgagcttccaacagctcaaccgcgcgttcaacaccgacgaggagaacgtcagggagcagctcgaccgcatcaacggcatgctcaaaggccaacagttcggcccccgcggcggcaggctctcgctccacgtggacttccacccgatcgaccggcagttcaaatcctcgttgggccgcatcatgtcgaagctcgacgattggacacgcaacgcgcgcagcaatcccatggagacgcgcaaggcgttcgcaggctgcgaaacgttcatcggcaggctccaggcggaactcggccagatccgcgacacgaacggcatcaaggaatacggtgcgcgcaacctcgatccgcgcgtgcgcagctcgttctacgcgatcgtgcaccataacgatctgcccgacgagcgcatcagctccaccggcggcaagtccggcggcgcgttgcaggaactcacttcgttcgtctacggcgcggccctgatctacctgctcggcggcgacctgaccggcaagcccacctacaccacgctgttcctggacgaagccctcatcaaagccgacggacgctacacgaaacgcgcgctgaccgtgctgccgcgcctcggcttccagatcatcgtatccgcgccggaaagcaaaaccgccgaaatcctcagcatcgcagacaaggcgtacgtggcatacaaggatcccgcaaccggcaactcgtacctgcaggagctcgaccgcgagccggcaacgcaagccgaaacacaagacgccaccgtcgagcagacgcaacccgcgacggaggcataa

SEQ ID NO: 42326 - DNA, 1236 bp, Bifidobacterium catenulatum DSM 16992 = JCM 1194 = LMG 11043
atggcagcggccagaaacaccacaggcgaaacggacatccgccggaaactcgacgaatacgtcgacgcccacctcaccaggcacatgtacgacaccgacgaatcctggccgctgcgcaaaaccatccgactgcccaaacaagccgaactagagcagcactacaaccaaatccgcgcccaaaacgaaaccatccgcgactgggcgcggcaacaccactgcgaaaccagcgaaaaaaccaaaatcgtctccagcggactcatccaacaaaaaagcccgctcatcgactccgtgaccatacccgacctcgacaccgccctccgcatcgccaccaaacaaacccgcgaacgctacctacgcgaacacgaccgcatgagcgcgctcgccaaagaattcggcctcgaaccggagaacgccatgaacgtcgccaaaaccctcaaagaccatgacgacaccgacttccacctcgtcatccaagccgctcactacttcgcaaaccacgactgccacaccatgaccccacgcatggcgcccatcccaggattcagcgccaaatggctcggcgcacccaactctcaacgccgcaaagcgatatgccagctcaccggacaagacaacctcaccttccaggaacgcccgaacgaactccgactacgcctcatggacgccgaacaccacgaccaacccgacctcatcgtcacccaaccatgggtccgcagccagccaaccgacatcgaacacgccatcatcatcgaaaacaaagacacctaccaggccatgcccaccgtcgaacacgccatctgcatcctcggcaacggatacgccgcaacatcacacatcacaacactcctgccatggctcaccaccatccccaacatcatctactggggcgacatggacgccaacggactcgacatcctctccaaactacgcgccaccggcatcccatgcacatccatactgatggacaccaccgcataccggacatacgaacaatacggcacccaattcgacgccaaaaacaaacccctcaccacacaaaccccacaacccacacccggactcaccaccgaagaacgcaaactctacgaaacactctgcacaggaacagacatccaatacctacgcatcgaacaggaacgcatccccatacgcgacgccacaaccatcctgcacgaccaacaccactggccaatcgacatacccggcaacgacataccaaacaacaacaccaaatag

SEQ ID NO: 42327 - DNA, 1428 bp, Marvinbryantia formatexigens DSM 14469
atgccggtttttgaaaatatcagcgacaaattttttaatccgttctgctgccgaaatcgtgagctttattttgcgtgtatacaacagctcattgataaatcaaaggagattccggtgctgtatgagacggatgcaagaaactgcctgattatatatctgcaaaacagcatgtatgcaatcgaaacggagaatattggagaagaaatcagcagtcagcggtcgtcaccggagaatgcgtctgttattctgcgctatttccggagctgcgggtggattacgccaaaagaaattggcagaacaggagataatattgcttcggtatcatcttattgcagaaagctggtggatgcgctgcacaaaatttttgaccgtgatgcgagcggcgcaattacgaatcacatcttttctatgtacgaaatcttaaagtcctctcttgaaaaagacagtgccagggcgatacgcccttattctaatatctgtgtcccgctggttgaaaatgaatgcgatttgaaaaatgagctgctggtgctgaaggacagtatccggacgattatgcatgctgttatggaaattgaggacgcgaacgggtttggacaatttctgatgaaggatgaaatgctggacaggttttttaacgattacttttttatcaaaagaagcgggctgattccgggatacattgcgggaatcgaccggatgcttatgcgcataaaaaagtcggagctgtatgaccgcatggcggaagaatatatggagctgaagaacgtcgacccggttacggcgcgcgaagtcgtggaccgccagtttggggagctggacagctttatcaatatggaatatgagaaggaaatgtcctatattgataagaggattaatacctattacaatctatattcaacaagaatgatgatggtgctgagtaatcatacaaatctccagcagtatctcaaccggttgcttctgcagatgcgcagcatgaaggaagaagagcgggagaagctcttaaacgggctgtcggaatgttttaaactgagaagtatgggctatgtgagccggaaatcctttgagcggaggagaaaggcgaaaccaaatacagaaaatgcggcgattgagcgggaagagctttcgcaggaagaaaaacagcggctgacggatgagcttctgaaagaaacgccggacagatatagtatggaaacggtcagaggttatctggatgggctgtcgtttccggaaaacgggctggcggtcagcgagatggcaattcataccagagatgacgcgatgatggcggccgccagtatcatttattccggtagcgtgggatttccctacgaagtggaatttggagagggaatgacagagacggaggttgcgcgcatcagcaatatacggattaagaaaaaggagcggaggggacagacagtatga

SEQ ID NO: 42328 - DNA, 651 bp, Marvinbryantia formatexigens DSM 14469
atgagtgatatcaatttacagatcacagtgaaagaggataattttatcctgtttaagcggtgtatccgcagactgctggaatctacattccttctcaaagagaaagaagaaagactgtatgcgtttctggcaaaggaatccaaccggcaggatgtctcggattatctgcggatgataggttatgatgttctggttgatgaaaagtgtgagcttgccatgctgacggtaaatgaggcggatgcggaaacggtagggctgaaacgcgcaaacattgttacgttttcgggtatacagtaccaccttctgctggctttatgggagacttatctggaaaacctgggttatgatgaaagcgtttttattaccagaggggatttgatcgataagctgaagtcatttgggctgcagttggtaagcgcagagctgaaagcggcgtttaagctgtttaagaaatataatctgatagattatgacgaagaagagaacggagaggatgcaaaaatccgtctgtatccatccctgcagtttggctgggatattccgcaatttaaagcagtggcggatgaatacctgcatacagaggatgaggaggaagaaaacgaaaatcctccggaagcggagacggaaaattttggggaggacgacgaatga

SEQ ID NO: 42329 - DNA, 3348 bp, Marvinbryantia formatexigens DSM 14469
atgatacttttaaaaaaggtacggctgattaactggtatgcattttcaaatgtgacagcgccggttggcatttttacgctgattgccggaaagaacgggaacggcaaatcggttatgctggatgcaataaagtatgcggcgtatggggacactgtttttaataaatcatcggaaaaccggggcagcagaacattgtcatcctatacgcgcgggcttctggacgcgacggcaaagacctatatgcgcccggcggataaagtgccgaatgtatacagtcatattgtactggaatattacgatgatgtattggagaaaagttttctgctcggaacgattctggagacgggcgtgtccaataatatccagtcctaccgttatgtgatggaccggtgcacactggaggaaacagagcatctgtatgaggagaacaagaaaaagaaaccgtacgatgccaggcggttccagaagaaatatggggttacattgctgaataaggaagccggtatcggaaaatttacacagatgaccggtctgaagctgaccggctcacagacagcgacatatctgcgcaagctgcggggaattatgtcttacgacccggacgcaaaaattgaccagtttatacgtgaaagcgttctggaaaacagaccggtggattttacgaagttaattgaagcgaaggaaaatatcgagcggctgaatggcacatttacggctatccagatggaaattgcggagctggaggagatactgaagctgcttgacggttatgatgcgcagaagaatctgctgctgatagatgacataaaaattgtatacaagagtatcagagagctgcgggaggagatggaacgtctgcggcaggatgtacgtctttcccagagccgtaaggaggaagcggaaaagcttctggagacgctttccgggcgggaagaagagcagcaaaagagactccgtgaagtggagagcagtcttgaccagcttgactgtatgaaactgatacggcaggaggaagaggtttttcgtgcactggaaaaagagaagaagctgctgatggcggagaaaaaacggttggacagctttcagacgcaggtgaacgggatgatgcacattctgatggagaaacgtacggaggtgaagaaaaagcacattctggcttctcttacgtcgggagagtatactgcggcggaaaaagaagaggcggtcctgcggctgaaggagcagattacggaggcatatgagcaggcggtcggagaattatccgggcttggagttctgaaggcggaaattgagaaaaagattcaagtgcagatagagattctggaagcctgccggaaaaacagaaatgcctacagtcagattccggattatgtaaagctgaaagaagaaattaacaaagagtttgcgagccggaaaatagcttcggaggcgaagtttgcctgtgagtacgtaatcggtctgacggatgagcgctggcgtaacgcggtggaagcgtttcttggcagacgccgttataccatactggtggaaccggagtattatgatattgccgatgaggtgctgaaccgttcgaagaacagatacgcgcacttgtttaacacaaagcttttaatgaaaaaacaggtaacgccgctggataattctgctgcgcggtttttgacgataaagaatccggtagcgcgtaagtattttgactatcagcttgggcatatgcgggcagtcgcgatagatgaagtaaaaaattatgaaaacgccatttccgcggaaggacgtgtggcggttgctatggatggttattttctgcgtttcgaccgtatacagtattattatctcggacaggaaacgtttaagctgaatcagcagcgggcagaaaaagaaacagagcagctaaaggctcagaaaaaggaattgcttgagaggcaggaagcgcagcgggctgtgaaggagcgcctgaaaatgaatctggagcttttttcggggtatcagtacgatgcttaccaggcgtatcagacggcggcggataaggcgcgagggtctgaggagaatctgaagaagctgaaagacgcccagaaaaacaaccgggaatttgtagaaatgaaccagctgcggggaaagctgcaggatgagctgggggcaatccggcgtgaaagaaccaggcagcttgatataaaaagtcagatgacatcgcagcttcagattctggagagcagcctgggaagcagggaagaaaagcttgccgaggatgagaaacagtttgaagaataccagattacgcagtacagcgcggtgcagaaggcgacgcaggcgtatgaccggtacctggcaaacggggaaaagggagcgggcggtctgagcgcgccgcttaccaggagacgtgtccgggaaaaaattgcggaatacgagaaggatattgcggtgcagcagggactgtacaatggaaaaagaacggaggagagctggttgccgatggggctggaataccgcagtgtttatgaagcgcgcaaagcgaaaatctggatggatgacctgcaggaaatccgacagaagctggaagaacagacaaggcggtacgagagtatctttaaaaacgagtttgttttaacgattctgcgttcctgtaacaaggcaatggaggacttgaaagcgattaaccaggagcttgcacgtctgcagttttctgcaaaatatcagtttgatgtgcattttgtaaaggacatgtcggattacgccagaattattgaatatgccaagtatctaaacgagagagagcagttcggcggggacggcgggcagatggttctgggcatgttcagctcgtattccagtgaggaggagcaggagctggagaacgacatgaaaaatatcattaaccgcattatcgcaaaaaataatgtggaagcaatcgaacggtttgctgattaccggaactatatgacgtatgagatactgattaccaatcagattcttaatcatgcgaaattgtccaggcagaccgggtataattcgggagcggaggtgcagataccgtatctgctgattctgctttccgcactgcttatgatatataatgaaaaagtgaattcgacacggttgatttttattgacgagccatttgccaagatggatccgggaaatgtaaaagtgatgctggaatttatgagaagccagaatctgcaggtgattttctgtgcgccggataagaccgagacgattggaaacgaatcggaggtaatattgccggtgcttcgtgtcagcgcggacaatatgcagcttggaatcatacagtttcacgatgataagaagtatgctggtctgaagcggcatggcagcggcggagaaagcatttga

SEQ ID NO: 42330 - DNA, 1263 bp, Marvinbryantia formatexigens DSM 14469
atggcagcggcggagaaagcatttgaggacaggtgcggggaaatgatggattatgaggggcagcttctgaagctgctgacggagaaatatcgaaagagtaaaaaggatgccgggacaaaccggataaagcgacgcacacagataaaaccgtcacagttgtatacaaaatactgtgataatgatggtgactttgcgataatagaagcgattggcgaggcggtccgggcgtgtgagcgccgtggctttgtcacgtatgagatgaaggggtttgggtatgagatagcggcggtttatttaaacgatgaccgtataacagaggttgaacagtacctgaatgatacttgcggatatgagacaaaggaagcaaagctagcatatgtaaggaaccttattgagaaatatgggcaatgctccccggcagcggcaatggaatgtgcgaggatgcaggaggacctgaagcagcggcgcctgccgaaaaattatgcgcagaaggaagacgttctgaaggcactgatatttgtagaaaacaataagcaggagctatatgtccgggaagcttccatgctgatttatggttcttcgaaatattttgaagaaaatacgatggatacagtatgccgtctgctgcgcaattatctgaaaaagccgtgcggcgaaggagaactgccggatgaaattctggagcagtatcatatccggaaggaggcgcagcgcctgtgcatgaaaggaaactgtaccatttaccggaaggggcaggtgctggaggttggcgcgctggagaatggaattgaatttgctgcagatgaggtgccggaaatagagcgggtggaaaccggggcgcaggaatttttgacggtggaaaataagacgtcttatctgcgctgtccggcaggaaatatggtggtgttttatctcggcggctatgccacacgctatcagagggactttatcaaaaaggtctggcgggataatccggggctttcctggagtcactttggggatatcgatgcgggaggcttctttattcacgaacatctctgccgcataacagaaataccgtttaaaatgaaatatatgtctgtcggacaacttcaggacgaacggtttgccgcctgcctgcagaagctgaagccgtccgacaggaggcggctgaaaacattgcaggaaaaagaggcttataaagatactgtggagtatatgcttaaggaaaatgtaaagctggaacaggaaattgtgagttattatctggagagggaaaactga

SEQ ID NO: 42331 - DNA, 1416 bp, Roseburia inulinivorans DSM 16841
atggatgacgtacaggcacagcagaccaatccattatttggtattattccaaaagaatttttcacaccgctggcatcgccgaatagacttgtatattgggactgtctgtgccggttgtttcaggcaatgagtgcacagctttcctttgggatcgagagagaaatccttgtggatgaattacagttttattttgaacagaatcaggcagcggaatttgaggaagatgacataaatggcatggattccagaaaaaaggcaaatgagatgctgcgcttattggagaagtatggctggcttgaggttgagacggataagagttatgtgcagagagtcaatttttatgattatgccgtaaaagtcatgaaaacgcttcttgagatttcagacggacgaaaggtagaatatcagggctatatttataccatttacagccttgtgcggaccaatacggatcatccggcggttgtgctgcaacagatccgggataatacggatatgctgattacaggattaaagaatctcaattcaaatatcaagcattacattgatgaactgacaaagcataagaccgtagcggagattatgaatgcgctgtttaatgattatattacgaatattgtagataaagcttaccacagattactgacttcagacaatgtgtcaaagttccggccggagattatagagcggctggaagcaaatgggcatagttcacgttatatcacaaagacgtcggaagagttggcagcgatccgggagataccggtcgggcaggcagaagaactggtatatcagacattgcatgagattgtggaagcgttccggaatatggatgatattctggcagagatcaattggaaaaacacacaataccagagagcagcagtaaaccgtgcaaagtttttgctggcaggaacggaagatgtcagaggacagatgaaagagattctcttatatattggagagcagatggaacagagccagctggatctgaatggaatctatgagatcgagtatctggataatctggtgagactgttcgggagcagttttattgatgagaaatcattttacagtccgatcgagggaaagaaagagtttcatcctcaggagctgatagaagtaatgccggatgtggaactccggcaggaaaagctccggaagatggcggagaagatgcagcgcattttaagtccggaacggatagagcggtttgtagaagaacaattaggagacagggcaaaaatctatgcgtctgagcttccgatggaaacaatggatgattttatcaggctgatctatgtcagactgtatggctccagaaaaaagatgcgatatcgaattgaaaaggcagaaggtgcgaataaaatcagtggagagtttgatttcccggattttgcgatcataaaacgctga

SEQ ID NO: 42332 - DNA, 615 bp, Roseburia inulinivorans DSM 16841
atggatttattaaatggcatgctgcagaaggatcaggatgaattccgcagaatatgtaataaactgattaatgtatgttttatatgcagacagaatcaggcaacaagaagtgacttctattttatacaaaagtacaaagaaaagtttgaagaattacttggagtactcggctacagattagaaataaacgaagaatatggcgttgtgcagcttaccaacgccctgaatacaaaccggcagaatttaaaattatatgagtccgttattttactcatattgcgtattctgtttgacgagaagaaaagagaattgtctgtgagcgatgaagtcatcgtgaatctgggcgatattcaggacaagtttttaagcctgaagatccgtgacaaaatgatcgataagacgacgatgggaaatgcactccgtctgttccggagatatcagctgattgagttgctggattcggatctgaaaaatgaggagtccagagttttgatctataattccatcctgatggcagtgagggtagaggatatcaagagtgtatacgacaaagtggacagttataggaaaggaaaattaaaagatgaagaaactgaccagactgaagctgattaa

SEQ ID NO: 42333 - DNA, 3249 bp, Roseburia inulinivorans DSM 16841
atgaagaaactgaccagactgaagctgattaattggcatcgtttctcggatgtcacgatagattttggggactcaactctgatttccggcgaaaatggagccggaaaatccacacttttagatgcgatccaatttgttgtgacctgctccacaaatcattttaataaggctgcccatgagaacggcaagagaaagctgaccggttatatccggtgtaagaccggacgtgaaaatcatccttatgagagaaccggagagatcagtgcgcatgtcgcattggaattttatgaggagagcaaggaaaagtattttgtcatcggagcagtgatagattcggcgactgaggggcaggagacagtcgtgcgttatctcatggacaatgtgatgttagaggatgagatgtttaagatcggaaacagaccacggaccatcacagaattcaggtcgtttaacaataaaaacatcaaattatttgcaaagacgaacgcagaaggcaaaaaaatgatcaaacagcgttttggaagaatcgaggataagttcttccagctgatcccaaaggcgctggcgtttaaaccaattgatgatatcaaggactttgtctattcctatgtgctggatgaaaaagaagtcaatattgacaatctgcgcgaaaatgtaagaagctatcaggaactggaaaaaacgctggagggtgtgaaaaacagaattgaaaaactgtcagagatcgaatgccaccacaaagcagtggtggattgtatacaatctgaccggatgtatgaatattttatggcacagtcggatctggatctgaccaaagaacagatcggcgttctgcaggatgagatcaggcgcgaaagttaccgtctggaacagctgaatgcaaagtgcagcagcatgaaaaaggaactggagaataaggaggaagtccgcacactgcttttagcggaactgaacgccaactcagatttccagacgttggaaaagcagaaaaaatatttgaaagaattacaggaaaaagaagaaatacaatatcaggaaaagaaaagactgttagagagcggaaaaaaagcaggacagaaagtaaaaagactgcttgaaataccggatgtggatgaatgcatgaagcagtatgatgagctgctgcaccggctgaaggatacggaggacgttgttagtgcgcaggaactgattgaccgggcgatcgcttacaagaagcatatgagtacaaaactgcagaggaaaaatttagagattcaaagccggctgaatgagatcgcagcagacctgcaggagacagagcagcggatcagtaatctgaaacagcaccggttttcctatccctcggcagtcgagcttctgatgtcgcgtgtggagcaggaattgctcaagatcggaaggacggcaaagccgaggattttgtgtgaaatgttagaaatcacggatgaaacatggagaaatgcagtggagggctatctgaatacacagcgattttatgtgttggtagagccggaacattttgacattgcccttggtatttacgaaaaactgagaagagaaaagaaagcatacggtgtgggactgatcaattccggcaaactcgaggaatatgacattgcaccagcaggaagtctggcaacagttgtggagtcgaagagtatttatgcgaagcggtatgtgaatatggttcttggcaaggtacatatgtgtaagagagtggatgaattaaaacagtatccggtttctatcacaccaaattgcatgcgctatcagaatcatgtcgcatctgcgatcagaccggaaatctatacaactccatttatcggcaagaatgcatttaaagtccagtatgagcaggcactgcagaaaaaggaggatttaaaccgccagaaaatagaatgcaaagaccgtatgacacatatggaagcgacgctgcaatggctcgagtgggatgatgatacagatgtgaagtataggattacaattgtatcagaactgaaaaggacaggacttgagattgaaaaatgtgagacggagatccggaatctgcagcagaatacgaccatgatcgaaaagcagatccgtgcggatgaaatgcggaaagagtgtgaggaactgaaaagccacatttcaaaaagtgacagggaaagcggagcctgcgaactgaaaataagcagtgcaaaagacaggcttgtggagtgcgaggatgagtgcatacacaagaatgaactgatcacagacattgcccagaaagcagaaaacgagatcgtgctctggaagaaagaatacgaaaaacagaccggtgataagacattagagcagttccggcagaattttgaccggagacgtaaggcgaataatacaacaaaagagaatgcggataagaaaatgacaagtgcgatgtacgattacaaaacggcatttgattttggtgcagcagctacgttagaagcatatccggagtatgcggcagtccaggagagactggtgaactccgaacttctgaattatgaagaaaaagtaagaaaagcaaaattatcggcagaggaagaattccgggaacagtttttatccaagcttcaggaaaatatgaagcaggcacagggagagtttaaagaactcaataaggcattgaaagatatcaccttcagcaatgaaagatatgaatttttatatttgccgagcaaaagctatggaaaatattatgatatgatcatggatgattttaatgtagtgcagggagagtccattttcagcggtctgtttcatgagaatcataaggaagtcattgatgaactattttcaaagctcgcactggatcaggacaatgggatcaaggcattagatgaatttacggattaccgcacctatatggattatgatattaagatcacacatgaggatggcagctattctctttactctaaggtttgtgaggaaaagagcggaggcgagacacagaccccgttctatgtgacggtagccgcatcctttgtccagttgtacaataataatatcggcggagaggcaatcgggctggtgatgtttgatgaggcatttaacaatatggatgatgagaggatcggggcagttcttgagtttatgaacagactgccgcttcagatcgtgatcgcagcgccgccggataaaatccagtatatcggtccgaaaatgcaggagacattattagtactgacagacgataaagtaagcttcgtggaggagtatcgttatgcatccggtcgaaaataa

SEQ ID NO: 42334 - DNA, 1227 bp, Roseburia inulinivorans DSM 16841
atgcatccggtcgaaaataagatattgaatgatctattggacaaatacgaaaacagtaagctctccagaggagaaaaccagagagcgatccatattgcatttccgttcaataagaagacgatgccaaagtatttcgatgagagctcgcttgagatagaaaccattcacgcagccgcagaacagatggagcgtgagggactggtcgcaatcgcatggaaaaaccagaagcccggatatattatcgagaagcttgtactctgtgaggatcatgtggaagaggcatatgagaggcttggcaggaagccgaagagggaagccgaggcacgtacaaaacagattttggagcagttttatcagaaaacgcagggtgagataacaagaagctttttgtcccgcatgataacgcggctggaaagcgaacagtcagtaaaagaatatctcgacattatggatcacaggaaaacagaacaactgattgacactttagataaagtagagcagaacaggaaagaatgttatatcagggaattttccatagaacattttcatgacagcaaagtattcgagacactgatcccaaaaatctgtaaaatattccgggaggaaaatgaagaactgacaggatttgaaaatgaagaaattcttgcggagtatcagatttataaaacaccgggctatgtgtatatgaagggaaacgtacagatttacagcgccggaaagcaggctgcagatatcagtgctttcccggaaggaatcgctgttgcggtggggagtgaggaggatacgccggatatctgtccggatcagacgattgataaagtattcacaattgaaaatctgacttctttttaccgttttaaacaggaacacagtctggtgatctatcttggcggttatcataaccacagcagacgaaatctgctgatgcagatttatcagaaattgccggatgcacaatattatcattttggagatttggatgcaggcggattttatattttagaacacttgaaaagaaaaacagggatcccatttcaaatgtttcaaatggacattgaaacattgaaaaagtatgaggattatgcgaaaccattgacagaaaacgacaaaaagcggttgatgcagttagaaaaaatggagctgccggacgaagagagaaaactcatcacttatatgttacaaaaaggaataaagctggaacaggaatgtatttccgaatcccagtaa

SEQ ID NO: 42335 - DNA, 1416 bp, Roseburia inulinivorans DSM 16841
atgattttaaagaagaaaattccaaatgatttttataaattattccgcacaaaaaacagggaagcatatatgcagtttgtcacagccatttacgaggaaaacaatgaagtatatgcttctctcggtcttacgcaggaagagtgtgcgcttattattgagaatacgatcgagaaatcaaagatcgtgtggcaggaagaggacgatatggaggaaggagaaacgccggatgcattatttccaagcgattctccttccggcatgttaaaccacctgatccggtggggatggctgaaaagtgattttgatgagaaactgaatacctgtgtgatctctttcccggaatacagccagttgtatgtcgagttgtttaaaaagctgcagagtgatgatgacagccgggaaagagagagcatgctttccatttacagtgcgttgtttacttatcattctgacaatgaaaaaaacaatgatattttaaaaagtgcactgcgcacatccaaaagtctggggcagctgctgtccaacatgcaggatggaatgcgttcctattttgatgagctttcctcccagaaacattttatcgggattcagcaggtgcttgtggaggagattaacaacagcgacagcaaaaaatatgcaatcctcacaacgacggacagtttttaccggtacaaggaggcagtgaaagaacttatcagtgaaattttaaacgaaaatgatgagaaaaaagcagtgcttctgaaagaaaaaaaatctctcgaagcaggcacgcttttacagaagagaaatgagtacagattgcagtattgtgaggatacgagcaggatcgtgatgcagttggagcgggaatttgacatgatcgagcgcaaatacaataaactcattgagcagaaaaccgtttttgcaaagcgtgcgctggcccgcatccattacattttgcaggagggcgtcagtgaggaagataacatcatcaaactgatcaatctgttagaccgcagtgagaaaaaagatgagattttggtggaaatgagagagcgtatccgtttttcttcgcagtttaaaaatattacagataacagttttgctggaagaagagaccgcggggacggagcatttgcaccggtgatgctggacgaagaaatagacgcaagggaacagcacatgacggattttgttccaaagccgttgtatacaagaaacgagttacagagtttccgaagaaaaaataccgtggatggagtctttgtggcaacagaagagaccgtacagtctgtggaggatctggaaaaacttcttttcctctggcaggaagagacggaggaacgtctggcggaagatacggtatcggtggacggcgagatacggagtgaggacggactaacttattcgagacttgtgatcgggcagaatcaataa

SEQ ID NO: 42336 - DNA, 648 bp, Roseburia inulinivorans DSM 16841
atgaaagaaggcattggaaaaaagatgttacaatatatggagactgtctcacagggcgaggcagaaaatatcagaaaaacgatacaggatttattccggcagacatgcattttacaggtgaaatgtgacccggcaactctggtacagcacgacaatccgaggtatcaggtgtgtctgcgccacagagagtttatcgcggactatctgtctgtgctggactgcgagcttgtgcatgatccgcaggaacatattttccggatcacgggggatggcgttatgacagagcgtatgagccttatgacaacgaagctggtcattcttttaaaaatgatttatcgtgacaaaatcatgggggaaggtctgcatgcaactactacaaatctggcagagatccgtgagtatggaaaaaatacaaaccttattacaagacgtctcacaggacaggagtggaacgatgcacttgttctgatgaaaacgcatcagatgatcgaactgccgggtgccgttgccaatctggaagattttaccccgatttatatttacagtaccgtaaacgtgttctgctctgcgatggatatcaacgagctggtgcgcacctatcaggacgaggtggaagaacttctgacagaagaggaaaaagagaattag

SEQ ID NO: 42337 - DNA, 969 bp, Roseburia inulinivorans DSM 16841
atgtgtctgaacaactggggtggaattaatcataaagtattagaatttaatgaatatgtgaatttattcagtggaaaaagcggatctggaaaatcgaccgttatggatgcaatccaggttattttatatggaagcttcagtccgagttttttgaacaaggcggcggatgatgccaaaaaccgcagaagtgtcttaagctacctccgtggtgagcagaaagatggttctgcaaaccgtggaaactgcgatttctgctcggtcattgcgttggagatcaaggacacgggaacgcacatcactacgtgtgtgggcattgcgtttgaagtgagaagaaatgattctgagatcaaaaagttttcctatttcagccattccggaaagatgccggaaccggggtatatcacggaggagggcttctgttattccaatcaggatatcaaaaagctggtaaatgagagagccgtatcgaaggataaccgtggaaaaggggatgtcaaccgtatttacgcttccaaggaagcttatcttggaacgttatatgatgtcattttaggttacattgatccaaaccgttttatcacgatggaaaagagtgcaatcgcactgaaaatgacaaacggaacaggacagtttatccgtgattatatgtttccaaagagcacgtcagacacgatcggaacgatcagtgagcagttagatgcctaccgccagatcaaggaaaaaattgaggatatgcggaaacgtatcgaacttttgacagacgtaaaagagaccgggcaggagctggtgacgctccagaccgatatgatccgcacagagagttttatccgctgcattgatattgaggatctccgggcgaaaatagaggcagccgaggaggacaaaaaaagattgaagaagagcaggcacagctgcagcaacaggcagacacgctcgccgaagagcgcggagaggtcgaacaggagctga

SEQ ID NO: 42338 - DNA, 1458 bp, Capnocytophaga gingivalis ATCC 33624
atggaaagccctacacaacaactgatagatatacttagaacctctcccagtgtggaactacttaagtctaagaatagggtgcctataattactttcttcatagagacctttactgaagaccataaggtgctagctcaggaggtccttttccagcagttatcggactttatagaaacccaacacttggaagaggaggagagtgaagcgacttttgaggtgctttttgatgaaaaggcgaagcactatgtacgcaattggctcagcaaaggctttttgacaaactatcaggacgaacagggggaggtgtattatgagctttcgtctcattcggttaaggtgatagattggctttggtcactgaagaaagaggagtatatagggacagaatccaagttcagcagtatctttcatcaacttaaggagttagtggaatttaccaatgaggacaggcaggagcgtcttctgttgctggagcggcgtagagatgcactacaggagcagatagataagctcaagcgaggggaagaggtgcaggtatatgaggaatatcagatagtcccccgctttaaccaactcacccagcaggctaaggaactgctatcggacttcaaggaggtggaggataactttaaggagattaccaaggaaatctatcagaagcattcgggagagcagaccaaggatgccatattggaatttacctttgatgcattggatcagcttaagaatagtccgcaggggaagagtttttatgccttctttgagttccttgttagtcggcaattgcaagaggaatgggaggtactcattaggcaactctatgaggccttgcaggaaaaagatatccctataaaggattatttcctaagaggtatgcgtgggcacttgtatcacttaggcagacgtgtagataaggccaatgacaaaatggccgagaagcttagccgtatcattcgggaaaataatgccacggataaccaagctaccaaacatacaattaaagaaattaaggactttcttatctctctgagtagaaagcaacaaattcctactgtatcctttgaaatagagacagatgttgatattcagattccttttgataggcgacttactgaccagaaaaaagaacaggcaacatatcaagaacgttttgaaaatgcaaatactaccctttccgatgcggtacaactcgacaagttattttcagataagattataaacaaggagcttatcagggagcatattcgtaaagtactacaagagcggggacaagtttctttggctacacttatcaatgctaatggaggacttaagaaaggcttgacagaacttattgcttattttgcggtagccactgaaggtaagtatgtgattaataatgaaaaaatgcaggatattatctttgatacggagcaccagaagcgtatccaattccctgaaataattatctcattatga

SEQ ID NO: 42339 - DNA, 582 bp, Capnocytophaga gingivalis ATCC 33624
atgaaaaagttagaagaagtagaacaaccttatagcagggctatagtccagctacttagagggcctgtagacaaggaaacaggcttattatgggagcgtattcttacctatcagacggaaatacaagattatatacatactataggcttagaattagtcgtaagaaaagaagaaggatttgcttttgtaaggcaattggaagacgagcaagggaataccatgggcttggtcaggaggcaatctataggctttgagacctcagtagtgctggtggtactcaggcaattattggaggattttgataataatcccactgattttcagtcttttgaaaaaataatttctcattctgagctaaaggaggaggtaggcttatttttccaagaagggtatgacaaggtaaagtttttaaaggatatagatagatatataggcaatgctaaggacctgggatttctcaaggtgttaaattccaaggaagatacacgctatcagatacataggattatcaagcaaaagataaccctagatatattggaagattttaaacaaaaactatcagactatgtgggaactatttag

SEQ ID NO: 42340 - DNA, 3399 bp, Capnocytophaga gingivalis ATCC 33624
atgtgggaactatttagtaccaattcggatacggcaggttttcgcctgcaatatatggaagtactcaattggggaactttccacaaggagattgtaaggatagcacctcaagggaacaattctttactcacgggtgccaatgcatcgggtaagagtacctatatagatgcgcttctgacccttttggtacccatacacaacaagcgtttttataaccagtcttcaggagtggaaaaacgaggagatcgtacggaagaatcctatgtattaggctattatgggaatatcctaaaggaaggagcctcttctaccaccacccaaatgctccgagacaaacgggatacgtactctattatattagcttcattttcaagtactacccagcagacagtaacattgtttcaactgcgctggttcagtgggcaagatctcaagaagagttacgggatcgcccatcgtcccttagaaatagctaaggattttcccaaatttgatagtcgtggagattggaaaaagctcttagaggccaagtataactatgacaagtccaagcgcaagcaagtggagtttttctcaggacctaaggactatcagagtgctatgcgctccctctttggcatgcgttcagagaatgctttctctttattcaaccaaatggtaggggtgaaagttttggacgatttggatgattttatctcgacccatatgctggacaagtgggattctgaagagagatacgaagaacttagaaccagcttttttacccttacagaagccaatgataatatagagaaagctaaactacaggtagagatgcttactcctatctgtgaacatataacaatcttacaacaagctactgagcagagtagggaactggcgcagctacaatctgagagtgtgtatggatttgcccaaaaatatgtaagtcttgctacagacgagatagctgagcaaacagctattttggaagaagtaaagcagcacaatgttgctctacaagatcaggacgaagcattagatactaagcggttggacttggaacaggatatccgcaacgatgcagtgggcaagcaaatagaaacactaaagaaagaaaagaaagaaaatctcttggctaaggaggaacgcatgcgcaatgccgaacaatataataggatcgtggcttcttttgaactgaagagtgatcctgatgaggagattttcaaagcaaacaaggaggaagcacaacttttattcaagaaaatcagatctgaggagttcttacaagaggataattgccgaaagttggtcaatgaaaatgaggaagtagccctgcagatggaggctttacgggagaatatagagatattgcgcaggaataagaacaatatctcaggtcgtgaggcagctatacgggacgaaattctctctgccgtaggagctactaaggaagaaatcccttttataggcgagcttatcaaggtcaaggaatcggaaggcgcttgggagtatgcaatagagaaggtattacaccatactgccttacacttggtgatacctcctaagttctattccaaggtcaatgcgtatgtcaatacccataaccttaaaggacgtgttcgctactataagtatgagcaggtaccgcctaagatattccaacaaccacgacaagagcagcgactgctactcgataagatagagataaagcccaaacacccctatttcctttgggtggaataccttatagagaaccagcataattttgtttgtgtggaagaattaagtgaatttgagcaatttgcagagatggctcttactcctaagggattggtaaagtatcgtaagggcaagcatgagaaggacgacagagagaccactgcaaagcgtagcaactatgtcttgggttgggataataaagaaaagctcagcgaactctccaaggagctcgtgtgcctacaagagataaaaaagaagaaagacaccaccctgaaggagttacaactcaaaagagaggaactcagaagtaagcaaattattattggtgatttaaataagcaatttgctaaatttgataccatcaattggcaagtttatgccttgaaaatccaagaattagagaccgctatagaacaattggagcagacaaataatcgaatcaaagcccttcaagaacagctcaagaaggtcaaagaagagcaagctgcccttaagataaccctaaaggaagtggggaaaaaagagttagtcatagaacaaaccatagctcaaatcactgagaaaaaacaacaacatcagaccattttggcaactaatccagaggtggatatagcactgtttgtggccaaataccgtcatctgtctgagctgtcttatgctaatatagagacacacagacaggcttttgcctctgcacttttcaaacaaatagaggagaacaagcaactgattagcaaaaaggaaatggagattaccaaagcaattgctaagttcaagaatccatcagcggctattatagaaaaatttaaggattggacagcagatgcgtatccattgcctgaaaaaatagaccttgtacttttgacagagtatcagcattatttggacaaacttaagaaggataacctacctaagtatgaaaagaagttccaagactacctacatgagactactattcacaaaatgggaagttttgccaccttctttgacagttgggcagaggagatacgagagaacatccgtcagctcaatgaatcactcaaggaaataaacttcaataccaagcctgaaacctatatacagttggtacatttccaaagagtaagcgccgatgtaagtgagttcaaggacctactcaggcgcgcaagggtcaatatcaatgagttttctaaccaagaagaaggacgtagattgcactttgaacaacatatagcccccttcatcaagcggttagaaaatgaaacttggcgtaagaaggtgttggatgtacgtcaatggtttagctacaaggcagaagaatcctttagagagacaggtattaaggccaagacttacgagcgtatggggcagctctcaggtggggagaaggcgcagctcacttatacaattttaggttctgccttggcctatcagtttggtatgctcaaggacggaatgcagggtaattctttccgctttatcgctatagatgaggcctttaaagcacaagatgaggagcgtgcatactacctcatcaccctctgtcgccagctacacctgcaattgctggtggtaactcctagtgataatattcatatagtggagaatgatattgcttttgtacattttgtctctcgtgctaagaataagacctcgcacttgatcaatatgcctatagaacaattcaaggctgaacgggaaaaatactttcaattatga

SEQ ID NO: 42341 - DNA, 1161 bp, Capnocytophaga gingivalis ATCC 33624
atgataacccctgaagaaatacgcaaaaaaaccacccaaaagtatctgccttatctttctgatatagcggccgataccccttttgcacctattgagatacgaggggataagacctatgctaaaaataatttttcagattttgcccaacaaatagaaagcctcaatagtcaggcaaaggatcgcaaaggctttggctataccgtggattataagagaacacgtaccaaatacttaggcgagcaggatatacccgtgagtatctactttgagacagaacaggattttcttcgattcctttccaaagaaaaggaagttgccaaattcagagaaaatatagcccttattatctcaatttttcctcaactaaccccatggatacagaagtatccaaagaaagtagtacaaaatgagacagaatggacagatattctgaaggtctgtagctattttaaagaaaatcctcatcctaattgctatattagagaactacccatagcggtacacaccaagtttgtagagcaacacaagggcatacttcaggaattgctcaatatactgctggctgatactcttgaggtgggagctactcactttgaacaacgctttcatctcaaggacaaagaaccattggtacgctttcgtatcttggatcaggatatagctgatgcctattttcaaggaatagatgatatggctattcctatctccctcttcaatcgcttagctcttcctgtggagcgggtgtgggtggtagagaataaaacctcgctctataccactctcgcttttcctgctatggagaagagcattgccatttttgggagtggctatggggtggccgcactcaaagaagccagctggcttgccactaaaaagctatattattggggcgatatagatgctcaaggctttgaaattctctctcaattccgtacttatttcccttcggtagagagtttccttatggacgaggctacatttgagcatttctatgaggcatacgagggcactccttcatctattacggtggaactgaggcttactccagaggaaaaagctctttatgaaagggttaaaaccgaaaatctccgtttagaacaggagaaaatcccacaagattggttactacaaactttggtacttataactacctatttgtaa

SEQ ID NO: 42342 - DNA, 1470 bp, Xanthomonas fuscans subsp. aurantifolii str. ICPB 11122
atgaagcaccaggcccgtatcgccggctatcggcaactgcgcgagcagccggtatggaaactgcttgccgccgaccacgcacccgaactgatcggcctgctgcagacggtgctgatggacggcgcacgccgcctgccttcggccgtgttgcacgagcgtttgcagcgccagctcgacgccttgcgcgccgacgagctctcgcgcgaactgccgcgcaccgcacaggcgtatctggcgcattggttggcacagggctggctggaacgccgcctgcccgaaggcgcagccgaagaagaatacgaactctcgcgtgccgcgacccaggccatccgcttcatcgtcggcctgcgcgaaagcagcagcagcgccaccgaaagccgcctgtcgctggtgatccagcaactggtgcagttggccggacagaccgaagccgatccagagctccggctggccgcgctgcgcgacgaacgtgcgcgcatcgatgccgagatcgaacgcgtggcttccggccgcgtggcggcgctggacggcaaacgcgcgctggaacgtgcacgcgacctgatccatctctccgacgagctggccgaagatttccatcgcgtgcgcgacgatttcgagcagctcaaccgccaattccgcgagcgcatcatcgacgacgaaggcgcgcgcggcgatgtgctcgaacaactgttcgacggcgtggatgtgattgcagacagcgaagccgggcgcactttcgaggcgttctggagtctgctcaacgacacccagcaaagcagccagctcgaccaggcgctggatgcgctgcttgcccgtgggtttgcgcgcaagctcgatcgtcgcgaacgcgcctttttgcgtgggctgaccggcaccttgctggagcgcggtggcgaggtgcacacggtgatgcagcatttcgcgcgcagcctgcgcggtttcgtgcaaagccgtgggtatctggaacagcgccggctcaatcaattgctcaagcaggcgcagggcgaagccttgcaattgcgcgacagcctgcacgccaccaccgccaccggctatacgcaggcgctcagcagcagccgcctgcgctcgttgtcgcaatggcggctgcacgatccacggctcacccaggtcgatggacgcgtgcaggccgccgacgcggccgagatctcgctggatagcgtgggcgatctggtggcgcaatcggagatcgatgtgcgcagcctgcgcaacgacctgcatgagctgctcggccaacgcccgcggctgacgatcggcgacgccttgcaacaacgcccggccgtgcagggcctgggcagcgtgatcggatacctgtcgctgggcacgcgccacggcatggtgatcgaaggacagatggaaacggtgcaatgggaaggcagcgacggcgccgtgcggcgcgcgcgcattcccctggtgtggtttacccgggagaaacgcaatgaactggtctga

SEQ ID NO: 42343 - DNA, 627 bp, Xanthomonas fuscans subsp. aurantifolii str. ICPB 11122
atgacgcaaacctccagtgccgagccacgcggcgagctgtttttgggcgacaccggcacgctgccgttcgatgcgcggcgtgcgctgtgccagttgctggcagggcccagcatcgatgcgcaacgtcacggcgcgctgtggccggcattgttgcgcaatgaggtggcgatccgccaggtgctgtgcgagctgtttctggagttggtgctcgaccgcgagggcggggtggcctttacccgtcaggccgacaccgcagagctggaatcgcccaccttgctgcgcagtgcgccgctgacgtttatcgagtcggtattgctgctgttcttgcgccagcaactggccgaggccgacacgcgcggcgagcgtgcagtggtggacgaggcgcagttggtggaagccttgtcggtgtacgaaaagaacgtgtccaccgatcgggcgggcttcgcgcggcgggtgatgacggcgatcggcaagatgcgcgacaaccagttgctgtcgcgcttgcgcggcagcgaggagcgctatgaagtgtcgccggtgttgaagctgttgttttcggcagaagatgtacaggccttggtggtggcctatcgggagctgcgtgagggcgaggttgcgctggattga

SEQ ID NO: 42344 - DNA, 3996 bp, Xanthomonas fuscans subsp. aurantifolii str. ICPB 11122
atgaattcccagtccaatctgtcgccggcgcagccgggtgcctccttgtttgccgagacgctcgccgagcaacgtgcgcagcagttccgcatgcggcgcttgcaggtgcacaactggggcaccttcaacgggctgaccgaagtgccgatcgcggagaagggcttcctgttcgtggggcgttcggggtcgggcaagtccaccttgctggatgcgatgtcggcactgctgacgccgccgagcatcgtcgacttcaacgctgccgcgcgcgaagccgaacgcagtgggcgcgatcggagtctggtgtcgtatgtacgcggtgcgtgggccgatcagcaggacagcgcgtccggcgaaatcgccacgcaatacctgcgcaagggcgccacctggaccgcattggtgttggagtacgcaaacgcgcatggccagacggtgagcctgatccggttgttctggatcgccggcagcggtaacgcggcggccgatgtgcggcgccactacatggtcgcgccacgccgtttggacgtggcgaccgagctggatggcttcgatctcgacctgcgcaggctcaaggcgcggttgggcgatgacgttgcgcatttcgacggcttcgccggctacgccgaacgtttccggcatgcgctgggcatcggcaacgaaatggcgttgcggctgttgcacaagacccagtcggccaagaacctgggcgatctcaatgcattcctgcgcggtttcatgctggacgagccgcggaccttcgaagcggccgaccggctagtggaagattttgccgaactcgatggcgcgcaccatgcagtggtcaccgcacggcgccaggtagaaaccctgagccctgcgcgcgagcaccacgcggcgctgatggcgctgcgccacagcgtcggcgagttgcgcgagctgcagctgggtgtggacagctaccgcgagcagcagcggttggccttgctggatgaacggctgcaggagctggacaaccaggaccgtggactggccggcgaagaaggccagcggcgcgaatcgctggataaccacgagcagaagctgctcggcttggagcgcgagcagcgcgccgccggcggcgagcagatcgaagaactggaacgcgaacgcgcacgcgtcgagcgcgagcgcgacgaacgcctgcgccgccgtgcgcagatcgaacaggcctgccgtcagctcggtaccgcgttggcggccggtgccagcggctttgccgcgcagattgcgcatgcgcagaccgtgctggataacggcaagcacgacgccagcgcgctggacgaggccatcgccgagcgcatgggcgcgcggcgtgacgacgagcgccgctttgccgagatccgcgccgaactggaggcactgaaaaaagcgccgtcgagcatgccggcaccgatgcaggccctgcgcgcgcggctgtgcgaagacaccggcattgccgaggccgcgctgccgttcgttggcgagctggtgcaggtacgcgaggaccagatcgcctggcgcggcgcgatcgagcgtgtgctgcacggctttgcgcaatcgctgctggtggacgagcggcattacgcgcaggtcagcgaatgggtcaaccgcacccatatcggtacgcgtctggtgtacttccgtgtgcgccgtaacgacgagctgcattcgcggcgggtcgaccccggcgcgctgcccggcaagctgcaattgcgcgagcacgcctttaccgaatggctgcgcaacgagctgacccgccgtttcgactacgcctgcgtggacaacgccgcagcactgcgcaacgccgaccgcgcgatcacccgcgagggccaggtcaagcatcctggcgatcgctatgagaaggacgaccgccacgcggtcaacgaccgcaagcgctggctgctcggtcacgacaaccgcgacaagctcaaggtgttcgaacgcgaagcgcagacgctggcgcagcgcatcgccagctgcgatgccgatgtggcagcgctgcgcaagcagcgtgagcaggaccaggaacgccaactggccgcgcacaccctggtggagcgcgactgggacgagatcgacgtcggccccaagctgcagcgcctgagcgatatcgacgaacagttggtgcagctgcgcgaaggcaacagcggcttgcgcgcgctcggccaggccatcgacaccgcacgtaccctgcgcgaccaggccaagcgcacctatgaggatgtgcggctggagcgcgcgcaactggcgcgcgagcgcgtgcggctcgaacagcagcaggcggcatgcgcgggccgcgccggtaccgccacgctcacgcccacccagttgcagggcttgcgggaacggcttgctgcattgacgccgctgtcgctggacaatctggaagcgcatttccgcgtggtcgagcgtggcctggccgagcagctggccgacagccagggccgcgacagccggctcagcgcgcaattgctggaatgcttccgcaagtattgccagcagtggcccgaagacagcggcgatttcaccgtgagccttgccagcgccgacgatttcctcgcgcgcctggaccggctggaaagcgatggcctgccgcgtcacgagcatcgtttcttcgacctgttgcagacccagagcaagaacaacctgctggccttgcagcgccacaccgccgaggcccacaagggcatcaagcagcgcatggacgaggtcaacgccagcctggagcaggtgccgttcaaccgcgacaccatcctgaccatcgaggtcggcgaccgccgcctggccgaggtgcaggaattccagcagcagttgcgcgcggtgctgtcgcatcaacagaccgaagaccgtgccctggccgaagcgcagttttccaccttgcgtgcgctggtagcgcgcctgggcgcgcaggaaccggaggcacgccgctggcgcgaacaggtgctggatgtgcgcctgcatgtggagttcatcggtgtggaactggacgcgcagacgcgcgcgcaggtggagatctaccgcagcggcgccggcaaatccggcggtcagcgccagaaacttgcaaccacgtgcctggcggccgcgctgcgttaccagctcggcggcgaagacggcgaactgccgcgctactgcgcggtggtgctggacgaagccttcgacaaggccgacaacgaattcaccgcgctggcgatgaatatcttcgagaacttcggcttccagatggtggtcgccacgccgctgaagtcggtgatgaccttggagcccttcatcggtggtgcgtgctttgtcgaaatcagcggccgccacaactccggcgtgttgctgatcgaatacgacgagcaggcacagcgattgaagctgccggagcgctcgcgtggcgatgagccggcagttgccgatgccactgacgctgcgccgtcgatcgaggctgcgggcgagcctgcaggagtgcagggcgctgccagcgcagatggcacggcaaccgacggcgtcccactgcacacggcatcgcctgcgacggaggagaccccgcccgcagcgcaggaaacgcagactggtcagcgcaagccggcagtcgcgacgacgaacaagcagaacaagaccgccaagaccgcatcttccacgcgcgctgcggcacagcctcaagcaaaacgcccgaagaaatcgccttcgcgcactccggctctggctggcaagccggcatcggacaaacgcacagccggcgtgccggcggtgtcgtcaaaagccgcatccaggtccaacgtgggcaagaccacgcggtcttcaaaaacgccgggcaagcagattgcggccacaagcgcatccaacgccacgtccaggaaggtcgccgccgccaagccacgtgcaacagccgcctcggccgggcgaccagcgcgtggcgccggcaagacaaccgcgacgcgcgcggcgacgaaaccgtcaccggccgcaacgcgcggcgccaaggcaggcactgcgcaggcgcgcggcaagcgctga

SEQ ID NO: 42345 - DNA, 1470 bp, Xanthomonas fuscans subsp. aurantifolii str. ICPB 10535; identical to SEQ ID NO: 42342

SEQ ID NO: 42346 - DNA, 627 bp, Xanthomonas fuscans subsp. aurantifolii str. ICPB 10535
atgacgcaaacctccagtgccgagccacgcggcgagctgtttttgggcgacaccggcacgctgccgttcgatgcgcggcgtgcgctgtgccagttgctggcagggcccagcatcgatgcgcaacgtcacggcgcgctgtggccggcattgttgcgcaatgaggtggcgatccgccaggtgctgtgcgagctgtttctggagttggtgctcgaccgcgagggcggggtggcctttacccgtcaggccgacaccgcagagctggaatcgcccaccttgctgcgcagtgcgccgctgacgtttatcgagtcggtattgctgctgttcttgcgccagcaactggccgaggccgacacgcgcggcgagcgtgcagtggtggacgaggcgcagttggtggaagccttgtcggtgtacgaaaagaacgtgtccaccgatcgggcgggcttcgcgcggcgggtgatgacggcgatcggcaagatgcgcgacaaccagttgctgtcgcgcttgcgcggcagcgaggagcgctatgaagtgtcgccggtgttgaagctgttgttttcggcagaagatgtgcaggccttggtggtggcctatcgggagctgcgtgagggcgaggttgcgctggattga

SEQ ID NO: 42347 - DNA, 4023 bp, Xanthomonas fuscans subsp. aurantifolii str. ICPB 10535
atgaattcccagtccaatctgtcgccggcgcagccgggtgcctccttgtttgccgagacgctcgccgagcaacgtgcgcagcagttccgcatgcggcgcttgcaggtgcacaactggggcaccttcaacgggctgaccgaagtgccgatcgcggagaagggcttcctgttcgtggggcgttcggggtcgggcaagtccaccttgctggatgcgatgtcggcactgctgacgccgccgagcatcgtcgacttcaacgctgccgcgcgcgaagccgaacgcagtgggcgcgatcggagtctggtgtcgtatgtacgcggtgcgtgggccgatcagcaggacagcgcgtccggcgaaatcgccacgcaatacctgcgcaagggcgccacctggaccgcattggtgttggagtacgcaaacgcgcatggccagacggtgagcctgatccggttgttctggatcgccggcagcggtaacgcggcggccgatgtgcggcgccactacatggtcgcgccacgccgtttggacgtggcgaccgagctggatggcttcgatctcgacctgcgcaggctcaaggcgcggttgggcgatgacgttgcgcatttcgacggcttcgccggctacgccgaacgtttccggcatgcgctgggcatcggcaacgaaatggcattgcggctgttgcacaagacccagtcggccaagaacctgggcgatctcaatgcattcctgcgcggcttcatgctggacgagccgcggaccttcgaagcggccgaccggctggtggaagattttgccgaactcgatggcgcgcaccatgcagtggtcaccgcacggcgccaggtagaaaccctcagccctgcgcgcgagcaccacgcggcgctgatggcgctgcgccacagcgtcggcgagttgcgcgagctgcagctgggtgtggacagctaccgtgagcagcagcggttggccttgctggatgaacggctgcaggagctggacaaccaggaccgtggactggcaggcgaagaaggccagcggcgcgaatcgctggataaccacgagcagaagctgctcggcctggagcgcgagcagcgcgccgccggcggcgagcagatcgaagaactggaacgcgaacgcgcacgcgtcgagcgcgagcgcgacgaacgcctgcgccgccgtgcgcagatcgaacaggcctgccgtcagctcggtaccgcgttggcggccggtgccagcggctttgccgcgcagattgcgcatgcgcagaccgtgctggataacggcaagcacgacgccagcgcgctggacgaggccatcgccgagcgcatgggcgcgcggcgtgacgacgagcgccgctttgccgagatccgcgccgaactggaggcactgaaacgcgcgccgtcgagcatgccggcaccgatgcaggccctgcgcgctcggctgtgcgaagacaccggcattgccgaggccgcgctgccgttcgttggcgagctggtgcaggtgcgcgaggaccagatcgcctggcgcggcgcgatcgagcgtgtgctgcacggctttgcgcaatcgctgctggtggacgagcggcattacgcgcaggtcagcgaatgggtcaatcgcacccatatcggtacgcgtctggtgtacttccgtgtgcgccgtaacgacgagctgcattcgcggcgggtcgaccccggcgcgctgcccggcaagctgcaattgcgcgagcacgcctttaccgaatggctgcgcaacgagctgacccgccgtttcgactacgcttgcgtggacaacgccgcagcactgcgcaacgccgaccgcgcgatcacccgcgagggccaggtcaagcatcctggcgatcgctatgagaaggacgaccgccacgcggtcaacgaccgcaagcgctggctgctcggtcacgacaaccgagacaagctcaaggtgttcgaacgcgaagcgcagacgctggcgcagcgcatcgccagctgcgatgccgatgtggcagcgctgcgcaagcagcgtgagcaggaccaggaacgccaactggccgcgcacaccctggtggagcgcgactgggacgagatcgacgtcggccccaagctgcagcgcctgagcgatatcgacgaacagttggtgcagctgcgcgaaggcaacagcggcttgcgcgcgctcggccaggccatcgacaccgcacgtaccctgcgcgaccaggccaagcgcacctacgaggatgtgcggctggagcgcgcgcaactggcgcgcgagcgcgtgcggctcgaacagcagcaggcggcatgcgcgggccgcgccggtaccgccacgctcacgcccacccagttgcagggcttgcgggaacggcttgccgcattgacgccgctgtcgctggacaatctggaagcgcatttccgcgtggtcgagcgtggcctggccgagcagctggccgacagccagggccgcgacagccggctcagcgcgcaattgctggaatgcttccgcaagtattgccagcagtggcccgaagacagcggcgatttcaccgtgagccttgccagcgccgacgatttcctcgcgcgcctggaccggctggaaagcgatggcctgccgcgtcacgagcatcgtttcttcgacctgttgcagacccagagcaagaacaacctgctggccttgcagcgccacaccgccgaggcccacaagggcatcaagcagcgcatggacgaggtcaacgccagcctggagcaggtgccgttcaaccgcgacaccatcctgaccatcgaggtcggcgaccgccgcctggccgaggtgcaggaattccagcagcagctgcgcgcggtgctgtcgcatcaacagaccgaagaccgtgccctggccgaagcgcagttttccaccttgcgtgcgctggtagcgcgcctgggcgcgcaggaaccggaggcacgccgctggcgcgaacaggtgctggatgtgcgcctacatgtggagttcatcggtgtggaactggacgcgcagacgcgcgcgcaggtggagatctaccgcagcggcgccggcaaatccggcggtcagcgccagaaacttgcaaccacgtgcctggcggccgcgctgcgttaccagctcggcggcgaagacggcgaactgccgcgctactgtgcggtggtgctggacgaagccttcgacaaggccgacaacgaattcaccgcgctggcgatgaatatcttcgagaacttcggcttccagatggtggtcgccacgccgctgaagtcggtgatgaccttggagcccttcatcggtggtgcgtgctttgtcgaaatcagcggccgccacaactccggcgtgttgctgatcgaatacgacgagcaggcacagcgattgaagctgccggagcgctcgcgtggcgatgagccggcagttgccgatgccactgacgctgcgccgtcgatcgaggctgcgagcgagcctgcaggagtgcagggcgctgccagcgcagatggcacggcaaccgacggcgtcccactgcacacggcatcgcctgcgacggaggagaccccgcccgcagcgcaggaaacgcagactggtcagcgcaagccggcagtcgcgacgacgaacaagcagaacaagaccgccaagaccgcatcttccacgcgcgctgcggcacagcctcaagcaaaacgcccgaagaaatcgccttcgcgcattccggctctggctggcaagccggcatcggacaaacgcacagccggcgtgccggcggtgtcgtcaaaagccgcatccaggtccaacgtgggcaagaccacgcggtcttcaaaaacgccgggcaagccgattgcggccacaagcgcatccaacgccacgtccaggaaggtcgccgccgcatctgcggcattgaaaactgccgcagccaagccacgtgcaacagccgcctcggccgggcgaccagcgcgtggcgccggcaagacaaccgcgacgcgcgcggcgacgaaaccgtcaccggccgcaacgcgcggcgccaaggcaggcactgcgcaggcgcgcggcaagcgctga

SEQ ID NO: 42348 - DNA, 1437 bp, Actinobacillus minor NM305
atggacttccatacactttctttgttacgggcaaatcaccccgcttggcggttgttatgtgccgaacacgccgtttttattatctcttttctctataaaacctttattttacctaaccttcgtaccctttcttctcacgatttaatcgaaaaattagatgatgaattattccaattgcgtgagcaatttggtgagaaatcttatccaaaatctgccttagattatctgaatgattgggcggataaagacaaacgttggttgcggaagttttataaggaaggaacggatgaagtgcagtttgatttgtctccggcagtagagaaagccataggctggctggttacattaacagagcgtcaatttgttgggacggagtctcgcttattgacgctttttgatctactcaagcaaatgaatgatcgcacggaaactgatccgcaaaaacgtattgcggaacttcacaaacagcgccaagaaattgaagctgaaattgctcgtattgagcaaggtgatctgaacttattagatgatacggcattgaaagatcgcttcctgcaatttacacaaggcgctagagagttgctatcggacttccgagaagtagaacataattttcgtgagcttgatcgaagtgtgcgcgagaaaattaccctgtgggaaggttcaaaaggtgaattactgacagaaattatgggggagtgtgatgctattgcggactcggatcaaggtaagagttttcgtgcgttctttgattttttgctttccaatcaacgccaacaagaattttcgacattacttgatcgagtaatggagttggaggcggttcggtctctaaatccagacagtcgccagcgccgaattcattatgattggcttgaagctggggaacatacgcagcgtactatcgcagggctgtcacagcaattacgttattttttagataatcgtgcgtggttagaaaatcgcaggattatggatattctgaaaagcatcagtaaaaaagccattgcgctaaaaaatgagccaataaaagaaacagcaatggaattagatgattttaaattttccattgaattaccactagaacgtccactttacagtccaacgataaaaaccaaactctccgcacagcctgagcttgctgatgagacggatattgatcctagtgcactttttaatcaaattgttatcgataaggctaaattagtccgcaatgtacgtcaagctttgcaacatcaaactcaaatcactttgcaaaaaatcattgaaaatacgccgcttgaacaaggattggcggagctattagcctatttacaacttgggcaagagcaaggtgttaggttggtcattgatgaaaacatacaagatgaaattcactggtgcagtggagaacagatacgttcagcacaactgccgagagttattttcagtaaatag

SEQ ID NO: 42349 - DNA, 576 bp, Actinobacillus minor NM305
atgtcgcatacttattctgcaactttaatccaacttaccaaaggcattttttatcgggatgagaatgaaactttatgggtggagcttatcgagaaacaggcacaaatccgtgattactttgccacactttatctcgacctttggctagatgaagcggaaggttatgcttttttaaaaccgaaagcgagtgaagatgagagcgtagaaatacctaaattaatcacacgccgtcagctttcttttcatgtcagtttaatgcttgcgctgttgcgtaaacagcttgtggaatttgactcacaaggcggtgcaacccgtttggtattaagcctcgatgaattaacagaattaatgcaaacttttttgccggcacaaagtaatgaggcaaaacaaaaagatcaaatcgaaaccctagccaataaagtggtggagcttggttttctacgtaaattaaaaaacacgcaaaatcagcctcattttgaagtacagcgtatcattaaagcctttattgaggctgattggctagccaattttgataactggctgacagcttgcttagaaagtagaggagaaaaataa

SEQ ID NO: 42350 - DNA, 3345 bp, Actinobacillus minor NM305
atggatgtatttgagttagatttttcaaatgatcttcagcagtccggctttcgcctttctcgccttgagattttcaactgggggacttttgataagaaaatttggtcgctgaatttgaacgggaaaaacagtttacttaccggcgatattggctcggggaaatcaacggtagttgatgcgattactactttgttaatccctgcacataaaattgcgtataacaaagcagcgggcgcagaggcgaaagagcggagcttacgttcttacgtattaggtttttataaatctgaacgaaatgtagaaaccggcacatcgaagcctgtagcgctacgtgatgcaagccaatatagcgtgattttgggaatatttgaaaatgaagcaaatgggaaaacggtttccattgctcaagtttttgcgataaaagaaaatcaaaatcagccaataagattatacgttgtcgcagaaaaaaaactctcgattcaagttgattttgccaattttggttcagattttacggcgctccgtaaaaaattgaagggaaaagagattgagtattttgatacatatccaccttatgcggcttggtttaaacgccgttttggtattcaaaacgaacaggctttagagctatttcatcaaactgtttctatgaaatcggtgggtaatttaacggattttgtccgttcgcatatgctagaaccttttgaagaaacgcctaatcgtatcgctcatttaattacgcattttgatgatttaaatcgttctcatcaggcagtagaaaccgctaaaaagcaagtaacattactcacccctcttgcagaaaacagtcaaaaatacaccgctttaacagcggaaatcgcctatattcgccgatgtcgtgagagtttgcatagctatttttcaggcttgaaattggatttattggcaaggcgtttggcagatctacaagcagatttagtcaaaaaccaagcaaaagtggcgttgctaaacaatgaaaaatcgcaacaagaagtacatatcgaacagctcaagcagcatattcgagaaaatggtggtaaccgcttagaagctctaggtttacaaattaaagaagctcaacttaaagcaaatacactgaaaaaacgggcgaatgattaccgtagtttattgctgaagttagatgaacagccagcagaaaatgaagatgagtttgcaatacagcagtacactgtgggcgagaaattggccgagtggcaacagcgtgaaacagaattacaaaatcaactgacagaaatcgctgttgagttacatcagcttaataatgaaaccagcgctatcgggcaggaaattcagagcctgaaacagcgtaagagtaatattccttcgcagcaaattaccattcgtgagcgtatttgtgcagcactgaatttaagtgaagaaaatttaccatttgttggagaacttctccaggttcaagaaagcgagaaaacgtggcaaggtgcagcagaacgccttttgcataattttggcctatcaatgttggtggcggaaaaagattatgtcaaagtgagtgaatgggtgaataacaatcacttaaaagggcgtttggtctatttccgagttggaaaagtgcgtgagcaagcaccttttgtagtgggtagtttagcggcaaagcttgctatcaagcccgacacgccttatgcagattggttggaaaacgaattatttcatcgttttgatcatatttgttgtacagatctggatcatttccgtaaagaggcaaaagcgattacacaaacggggcagattaaggataaaagtggccgacacgaaaaagatgatcgccatcatttagaagatcgtagccgctatattcttggttggtcaaataaggaaaaattgcaagcgttcgaagcgaaattggcacaattaaatacgaaaatcagcgaacttcgtcaaactggtgcaaaattggaagaagagaaaacagcctgtgtggagaaaaaagaggcagcaacgcagttaaaatttttccagtcatttaacgatattgattggcaaagtgccgttaaatctttgcaaatgttgcaagcagaatacgatgaattgaaagcagcttcagatgtgttgcaacagctacaaagcaagttagacgaaagcctgcttgtgttaaatgcgaagttggcggaaattgccgaagccgtaaaagcgcagggtacgctagaagaaaaaattaagcatagtgagaaaacacaagctgagttgaaaaaagagctagcagaaaatccggtagatacagaagtattccaagccttagagcaacaacgagcagaaaaactggaggggcagcgcttatatgttgaaagctgtgatgggcaggaacgtcagttgcgggagctgtttcaagcagaaattgatcgcaaagatcgccaagccaaaacgctcaatgatcgcttaattgcggcaatgcaagattttaaacatcaatacccaagtgagacggtggaatttgatgctaacattgaagcttgctttgagtatgaaaagttattgaaaaagctgaatgatgatgatttgcctcgcttcgaagcacgttttaaagagttgcttaatgtcaataccattaatgaaatcgccaatttaaatgcgcagttaaatcgtgaacgtgagactatcaaagatcgtattgagcagatcaaccaatcactgtttgagattgactacaatccaaatcgttatatcaaattggagccagaaaccagtctagatgcagaaattcgtcagttccaacaggagctgcgagcttgtacggaaggcgcattaacggggtcggaagatagtcagtattctgaagctaaattcttacaagttaaagccattattgaccgctttaaagggcgtgagggcagcacggaattggataaacgttggacggcaaaagtaaccgatgtgcgtaactggttcttgtttaatgcggcagtgcgttggcgtgaagatgatagtgagtttgaccgttattcagactctgatggtaaatcgggcggacaaaaagaaaaacttgcttatacaattttagcggcaagtatcgcttatcagttcggtattggctcacaaaatgcacgaactttccggtttgtgatgattgatgaagcttttggacgtggttcagatgagtcagcacaatatggcttggaattgttccgcaaaatgaatttacagctgttgattgttacaccgttacaaaaggtgaaggttatcgaaccttacgtaaatagtgtaggttgggttgaaaatcttggcggcaaagagtctagattattgaatttgactattgatgaataccatcaacgggagcaacagcaatga

SEQ ID NO: 42351 - DNA, 1008 bp, Actinobacillus minor NM305
atgaaatggacaacggaggcagatctaaaaagccagttacaaaaacgttgggaaaagggcgaatttttgcaaaattttctgcaaaataaaccgcttttcccgttaaagcttacattgaaaaggccaacgagtaacgatattaccaatgaatttcaagcggtaaaacagtgggcgactttgctgtctaccttgtctcattatcgtgtggaatggcaaacagttaatcaccgtattcaaggcgagcaaaaattgccaacatcaatctgggttgatacgcttgaaaatatgctggacattttgcgtaagcagaaagaatttaagcaatttcaacaactgactgaacaagctttgaatgttgatccccgtttgcaaaattggttggaaaaacgaccgcttaaagcccttgagctagctgaagattggcaaaaactactcgctgttttggcgtggcgcaaaacacattctcagccgaattgttatttgcgccaagtttcattacaaggcgtgcatagcaaatttattgaaactcatcgtggtgtactggcagagtggtttgatttgattttacctgagggagaaatccaagcagataaaacgggagctaaccaatttaatgctcgttatggttttttagataaacctgaatttatccgctttcgcttattagatagcaatcttacttttgccggcttaagtaaggcggatattagtttagatgcaacgagttttgctcagctcgatctaaatgtatcaacagtttttattgttgaaaatgaaattaactatctaagctttccctcaatgaaaaatgctcttgcgatttggggggctggttatggtttttctgcattgtgccaagccaattggcttaaaacacgccaactttactattggggcgatattgatactcacggctttgcaattttaaatcaacttcgtgcggattttccaaaggtaaaatcagtgttaatgacattagctatcttagaaaagtatcgcattttttag

SEQ ID NO: 42352 - DNA, 1443 bp, Acidovorax delafieldii 2AN
atgcaattcttcatccccccgcgtgagcatttctttcgtccgctgacgcatgacaatcgcgagttgtgcgcattggtgcttcggaaactccacgagcgagtgcatggcgccaacgccgactacgccgaagtacttaaccgcgagttggtactcgaagtaattcttcatgtgttagcagaccctgcgctgcggaccatggtttttgagaatgagcgggtgattggcgccgaggaagagcgtagttatgccagtgatcttttgcgcaagcttaaagagcatggatggcttgaagactaccgtgaccctatcgacctacggcccaccctcaagctcagtcgcgcaggcaaggccttcagcgaaaccttcgccgacctagacgactcgcgcgccaagacccgccagcgcaacatgcgctcggcccgcaaggcattggctgccttcatcgccacccgggacgctgacgaactgctggacgcccacgagttcgccagccgcgtggtgcaggacctgcaggacgatattgagtacttccgccacttgatccagagcctgacgcgcgaggccctggcgcagaaggtcgcctggaacgagttcaatgatttcatcgagaagcgcttcgcgcgcgagtacgccgtgcgcctggtggccgactcggccgaacgccatcgcggccagatcaacgaagcattggaagatgtgcgcgcgctcgacggcgagcaacgcgccggcttagatgcccacctgctgcagcgtgcaccttggctggaacagatggcgcagggccgcagcccgatgctgtggctcgctgaccgcatcgagagtatggtcgatgctgcctgcggcctgaagctgcccatgctgcgctcggagatgaacaactacgtgcgccgattcaccagcctgctgcggcaagcgctgtccctggactacggtgccgagtccccgctgggccgcaccatggcctggctgaaggagcagccagggcccgcccgtgaagggctgctcgacgttttggcccggcgcctggccactgccgagatccgtcttcccggcggcgtgctgcgttggacagtgcgtgatcgtgaatcagaggccgtagcgcaggcaccgctggtcgtggacgaagccagccgcctgaatgcgctgctgcgcagagctgaagccgaggctttcgccttcagcgatcagcaggtgctgcaaggcctcttgcctcacctacagggtggccccatcacgctggcggcattgccagtcgacaccgccgaggacgcagtgcgcgtgttgcatgccgtgggcgcggcgcgttccgcagaagggcgtcgcctgatacaggcccgcaagatggcaggacaggtgagcacgacttacttccaagccgacgactacgagttgcgcgtcgaaccgcaagatgagatggacgtgacatccagcaggaggcactga

SEQ ID NO: 42353 - DNA, 690 bp, Acidovorax delafieldii 2AN
atgctgcaatctctggctcagtacatcgaacagaggctggcgaccgaaggcgctgccaacgtcaagcccgcacgcttcgccgaattggccgggcggctgctggccagcggtgtggtgtggcgcgagcattcccgccccgaggccgcactgtacgacgacgccatccaatgcgaacagttgctgcgtgaatggttcgcctgcatcggcttcgtgctggtccacgacagcgatgcccgcctgctgcggctgtacccacccggcgaaggcgggggtgacgacgaggaagacggggtgcgccgcctgcgcgcccgactttcgcgtgatttcgtggctgccgtaatcgccctgcgttttctctacaccgaggcgctcaccggacgtcgctcactggtggacgaacgcctggctatcagcttagaggagctttcacaagcggtggtgtcgctgttggcgcacaagctacccaatgcggccagcgagcgcatggttctgttgcgcgaactgcgtaaacaccgtgtgctgcatttcgtcgagggcgacgatgccggcgacatgcagatgggcctggccgtgctgcggccggtgatgagcttcgtcagcgacgaggcactggaagaggcattgcggattatgggccgccagactccccctgcgcccgccgtcagatcagccaccgaggaccgcgcatga

SEQ ID NO: 42354 - DNA, 3705 bp, Acidovorax delafieldii 2AN
atgaagatcgccaagctgcttacctggcattggggttcgctggaagaccgtgaatggcccttcgctgacgccgttctgttgacgggcgaatcgggttcgggcaagtccacgctgctcgatgccatccagaccgtgctgacggccgcgcaccagcacgtggtgcagttcaacattggccaggacgaatccacgcagagtcggcgtggcggcaaggagccacgcacattggccgcctacgccctcgggcagcaggccgacggtgtgttccttcgcacccgctcgaccagctacgccggtatcgttttcgaagcttccgaacaggcaggcgagcaggccgagcctttcaccgcattggtgggcgtggaagctttcgtggacggccggcgcgccgtcctccagggcacaccccaattcttcatcgtgcgccgggcactgtcgctggactatctggcacgccgggcgggcgaggtgctcaccgcctcgccactgccgttgaaggaactgtacgtgcaactccagcaccgcctgcaggcccatgccggcaaagctgccgcggtggtgcaacgttttcccgacaagggcggctacctgcagcatctctatggcgcgttgatgggcaagacggcggtaggcgaacacgatgccacgcgcgcagccaagtcacttgtcaaggccatggcctacaaggaactgggcaatgtcaacgacttggtgcgcgacgagatcctggaaccgcatgatttcagcaaagacctcgacaaaatgcgtgagctgatgcgttccatcgccagcctcaagcttgaggctgagcgcctggcgttgaatctggagaggctcgacactgcgcagtccagtgcggaccaggtcattgatgaggcaaggcgattcgtcaccaccaccatcgcccatgcactgcgcacgcgcagcgaggcacgggatgaactgacctcggtgcagcgccagatcgccacgcaggacaggaagcaggcacagctgcaagagaaactggattccctggaggcgcaggaaaagcagttgcgcgggcagttgagcttggtcgagcagaagctggccggcagcgatgtggcgcaaagaaaggccgcactcgatgacgaagtacgccagcaagctgatcaattccgcctgcactggggccgcgtgcaagaagccgcgcgcggcatcggcgcgatggccgcgcaactcaagcaactgttggcgttggatctgtcggccgtcccggatctggcttctgcggtcgctgccctgcagcccgccgcgtggcgggtacttcagccctggccagcgatggctgacacctacgcgcgccatgcggcgctggatgtggtgctgcccgccttcgaactggaagccttcgacgcacaactggcctccctacgccagggtatccacgatggcgacgcctcggtgcaaggcgcggtgctccaggcgcttaccgatgtgggcgtgcagttgaaagaactgggggaagaatccgagcaacgcgacgccgaactgcgccgtctgcaggccggccgagcgcaggggccgaaggatgcacatgacgcagtggcactgatcgagcgtgagcttccctcggcccatcctcacctgctggcgcaattggtggagccacgccctggcacccgctggcagaacgccatcgaaggctatatgggaggtgaccgctttgccatcatcgtggaagctgggatggaggcgcgctgcacccggctggtcaagcagcattaccgcgttcgctcacccaaagtcgtgcagggtcgcaaggcgatggaggacaccgagggtcgccaactggaggcccgggctgtgctgcacgaactggtctgtcagcaccctgtggcccatgccttcctgctggcgcagtatggccgcgtgcgcaaggtcgagagcgaggaggaactggcgcggacctcgcagggactgatggagcagggcctgggcagccggggctatggcatgttcgcctgctatgagccggacgagaaacttagctttggtgaagctgcccgccagcgacgccgacagtggtgtgaacaggagctggtgcggctggtgaaggaaacgcgcgccatggaggcgctgcgccgttcattgcaaaccatcacccgcctgttcaacggccctgtgttcacgccattgacgccgttagtgctcgccgtactggaaagccaagcccagcacgctcatgccgagcaggcgctcaaggcgctggacttgtctgccatcgatacgctactggccgagcagaaagacctcatcgggcgcatcgatggagtgcgggcgcagcacagcgatgaaaaagagcagatgggcgccatgaaactggccttgggaggattgcacaggcgtgaggccgatttggaagtccgcctgcctgatctcgacatcgcctgcaccaacgccacggtctgggcctcgcgcttcgcgggtgccgtgcccaccctggctaccgagcctcaattgctgggcgaggcccaggcactagcggccgagccagaaaccagcttagacgcgctgcgccaccgtgtacagagcctgcgcgaaggtctgccccgcacactgcgcgaactggcccaggccgtgggcacctacttgtccggcgcgcgagatgacagcgagcgcttcgcctggatcgacccgccccgcaatgtcgatcgcctggaagaactgcttcctctggtcgaacgcacccgcgccgctattgccggacaggcccagcgccagcgcgccatcggccttgcggacaacgcacgcgccctgcgcgaggcagaaggtcagttcaaccacgttttcaccagcagcttctgcttcaaggtgcgcgacgatgtcaagcaaggtgcgttgacactacagcgcctcaatcgccatctgcaagacatccgcttcggcagcgataccttcaggctggaatgggactgggtgccgcgcttgcagaaagtgcaggacttcttcgaggcggtggaaagcgcggtcgaagggctggagcatgaccgcggctccatcttcacctccccgcgactcaccgatgagcagcgtgctacagcggaagagattcgtcgcctgctgctggccaatgaccagggtgccagcgaacgcgcgttgcgcgaactggccgactaccgcaactaccggcgctacgacatcctgcgcaccagcctggtgggtaccacgcggttgtccacctggggcacaggctcgggcggcgaactggaaacgccgttctacgtggtgcgctcggccgtgctggcccatgcgctcgggcacttcggccgcgaccgccgcgaggcacccgccttgcggctgatgctcagcgacgaggcattctccaagatggacgaaacgcgttcgcgcaacgtgctgcagttcctgtcgcagacactggggctgcaactcatcgtggccatgcccacgtccaaatcgggcgcggttaaacccgagttcgacaaggagttcactttctccaaggtgatggcacgacgcgatggtcaagaactgtttatcagcgaagcgcaggaaaaaacgctcaaccgcccggccctggcccggctgtggggtgcccacgccgagcgggcccgcgaggccgcacgtgctcaatggattgagcaacagggccaagaacagatcccagctccgacggccgaagatgcccgcgcgagcctggatgaatgcaggccctcgccctga

SEQ ID NO: 42355 - DNA, 1272 bp, Acidovorax delafieldii 2AN
atgcaggccctcgccctgatcatggtcacgcccgaatcatcctcgctgcccgatccgccttcgccgcatcccttcctgctgcgcttggcccggttgctgctcgccaaggctgagcgcagcacggcccaggggccggtgcgcctgccgctggaccgcaaagctgcgccagatttgcacgatgcgatggatgccgaccagatccagttgctgcggatgcaactcgatgacctgtgtgccacgggctgggtcgccttgctgctggaagcgcctcgcgcattcgccagcttcagcgaccgcaagccccggctggagctgtgcgatttcgacgccctggcggcgtgggccggatataccccacaggcccaacgctggcgccagcaatggcgcgcgcacttggccgcacactgggcggcgaatccgctggaggcacctgccgatccggccgccgtgctcgaccaccttgcccgtagcccattggtccctgtggaaggattacctgtagaagaggccacccggagcctcgccaccttgaccaacttgtgccggtcaggccgaactatggccctccgtgaggcctcagcgcgcgtctttcaaggacgctccaaggtgttggaccatcgagaggaactactgaaactattgggtgcgacttcaggccaattcttcgaggcgccaatccagttgctgctggcgccgcccagtccagggcttgcgtgcggcgatggacggttccctgctttcaaggatgtgctgtttattgagaacttggtcacttttgagaacatggccgacgcacgcgcttccgcctgggcgagtagcctgttggtttacgcggcaggttttaggggtagcgcgcgaaggctacgttcacgcattggctgccgtctgtatttgcgagatcctgcatgtacggagatgctgccagcaatctgctcttggttgtttgacctcccgggggactgtcgagagaactcgcagacagtgcctgtgtatttttttggcgacctagatcattccggtatgcagatacttgccagccttcgaggggtatttccccaggctggtgcttggcgccccggatatgcccaattggctggattgctggccagcggccaggggcactcgcctgaaatggcggctaaggctcagcaagcggaccccgaacgcactggatgctcgtatgcggacggagacctacttccgttattgcgaagactagggcgctttgtcgaccaagaagctttcgattgcgctgaagaccttgacagctga

SEQ ID NO: 42356 - DNA, 1458 bp, Corynebacterium matruchotii ATCC 14266
atgagcattgttgcgcgtactatcagcaatcgtcgtttagaagaaaaatcagcaatccttaagctgcttcgtagcccacttatgcccgttgtactggggtttgttgctgaacactttcctcctagcacgaaggcccggtcggccattgaaatctatgacctcctcgatgccgacctcaaaatgcttcgcgcagaaggcttggaattaccgcacgacccccaaacctacattacagactgggtaaaggccggctggctggtacgccgccccggcaatgcagtcacgggggaaaccatcgagcccagcgcgaccacgctcaacgccctagactcggtagagagctggcagcacccacattcggcggtgtcggcggcccgaatccattcgatcgcggactcgttggaaaacctctcgcgggaatccgacccggacatcaacacccgattggcgcagttggcggaggaaaaagaggcgttggagcaactcatagccgacaccgaacgggggtattttgaggtgctgtcggcggaccaaatctccgaacgggtcctcgacgtgctggagttggcgggcacgatccccgccgatttcgcccaggtgcgcaccgagctggaagaaatcaaccgcacgctgcggcgccagctgttagagccggaagatagccgcgggcagattttggacgatattttccgcggggtggacgtcatcgccgaatccgatgcgggccgtagattccgcgacttttataccgcactgttagagcacaaaaaatcgacgcctatcgacgagtggatcaccaacatcctcaaccgggaaagcgccaaagacctcgacgccaccattgccgaccatcttcgcaggctcttccaagacctggagtcggagggctaccaggtgaacatgctcatgacggaactctcccgatcgctccgcgactatgtgcgcacccaagacttcactgaaaaccgccgcatgcttgaactgctccgcgaaacccgggcgctggcgggacgcaccatcgaacaccaacacttgggtcccctggtgcagctacataccccactgacgcagatcggcatgaacattcattccatcgactccctggaaatgaagaacctgggcgaagaaatggtcgaaaccctgcccgtgccgctcgaagaagcccacattgataccgaagctttgttcgaatcggtgcgtgccagcgagattgatttcgaagagctacgcagccatatcaccggcagtgtggataaacgcggccaggctaccatcggtgatgtgttacaggattatccggcaactcaaggtttagccagcgttgttgggctattgtattttgccatggccaatggtatcgccttggaatcgttggaaaccgtcacctgggatgataacggcacccccatgcaagcggtcatcaccggttggttgttcacccacgacaataatctctaa

SEQ ID NO: 42357 - DNA, 2154 bp, Corynebacterium matruchotii ATCC 14266
atgactaacaacactcccataaaccacaacgaccagaacgaggaaggcgaaggcaaacaccgcaactctggggaacacaactccttcccgttcattgccccacgagaaatcgaatcccccgcccccacacgtcaccgggcggaattggcgtacacagaccggtatttcgggggaagaaacgccaccggccgtaatgatgcgggcatagtcaaggcagacatagtggaggcggaaatcatcgacgccgaggtactcgacgtgcaattcgacgacgacaccgacgcaccccaaaccacccatgggtcgcgccgggcgttgcattactccgcccactcccctgccgacgctgatgtcgacaccgccgatactgctgatgccgcaggtaacgttgttgacgatgccgaggtagagaccacggcggaatccgaaccgggccgcactgttacggcgccggaatcgcccgcaggtcgacgtttcaccggggccggagctaccgaggcatcggaaccacaacttgaagtgtcgcctgaggaaacctcggatgatgcggcggctgccgataagccgtgggaccgggcggcacaacccgatgcccaccgcaccacctccgaggttgatgctcacaccgacaccgacgatgacctggatcaggaggctgctgcgaccgacccggagggtagccccgccaccctgccgacgacagatgccggcgagaataccgcacccaccaccgggttgcggaatcccgggtatgccggatttgccggggcaggccttgaaaaccggacgactgacgaatatgccgtcgatggtgacaccgatgatgccggcgaattgaccgacaacgacgacccccacggtgagtcagatcatggcgatttgggtgtcgacaccaccattccagtccgggaagcccgccacactcccctggagatccaagaggaggcccgaaaattggtgaactccatcaatgccgccgcctcgtatgaagacttcgacgcctacccaacccaaggtgacaatccccaagaagaattcctcgatgatgacgcggctgacctgagcgacgaagacatagtcgatgaggtcctcaccagcgccgacgccaccgcccccacaacagagcctgaagctgccgaagttgccgaagatgtcacggaggcagaggagtcacaggccagcgagccagcttcggcagcggtatccgcggtggcggaaacgctagcggaagccaacgacgagcccgaggatctgacccacacaaacctggccgaggaatccgaagaatccgaggaggaagaggcggagacagctgaggcgccgacggaaacgcctgtggaagttgacgacaagcccgaacctggccaaccaacgccggagcaacccgccacgctcgtgactcccccggcccagcccgctgccccgaccgcagcccacgccaccgcaagcgcagtaaccacaaacgccgcccccgtcgaaaccgaagatactttcgattggatggaggacgattatgtccacaccagcattggcggcgacaacctgtgggactccgacgccggcacgctcagcttcgactcccggcgcgccctcgtccagctgctccagggaccccttgtgcgggccgaacagcatccccccatttggaaggccatcctgagtgacgaaaccgcactacggcagcgcctggccgacatgttcctcgatcttgtcgttgacgaggatgccggcattgcgtttacccgcatcgccaactccggcaaccccattcgggtgggcaaggagcattatgtggacatgccccacgtcctgcgggtgaaaaccctcaccattatcgacacgattgtgctgctggatctccgcacccggctggggctggcggtaccgggcgaacgggtcattgttgaccaggaagaactgcgggaaaatgcgtcacaattccgcgcattggacgaccgggatgaggcgacttttaatcggcggtttgatgcatctttagaccggatgcgccgcgactatagtttgctgggggacaccgaaaccgagggtcgctatgaagtgtcaccagcactcaaacatattttcgacgcccagacagtggcgggaatcaaagcagagttcgaagagctcttagccagggaggaatccaagtga

SEQ ID NO: 42358 - DNA, 3366 bp, Corynebacterium matruchotii ATCC 14266
gtgataacgcaaccaacatacgatcgagaaatagttcacgccgatcaatggcggttatcccggattcaattagtgaactggggcacgtttgacggcattgtggatatcccggtgtcgcgtcggggattcctcgtcaccggtggttctggtagtggtaagtccacgctcattgacgcgatttcggcggtgttggtgccgtcggatcggctgcggtttaatgcggcggcccagcacgaggcgcgccgcggcaagggcagagacctggtgtcgtatattcggggcgcgtggcggaccacggaggacccggatttgggcatggtggtggcgcagtacctgcgacccaaggcgacgttttcgattattgtgctcacctattcaaatgggatgggcttgtgccgcagcctcaccggcctgttttatttgaagtcgggtgataataatccggcgaatgtggtgcggctgtttggggtgttccctgagcaggttgttgaggcccaggcgtttattccgtttttggcgaagggcctggataagcggggtattaaaaaggaattttcttccgcaagttttttcgaggatcacgcgccgtttgcggaaatgttccggccactattggggatttccagcatggaggcccagctgctgctgcaacgcacccagtcagcgaaatcgttggataacttggatcatttattccgggagttcatgttggtggagccggacacgttcgcgtatgcgcggaccgcggtggaacagttcgccgacttggagtccgcatacgagcgggtgcaggatgtgaaggcgcaggttgaggcgctgagtcccctggagcaattgcacaagcaggtgctgacggcgcaagcggagattgcctccaccacatcgttgcagcgggcgctgccgtcggtggcgaatcagctgaagattgcggagttggaggacgcgcaggttgctgcggagatcaccctggagcaggcgcaggtcgccaacacgaaggcgacggaaaaataccggtatgcgctggaggagttttcccaggccaaccaggcgatgaatagtgccgatgggggccgggtggagaacctgcaaatgctggtgggccaccataagcagcagctggcggagcgccgcaaggcgtatgcgaacctgcagaaacgcatcgagtcgcatggtggggtgatgcccacgacggtgtcggagtttaacgacctgattaattcggcgaaggtgagcattgcggagcacccggcgaatatggagcggctgaatcgggacttggcgcagtcgttcgtgagtttggaccaggccaccaatgaggtgtccacgttgcagcaggagttggaggttgtcgccgccaataacagcaatattgatgcgaggtttttggcccgccgggaggcgatctgtgacgagttcaatattaaggaatccgaactcccgttcgccggtgaattgatcgatattgtgccgtccgaaagcgagtgggagccggtgattcaacggttgttggcggatttcgcccacgagcttttggtgccggtccggtattatccggcggtgcaaaactacattaaccgcacccattggggcgtgaggctccggtttagcagcattgattcgtcccatagttatccgaatccgcgggtgcacccgcagagcctggttcgtaaggttgacgtggttgaccacgagtttagcgcctgggtgagccacgagcttgccacccgctacagctatgtgtgcgtaaataatccgggtgatttggatcggctcgacccacacgaaaagggtgtgacgcgcagtggtttggtgcggcaagcttttcgacgttcggatccgacaagccggctacagaaaaacgatgtgcacgccctaggagaccgagtctactaccgactgggatcgaacaatcaagcgaaagtggagttgctgcggaagcatttgtcggatgcgcaaaccaccctgaaggcccggcagaacgagaatcagctgattcattcccgcatcgcccaggagaacgcccaggtgcagttcgcactcagcattgtggacgaggagtgggagaacctcgacaccgcgatcattgacgagcacatcgaatccctcaaccagcagttggagcagttgacggaaaacccggatgtgaagacgctcacggagaacgcacagcaggcggagcagaaactgcaggacgcccaggagcaaatgcagttgtgtaaccgtaatgtgggtgcggcgcagcacaccctggatgggattcaagcatccctggcggaggcgaacgccgaggccacgattgatgtggatgatgccacgttcaccacggtgcataagctgttcctacggcatacccgccgggtgacgtcgaagaatgtggacaagctgatgaccattttgacgaatgagttttcggcgaacctcaagaagaataatgagacgttaaacacggcgaataataagatcactatccggttgacgtcgtatattgagcggtggccggcggagcgggccgacctggaggccacgccggacttcatcaccgaggcgttagcgaaactgcagcagctcaagggtgagcggttagcggagttcacgaaccagttccgggcgctcattaatgacatgtcgacccggaatttggcggacatttcccaccggctgcggcaagcgcagaacgagattcgggagcggatcgccccggtgaatcattcgctcgccagttcggagttttcggagggccggttcctgcgcattgatgtgcgggatgcccgcggcgaggtggtgaccacattccaacgccagcttgatgaggctgtcagcggcggcatgaacgagcaaaacgatgccgaggcggagcagcgctaccacaacattgccacgctaattaagcgcctgggatcgaaggaagcgggcgatgtgcgctggcagaaagccgtgcttgatacgcgtcggcacgtgagtttcgtcggtgtcgaggtggatgaggacggcacagtgctcaacacctatgtggactcgtcggtgctgtccggcgggcaggcccaaaagctggtgttcttctgcctggctgccgccctgcgctaccagttggccaagccggacgcccaataccccagctacgccacggtggtgctcgatgaggcgttcgaccgggcggaccccacctacacgcagcgggccatgaacgtgtttgatgcgttcgggttccacatgattttggcaacccccctgaagctgatccagacgctcagccaatatgtggggaacacggtggtggtgagctacgacgagtccccgaacgagttgggtcaggtgcggggccggtcgtcgatttcccgcattgatttcggtaaggctaccggctag

SEQ ID NO: 42359 - DNA, 1455 bp, Acidithiobacillus caldus ATCC 51756
gtgaccctcgactacgccaccctagacgccctgcgcacccaccatcccgcctggcgactgttgcgctcggaccatgcgccgctggtagcggcctttctgcaccgcatattcgtggtgcccaacgtgcggatgatggctgccgccgacttgtccgaggcgctggaagacgagttgtacgccttgcgtctgcagctcggcgaagcggcgtttcccaagcccgctctcgactatctgaacgattgggcgtcgccggataagggctggctgcgcaagttttacaagcccggcaccgacgaggcgcaattcgatctcacacccgcgaccgagaaggccatcgcctggctggcgcagctttccgagcggcagttcgttgggacggaatcgcgcctgctcaccctgttcgatctgctcaaacagatgagcgaaggcagtgaggccgacccggccaagcgcatcgccgagctgcacaaaaaacgtgatgacatcgatgccgaaattgcccgggtgttgtcgggcgacgtgccgctgctggatgacacagcgctgaaggatcggtttttgcagttcatccagggggcgcgcgagttgctcaccgactttcgcgaggtagagcacaacttccgtcagttggaccggcgcgtgcgtgagcgcatcgcgctgtgggaaggcggcaagggcgacctgttggacgatatcatgggcgagcgtgacgccatcgccaattccgatcagggcaagagcttccgcgccttctgggactttttgctatccagccgtcgtcaggaagaattgaccaagctattggatcgcgtgctcgcgttgcccgcggtggcggacctgaatccagacacccggacccgccgcgtgcattacgactggctggaggccggcgaacatacccaacgcacggtggcggctttgtcgcaacaactccgccgctttctcgacgaccaagcctggttggagaaccgccgcatcatggatatcctgcacggcatcgagagcaaggccctggcgttgcgggaagcgccgccaacgggaacggtgatggaggtggctgaggcctgcgccgatatcgcactggcgatggagcggcccctgttcacgccggcgatcaaaccagtcattgccagcctgacgctgctagcgggggacgaggatatcgacccctccgccctgttcgaacaggtggtggtggacaaagcgaggctcacccgttatatccgccataccttgcaggatagggcgcagatcaccttgcgcgaactggtgacctcccagcccctgcggcagggcttggcggaactggtggcctacctgcaactgggcagtgacgccttcaacacggtggtggatgaggacacgccggaagccattcactggcaggctgaggatgatcgtggcgaaactgtgcatcgcacggcccgcttgcctcgagtgatttttacgcgctga

SEQ ID NO: 42360 - DNA, 519 bp, Acidithiobacillus caldus ATCC 51756
gtgcgggactacgtggcggtactcaatctggaactggtgctggatgaggcggaagggtatgccttcctgaaaagccgcccggaacctgctgaggatgatccgtcgccacgcttgccccgtctggttgcacgccgccccctgtcgtttccggtgagtctgttactggccttgctgcgcaagaaactggccgaattcgatgctggcggtggcgacacgcgtctggtgctatcgcgagacgagatcgtcgaactggtccgggttttcctgccggacgggcccaacgaggccaaactgatcgaccagattgaaaccaccatcaacaaggtggtggaactgggctttctacacaagctcaagcctgcgagtggtagcttggcagggcaggccaatttcgaggttcggcgcatccttaaggcctttgtcgacgcgcagtggctggccgagcttgatgcccgcctggcggcctaccaatccgccctgtctggcgcggcgtcgagcaaggaggcgcgcgatgagtga

SEQ ID NO: 42361 - DNA, 3393 bp, Acidithiobacillus caldus ATCC 51756
atgagtgaggcgcagtccctggggctggatttcgtggcggacgatgccttgtcgggttttcgtctcatgcggctttcggttttcaattggggcaccttcgacggccgggtctggacgctgcaactggacggcaagaatgggctactcactggtgacatcggttccggcaagtccacgctggtggatgccattaccacgctgctggtgccagcccatcgcatcgcctataacaaggccgccggagcggacagcagggaacggaccttgcgttcctacgtgttggggcactataaatccgaacgcaacgaggtcacgggggtggctaagccggtatccctgcgcgacgagcacagctattccgtcatcctgggcgtgttttacaacgcggggtacgaccagatggtgagcctggcgcaagtgttctggatgaaggaggcgcaggggcagcccgcccgcttcttcctcggggccgagcgcagcctgtcgatcgccgaggacttcgcaaacttcggcaccgacatcgctgccctgcgccgccggctgcgcggaaccggcgccgatctctttgacagctttccgccctatgcggcgtggttcaggcgccgcttcggcatcgagaacgatcaggcgctggagctctttcaccagacggtgtcgatgaaatcggtgggcaatctcaccgacttcgtgcgcaaccatatgctggagccgttcgaggtggcatcgcgcatccaggcactgatcggccatttcgacgatctcaaccgcgcccatcaagccgtgctcaaggcccagcaacaggtggagttgctgacgcccttggtggccgactgcaagcggcacagcgaactggtgaaggaggtgaatcatctgcggcaatgtcgcgacggcctgcgggcgcactttgccagcctcaaattgggattgctggacaagcgcctagatctgctcgatgaagagtggaacaagatcgatgggcaggttcgacgcctggacggtatgcgcgaggagcaaggccgacaggtcgatgagctgaaacaggccatcaacgacaacggcggcgaccgtctggagcggctcgccgccgagatccacaggaaagagcaactgcgcgatgcgcgcaaggccaaggatgcgcgttaccgtgaactggtggccgttttgggtgagtccgtgccccgcgacgatgccggctttaccgcgcagcgggcgcaattcaaggcgtggcgggaagatatccaaaaccgcgatgccgacctccaaaatacgctgaccgagcatggcgtgagcttgcgccagggaaagctcgagcacgaacggttgaccgcggaaatcgagagtctcaaacgccgtcgcagcaacatcgacgaccagcagattcagatacgcgccgccctctgcgccgcgctgggcctggaggtggatgatatgcccttcgcgggcgagttgatccaagtacgcgatgaggagcgcgactgggaaggtgcggccgaaagactgctgcgcggcttcggtctggccctgctggtgccggatgcccactacaaggcggtggccgagtgggtggacagtagccatctgcgcgggcgcttggtctatttccacgtgcgaccgcgcaaaacatccgatctgccggaactgcaccatgactccttggtgaggaaactcgtcatcaagcccgattcaccccactacgactggctggagcgggagctcgcccatcgttttgacgtggcctgttgtgccacgcaagagcagttccgccgggaaacgcgggcgatcacccgcgccggccagatcaaagacccgactggccggcacgagaaggacgaccggcacgccatctccgaccgcagccgctacgtgcttggctggagcaacagcgccaagattgccgcgctggaagccaagcgccgccagctcgaaagccatctcggcgagctgggcagccagatcggcaagatcgacggcgagcggaaggaactgctatccaaactggatgcattgacccgcctggaagagtttacgagcttcgaagaaatcgattgggccagcgtggcaacggacatcgcagctctggaagacgagcgccaaaagcttgcgcaggcatcggatgtcctcagccaattgaacgaacgcttgcaggaactgcagcaggcgctcaagggcaccgaagaagaattgcaatccgtgcgcgaccgccgcgccaaggtggagcagcgtcgctcggatgcacaggaactacgccagcagacggctttactggtccaggacgccgctatcgatgcgacgctgtcgaccaccttggaggcgatgcgggccgaggccctgggagaacaccaattgaccgtagaatcctgcgacaaccgcgagcaggacgtacgcgcctggctacaagctcggatcgatgccgaagatcggaaacttcgacatctcacagaaaaaattatcaagacgatggtctcattcaaggaagccttcaagcttgagaccgccgagatggatgccagcctggaagccgccttcgaatacgaaaacctgctcatacagctcaatcgcgatgatctaccgcgttttgttgcgcggttcaaagaactgctcaacgtcaacaccattaacgaaatcgccaacttcaatgcccaactggctcgcgagcgtgaaaccatcaaggagcgtatcgcccacatcaacaaatcgctgggtgagattgactacaaccccgggcgctatatcgtgctcgaatcgcaggccagccccgatgccgaaattcgcgatttccagcaggatctacgctcctgcaccgagggtgcgatgactggctcagatgatacccagtattccgaagctaagttcctccaggtcaaggccatcatcgaccggttccgtggccgtgatggcttgtcggaacaggaccgccgctggaccgcgaaagtcaccgacgtgcgcaactggttcgtgttcgccgccagcgaacgctggcgcgaggacaatagcgaacacgagcactactccgattctggcggcaagtcgggcgggcaaaaagagaaattggcctacacgattctcgccgccagtctggcctaccaattcggcctggaatggggggcggtgcgctcgcgctccttccgcttcgtggtcattgatgaggcgtttgggcgcggctcggatgaatctgcccaatacggcctaaaattgtttcgacaactcaacctgcaattgttgatcgtgacgccgctacagaaaatccacatcatcgagccctttgtatccagcgtagggttcgtgcacaacgaaggcggtcgagcctccaaattgcgtaacctgtccatcgaagcgtaccgggcgcagaaggcctcgatgccaagcaaatcgcagcaggcgcctacgccgtga

SEQ ID NO: 42362 - DNA, 1194 bp, Acidithiobacillus caldus ATCC 51756
gtgacttggactggcccaaaagaattgaaagcgcagttggtgcggctttgggagcgcggtgaactgctgcgagatactgtgacaggccagacgcgttttcctttgcgcatgtctctcaggtccccaacctctgcggacattacaaatcgttttgatgaagttcgccaatgggccgccgaattggacgcgacgaatgcagtgcgcgtggagtggcaggagcgcaagcaccgcgtccagggcgcgcaaaagctgccaacttgcgtgtgggtcgagacgattgaggatgcgttgacctggttaggcaaacgcaaagattgggaacgcttttccgccctgatttccgccacccgacaaacgcacccagtcttgctgccctggctagagaagcacccactgcaggcattggcgctatccgaagaatggtcacgattacttgctgtagtaacatggcttgccgagcatccgcgtcccggcatttacttgcggcaagtggatttgccaggcattcacagcaaattcatcgaaacccatcgcggtgtactgaccgaattactggatctggccttgcctgtcgctgcggtggagaccagcaaatccggtctgcgtcagtttccagcccgttacggatttttggaaaaaccgatccgtattcgcttccgcgtacttgatccgtcgattcatgtcgtacccggctcagcatcccccgacataactctggatgccgatagcttcagtcgcttggcgctcgacgtgcagcgtgtattcatcaccgagaacgaaaccaacttcctggcctttccgcaggtagcgaatgccatcgtgatttttggtgctggttatggttgggatgcacttgcccgcagtcattggctcaaaagcagtgccatgtattattggggtgatatcgatacgcacggttttggcattctggatcagcttcgcggccactttgaccacgtggtttcgttcttgatggatagagccacgctccatgcgcacgcggttttttggggcagtgaggacaaacccctccgagtggacttgcaccgactcacgatcgaggagagagccctctacgacgacctgcgcaataaccgcattcgccccggactacggctcgagcaagagcacatcggctttcactggctcgcccaccgccttcatgtccctgatagcacgtgcacatccaattga

SEQ ID NO: 42363 - DNA, 1407 bp, Vibrio alginolyticus 40B
atgaacgtttcttcactgaacactcatctattcagacccattgccggtgacaatggccttcatatgcttgctttgctggtggagcttgatgcctttttagacccagcccaactaattgatgaaccaaccccatcgcaagtgcggggtttcatcagagactatatcgctaaccacaatctgcgaattgagatagagtctggtgaatcgagtgagtccaagtctgcaccagagcaatacacttattcacgtttgcgtgatacagggtggctaagggaagagcgagaaagtgggtatcgttatgttgtatggatgtcacaagatggacgtcgattactaaactttttgcaatcgatgagcgctgagcatccctcactggggattgtatgcttgtcagtgcgatctaacttagcagaggtagttaaggatcctactagtggttcactgatacggaaagcagctgacgatatggagagtttcttgaatcgaatgcgtgctttggtggggaatattcgtgaaattcatcatcaactaaatcatggaagctcacaagttcatggccgattcgagttttattttaacgaatatttaggtgaactttttcttccaaacattgaaaaattagcactcaagggcaaccctaagcttcatggcaacaagattcttaaactggctaatataatccgttttgactctgatcttctcgaagaatgtgtaaaagcgtacaagcgaagtgatattgctaattcatctaaggagctggtggagaacgaccttgaccgactgagtaaagcttttgaagggattgaaccgttgtttgccaaaacacaagattacgctaggcgtatcactcgtaggattcatgaacaaatcaagtatacggttcatacaccaagtgacatcggtcaacaaattcaattcttgcttgagaagatcggacaagatgattcagtaaatacacttcctagcttgtctattggtgaagaactgatttcttgtagccgctttgctaaaccgaagtctaagtcaatcgaaccttcagaatcatcacgacggcaacaaaagccgctatgggaaaagcgagcctacaaccagctcaaacaggaacatatagactttcagaagtgtaacttacagcgtgtagataagtacctagaagattcattgagaggacgtacacaagtcacgactgatgagctgacgattaacagcccagatgaaatgatggctgctcttcacttacgtttacttgctcaaggagtacccaaaacgcatgtattgcacccactccaagaaaaatatcatgtgtcgtttgatgatggagaagcatggacaactttagaggctatggcaggacgacgtttgattatccgcattaaagatatggagataacatcatatggcaagtga

SEQ ID NO: 42364 - DNA, 651 bp, Vibrio alginolyticus 40B
atggcaagtgaaattattcttcgagaacttaaagatatagaggtaaaaacctctgccgattacaccgacaatttgcggaaaacttcagcttatttaattcggaatcaatgggtttggaaagaaaagcgaggtcacaaagagcacttcaaacggtgcgaagataaccaaacgtacttccataaattgttcgatagcttagatatgacatggcactttgatcgtaattttggctatgcgggagtccttccacgaggtgttggtaaacgcctcgatgttacgaccacgattttcttactgattttacgcaagatgtatgacacggaagcatcgatgggacgtacagagcttgggcgagtaaaacctcctgcaacagaacttataaaccaatatgagttaataaaagggagtcgtccacaagttacagaaacctctcatgcactagaaaacttaaaacggaaaggtgtcattgagcttggggagaaggatttggacaccaagttatttgaaataacggtactccctaacatcacgagagtagtaagtgctacttatttgggtctcttagacgagtttatggatagcttttctagcgacgaattaaaagacggctcagcagaatgtgacgaagcagtggaggtatcttatgactag

SEQ ID NO: 42365 - DNA, 978 bp, Vibrio alginolyticus 40B
atgactagtgacaaacaatctatgaattcacacagactgagtaatattattcttgctcaatggtacttgtttgaattagaaacctttgatgttgctcaagccggtgcgactttattctctggtgataatggagcaggcaaaactactatctttgatgctatacaatttgtgcttatgggaggagaccagcggatcactcgctataatgcagcagcagacggcagaacatcagagcgtacagcccgaagttatgcgcttggtgagtttcaagataatgactcaactagtttgctacgtgataatgccaactcctacattttcctcaatttttatgatgagttaaagcgtccatatagttttggtctcaccttctatgcctctaagcaatctcctagtgttgagaaaatacgtggtcatataatcaaaggttatcatgtaactgagtctgaccttttgtccgatgaaggcaattttttaccttgggttgatttcgtggaacatatgaagcgcacagccaagggactaaatggagcgatgcgttatgaaacggttgatggggcccgtattattcgagagaaaattgcagagctaatgtctcgcaatcaaacaagaacagggaagatagagtccaacttattggtcaaaacactatcgagcgcactgcaactcaaaatggatagccctattgatgtgttcattcgcgactttattttacctccaatgcctattgagactgagcaactgcgtgaggaccttattgctcatcagcgtattgaagaagaaataaaacgcgcaaatagccataaagctgagcgagcagcgctattggaagagtgtgagaagattaccaatttacgtattgctgctcaccatgctcagtgggtgtttcaagaagctaagacatcacaccttaatgaggaatgtgatgccaaagaagatgaaaatgaaagacagcagcgttcgttgggagaaagctaa

SEQ ID NO: 42366 - DNA, 1641 bp, Escherichia coli M605
atggtgcgaaagtggcttttcgggatacggacgatttcctggactctcaggaaaagaaaaatgtttaccgaagaagaaaaaatccacaatggtgaatttattatagtctgtgtacttcaatttgcattttggaggctctgctacatggaaggaaacacaaggcagcgtacagcaaattatatttcagcaaaaaatcagcaccccgcctggatactccttgccactcgccgtgctccacttgtattgagttgcctgaacacgctttttgaaaaaacacatgatggcattccccttgaggaagctattcagtctctttccggtattctcattgagcatgtgagtcaggaacagtatgacattaaccaggacaatccatctcttcaggccagtcgtgaactgcgggagtggattaaacgccgtttgattgttgaaagggatggacgtatttttgcgaccgatgcgcttgaggtcgcgattacgtttgttgagtctctggataatcgtttcatgacctctacggcttcccgtttgtccaccgtacagcgagaaattgaaaacctggaaacacggctcaatcctaacccggcaaaccgggttgcgaccttacgtcgtcgtattgccgaactggaacgcgaactacaggaggcagaagccggacatattgaggtgctgaaaacgcaccaggcggttgagcatattcgtgaggtctacaatttagcttccagcctgagggctgattttcgtcgtgttgaagactcctggcgtgaggctgaccgtgcgcttcggcaatccattattggtgagcaatatcatcgcggcgacatagtcgagcgcctgctcaacgatcaggacgcgctgcttaatacgccggaaggaagagtcttcgacagttttcagcaacagttacgccagtcagctgagctgtctgcaatgagcgagcggctgcgcgtcatccttagccatccttctgcttctgatgcgcttaaccgtctacagcgtcacgagctgcgctggctggttaaacgcctggtcgatgaatcgcaaactgtccttcaggctcgtgcccgtagcgagcgtgatgtccgcggtttcatgaaaactggtcttgctgctgaacaccaccgcgttggtcatttgcttaacgaattccttaatctggcgttaaaactcgactggcagcgccagatgattcgtaaacaagaggtgcagcttcctgccgttggtgtggcggtaacaggcatccctgctattgaacgtttacgttttaaagaagtggatgatgaagcagagcagacgttggatctcagtaatcatgcggcggatttaacgcagattggcgatgatttctgggatgccttcaacggcctcgatcgtgaggtgttgattcagcagacgttgcagcttctggcaaaagaaaatcgccccgttggtttggctgaactgtcggcgctgttgcccccggctcacgatctcgaaacattcgccgtctggattggtatggcgagagaagcgggtattgaggttattgattcacagcgtgaatttgctgagcttagtgatggggaaggtcgccgctggcgatttaatctgcccaccaccggtctggaaagtcaggcattaatggatatcgattgggagtaa

SEQ ID NO: 42367 - DNA, 750 bp, Escherichia coli M605
atgacgggcttttttgacaggctgattaaccggagcgttaccgcaaatgcaggctgtgaaccagaaccatcggatgaggaggttaccgatgagtcggttgaagaaagtttggccagtagtgaaacgcggacgctaaaaaaaatacgcgaagcgactcaggaattgctcaaatacggcctgctggaagaggccagtaagcccaatctgtaccgcatcgtactgagccatcctgaagaggttactcgtattctggaacctctcgatctggatatcggcattgatgagatccgtggcctgctgtatgtcaaagtcaggtttgatgaaacgccagcgcaggatgaatgggcccaccctctggtgagacggcaacgacttaacctggaacaatctttattagttgccatactgcgccaacattttgtggcctgggagcaggaaagcggaaccggtgccagtcaggcacagatcgccatcgatgatcttctccctcaactccagatttatcttggcgacccgggcagtgaatcaaaagaacgcaccagattgcttaccctgctggatcaattaaaggggcatgggctggtgacgtcgccggatgctcatgagcggatcgtcatccgtccgatcattgctcatcttgccgatccgatcaatcttcaggcattgctggcatggctgcgagagcaaattgatcaacaaacctctccggatggcgcgccagataaggatagcagcgaggaggaagtatga

SEQ ID NO: 42368 - DNA, 3288 bp, Escherichia coli M605
atgaatcaagtgtctggcctggctggaaaggagtcgttcattcttacccgtattgagttgttcaactgggggggggttcatggattacatcaggcagcaatccatcaggaaggtaccgccgttattggcccaaccgggagcggaaaaacgacgctggtcgatgccctgatgacgttgctttgtgccaatcctcgctacaatctggcctcaactggcgggcatgaaagcgacagggatcttatctcttacgtccgcggcgtatccggtcctggcgatggcggtgaagggcaatcgcatattgccagaccaggtaaaaccgtgacaggtattgctgctacgctggagcgcgaaggaaaacaggtccgtctgggggcgttattgtggtttgattccaccagttccagcgtgacggatatgaaaaggctctggctgttcagtgataattccgggcagacgctggagcactggctaaacgtttaccatgagggaggtacacgtttgctccgacagatggaaaaagaagccatcgggctctggacatacccgaataaaaagcagtatctggcgcgcctgcgggatttcttcgaggtgggggaaaacgcgtttacgttgttaaaccgggcggcagggttaaaacaactcaacagtattgatgaaatttttcgcgagctggtgttagacgatcactccgcctttgatcgcgcggctgaagtggccaatagttttgatggtctgactgagattcatcaggaactggagaccgctcgtaaacaacagcagtctttacaacctgtcgccctgagctgggagaagtaccaaaagcaagagcgtcaactggctgactggcagacgctggaatcgctgttacccctctggtttgcacaacaggcaagccacctctggcgggaaaagattgaccttcttaacgcaaggctcgctgaggcacaaaccagcgaagaacagctccagtcacagcttgatctgcaaaaaaaggtggttagcgactgtatgcagcgctatctccaggtcggcggtgccaatattgatgaactgaacgagcgtatcaaggactggcaaaaaacgctcggcagtcgagaggccttggcgcgtcaatatcaacagctgacccgtaaccttggattgccgcctgatctgagccaaccacagctggaggcgaatcagcatgaagccgaggtccgatgtgagcagatcgccgttgatataaagttgaaacaggaagaggcgtatcaaaaaggtgcgcttagccatcacattaccgaagagcttcgggaacgtgaaaatgaacgcgccgagatcgcgcgtcgtccggattctaaccttcccgcacattatcaggcgtttcgtagcgagctggcaaaagcgttgaacgtggatgagtctgaactgcctttcgtcgctgaactgatacaggttaaaccggaagaggtgcaatggcgcggtgcgattgagcgtgctgtcgggagtaacaggctgcgtattctggttgcgcctgaatcggcacaggaggcgctgcgctgggtaaatcagcgcaacaaccgtctgcatgtgcggctactggaggtcaaattaccgcactctcccgcccggttcttcgacgatggctttacccgcaagctgttgtggaaagagcatccgtggcgagaggccgtcaaagcattactggccgaaagcgacaggcattgtgttgacagccctgaacaactgcgtgacacgcctcatgccatgacggtgcagggattaatgtctggtaaacagcgtttttatgacaagcatgatcagaaacgccttgatgaagactggctgacgggattcgataaccgcgatcgcctgaacttccttgctaaagaaattgccacgcttcaggagcaggttaaaaccgcaaacgtggcatttgagtttgcgaaaggcgaggtggggcttttgcaaaatcaggctgcttccttccagaaaatagaacaaattgatttcgatagcattgatgttcccggcgcgaagagccaactggacgcgctcagggagcggctggaaaatctgacccgtccggattctgacgccagtgtagcgaaagcaaaacttgatgaggctcaaacggttgaatctgaacttgataagcagctcagagctgccaataaactcactaacgtgctggatacagaactcacatcagcccgtgccgcggaacgtaaggcccggcaaactgcacaacaaggtatgaaggaggaagagcgagagttgtgcgcgtctcattttccagtggtgactttggagcaattgcctgacattcgcgatttagaacgtcaacatgagcggggaattcagcatgaaattgaaagagttaaagctgaactacatcgactgaacattgagttgaccaaacgtatgtctgaagccaaacgtgtggattccggggcgctcgttgaggcaggggctgatttggacgatattcctgtttatttacagcgtttgcaggaactgaccgaagaagccctgccggaaaagctcagccgcttccttgattatcttaaccgttcatctgatgatggcgtaacgcaactgcttagccatattgagcatgaggtgctggtgattgaggagcgcctcaatgaactcaatgaaactatgttcagggttgattttcagccggatcgctacctgcgtctggataccaaaaaagttgtccatgaaagcctgcgcacgcttgaaaaagcacagcgtcagctaaatgccgcccgatttgttgatgataatggcgagagccattataaggctttgcaggtactggtggcgcaactgcgggatgcttgtgaacgaaaccgtaccctgggagcaaaagcgctgctggatccccgttttcgactggagttcgccgtatcggtgatggatcgtcagagcggaaatgtgattgagtctcgtaccggctcacagggtggtagcggcggagaaaaagagattatcgcttcttacgtgttaacagcttcactaagctacgcactttgtcccgcggggagccgttatccgcttttcggtaccattatccttgatgaagctttctcccgcagttctcatgcggtggctggcaggatcattgccgcgctcagagaatttggcttacatgcagtatttatcaccccaaataaggaaatgcgcctgctgcgtgaccatactcgttcggcgattgttgtccaccggcgcggtcagaattccaatatggcctctctgagctgggaagagcttgaacgacactaccagcgacgggggaacgcgtag

SEQ ID NO: 42369 - DNA, 1149 bp, Escherichia coli M605
atgtataccccagatgaactgcgtgaaaagcttgcccggcagtgggatagcgcaaaacttcgggctgaacgcttactgccccccggtaactggccactctgcctgcctattggtaaaccttccacgaaaatatttgcagagcagactcagcgcgttttgcagcacgtacagcgatggaggcaagttgcggttgggcacgtggaatgggaagcggtgagttatcgggcaagtgatacaccagtattaatgccgtcgcgctggatcctgaatagcccttctgagtggatcaacgcagctgcggatccggttgtgagccgggaatttcgcttactggaaggaattattgaacaagttaatcccatttttcacctgctgttggttaagcatcgctctctctggcggcacaaagatccgcaggacgtcatcagcgccgccacgctggcctgccgattagagccgggttgcgcaaaagggctgccgttaagattactttccgggcaaggagtggataccaaatttatcgagaataatatttcgttattaacccgactgttggacatgcgattttcaggagaagccagcgagcagggattaacaacttttcttgatgcttttgatgagtccagtcactgggttttagttgtaccattatcacccggcttgcttccttttaaaaaatgccgggtaacaacggcagaactggcggaaacaacattacccgcgtcgcaagtgctggtggttgaaaatgagcagtgtctgcatcatcttccagcattatctgacactatcgcgattttaggctgtggcctggacgtgcaatggctatccagttctgttctggatgaaaaacgcgttgcctattggggggacatggatagctggggactactgatgctggcaagagctaggcgctgtcgtccgatgcttgatgccctgctcatgaaccgtgagttgtttgagcagtatgccagtcatagcgccgttccagaatcggtcatagcgaaggaagctgtacctgatggcttgcttaacgaggaggccgatttttatcgctacttaacccgtttaccgcgtggtcgtctggagcaggagtttttgccagtggggattgcggaagaggcgcttctcaggtgggggaaagagagttaa

SEQ ID NO: 42370 - DNA, 1380 bp, Bacteroides vulgatus PC510
gtggatttcttcttgtcttttgtcattgaagcgtttgaaggacaggcggctataatgcaggaacgcttgcacatgctactggagaaccgactggatgagcaggaaaatacgttggtggaggatgattctgaaatgacgagactagtagagtctaacgaacagaaagcgaaacggctcatcaaagactggacagacaagggattcttgaccaattatcagaacgaagagggagaggtgatatacgagatttcgtcacacacaagcaaattgatagattgggtggtgagcttgaaaaaagaagattacatcggtactgaatcaaagttcaagacactgttttcccaactgaaggaattggtggaatactcgaacgaggaccgtgagaagcgactagaattgcttcgaaccaaaaaaatggagatagagcatcagattcagcggctggagatgggcgaagaggtcgaggtttacgaggactaccagatagaaccacgatacaacagtttgaacaaactggcgaaggaactgctgagcgatttcaaagaggtggatgacaactttaaggggattatcaaagagatatacgaacgtcagacagaaaatgcagagaagaaagctttgttgaactacatctttgatgcatatggcgaactaaaacaatcgcaacaaggcaaaagtttctatgcattttgggagtttctgctctcggccgatctgcagaaagaatgggacgagttgactggtgcactctacaaaacgctggaaaatagaggcattgatgcacatgacatgtttctcaaggaaatgaaaaagcatctgtttgacgctggtgagaaggttgcgaaaaccaacgaccgcatgagcgagaaactgagtcgaatcattcgccagaacggacatatgaatgctgaggcgacaaagcaagtaatcaacgatataaagaaactactcatcgaagccagcagacggaaagaaaagccagatgcttcgcttgaatacgaaaccattgacatcaatctgccgctggagcgccctcttaccctcacacctgtaaaagaaactgtgtataaggataagcctgacatagccggactgagtctggctgatttggagagtattggtaaactctacaatccgtatcacatcgaccgaaaggtgctgagagaccgcatcaacgaggtgttgaacgacagacagcagacgaccctggcagaggtgatagagcggaacgaaggcgtggagaaaggtctgtcggaagtgtttggatacattggcgtgctgaaggaatataagacggtggtaagcgaagaacgccagcaacatattatttttacagaaaataaaaccatatcaattcccgaaattataataacaagatga

SEQ ID NO: 42371 - DNA, 585 bp, Bacteroides vulgatus PC510; identical to SEQ ID NO: 41699

SEQ ID NO: 42372 - DNA, 3402 bp, Bacteroides vulgatus PC510; identical to SEQ ID NO: 41700

SEQ ID NO: 42373 - DNA, 1041 bp, Bacteroides vulgatus PC510
atggacgagtatcaacgtgaactgacggacatccgttcgcaatcgaaagaggtgaagggctttggttacacgattgagtggaaaacagtgaaaacgaaagcattgggcgaacaggatctgcctgagcgcgtgttattcgagagtgcatcggacattgagcgcttcttgcagaagtgtggtgaagtatcacagtttcgtaaggatgtggcaatgttgcttgatgagtttccgcagcttcgttcatgggtggaacgctatccgctgaaggtggtggaaaatgcttccttttggtctgatttgctgaaagttttgcgctattttgtggcaaacccttgtcctaggttgtacattcgtgaattgcccattgaggtgcataccaagtttattgaacgtaacaagggagtgcttcgtgagttgctggatattgtcattgtagagcatgtttgttcggatgagaaggtgttcgagaagcgctttggattgcgatacgatgagtcatgggtgcggattcgtgtgctggaagcatcgattgcgaatgaatacttttctggtgtagacgatcttacgatgcctcagagtcagttctgtgcgttgtcgttgcctgtgcaaaaggtgtttgtggtggagaataaaatcaacttcctgacttttcccaagttggcaggaagtctgctgatttgggggcatggattcaccattggcatcctcaagtctgttccgttcatgcggcacgcttcactatattattggggcgacattgatgcacagggcttcgaaattctttcgcagttccgcagttattttccccagacacaaagccttctgatggatcgcactacctttgacacatattttgaaggcgacaaaggcacaccaagcaatgtatcaaagcctctccatcttacccctgcggaagccgcactgtacgatcatgtcaagtttcacaacctacgtctagagcaagagaagattccgcaaaaatgtattaataatatattcaatagtttgttaaaaaatggccaggtaatatctgaggtctaa

SEQ ID NO: 42374 - DNA, 1464 bp, Brevibacterium mcbrellneri ATCC 49030
atgcgtgtgctcagctctgccctggcgtttaaacgcctcatggagtccgacagtgcattgggcatgctccgggcagacaacctacccatcatggcggcaatcctgggcgcccacctcgggaaaccaggggctgtgatgcccacagacgaactgcacgaacgaattgaagcggaccttgaagagcttcgcgattactttgacacaggtgacaagcgcggaaaagcattctgtgacgactggcgccgaaaaggcattctggtgcgacgtcccgcaacagccgtccggggtgaaatctacgaactgtccgcggccggatttgacgcaatccgcattcttgaccagctgcgaaccccaccccagaccaccacgcagtcgcggctggtgagcctttcgcaagccgtccacaacctggcccttgagaccgaccccgaccaatcacgcaggctcggccagctggaggcagagaaacgtcgcatcgagcagcagatcgagctgattcaccgaggcgacggtgatacgacgatgctggataaccgtatggcgcgtgagcgtgtgagcgatattctgcaacaggcagccgggctcccgggtgactttgcccgagtgcgagcgcggttcgaggaactcaatcacgagttgcgggtgtcaatcctggagtctgacgagtcgcagtcgcgggtccttgacgagatttttcgtggtgtcgacttgatcgcgtcatccgatgaaggccggacgttcgcggcctttgctacgttattgcgggaaccggagcatgccgcgtcctttgacgaagacatttcgcgcattttggaccgggacttcgcactacaacttaaccgcgatgaacggcaagctctgcgtctgctcatgcgacacatgaagactggggcgcgggacgttcaacaaacactgtcggagttcacgcgaggcttgcgcaactatgtgttttcgcgtgagtttcaaacagaccgggtgcttctggctctcactagggaggcgatgtcgcaggccgccagcattacggatgtgtgcaaaccaacggcggacattggcatcacgcttgagttgccttcagtgcgcatgacgagtgtgggtgagattcagcttcacgaccctgacgagtacatcattggcgacgaactaggtgttgctgaggctactgaggtcgactaccgcgctttggttgcgctggcccgtgagtctgaaatcgatatcgttgagctcgttggcaacgtcaatgcggctgtggaagaaggcagaccggtgaccgtcgccgaggtgttatcccagtttccggccacccagggggttgccagcgtggtggggttggtgtccttggcggtcaaccacggtgagtctgtgccaggtgagagtgacactctggagtgggttggattggacgacgtggcgcgctctgccactgtcgcgcgttggcactttaccgaaaggatccgtgcatga

SEQ ID NO: 42375 - DNA, 621 bp, Brevibacterium mcbrellneri ATCC 49030
atgagtgaagacacggtagacggtggtctgtggaatggtgacgaaggacagctggcgttcgacactcgccgggtgcttctcgaactgttgaaggggccctacgtttcaggggaacagaaacctcagttgtgggcggctttagttgcagatgaaggtttgattaggtcgcgtttgaacgatgtgttcgtggaccttgtcatagaccacagtgcttcgtttgcgttcacccggcgggttgtgaccaatgagatccaagctccggtcgcactacgagctgaaaacctcaagtttcttgacactgccatgctcttagttttgcgccaacggttgctggccgcgcaaggtgttcgccgtgtgatcgttgatcagagtgagatctacgaacagctttcagtgttccggacaggtgacgaaacaacctttcagcgaaacttgaacgcttcgtggaggcggatgatcaacactgtgcgcgtgttgcacaaggcgagtgaggaccgctatgagatttcaccgatcgtgcgtttcctcgttgatgaggaccgggtgaaggaactcactgagacgtatgaacgaatcgctcgtgaaaatcaaaagtcaaaaaagcaaggtgaggcacagtga

SEQ ID NO: 42376 - DNA, 3324 bp, Brevibacterium mcbrellneri ATCC 49030
gtgagtgagcacgcggaacccagacagtggcgcctggctcaagtgcagctggccaattggggaacgttcgacaagcagatctccattgtcaatattgcgcgcaaaggtcacctgatcaccggcccgtctgggtcgggtaagtcgtccctgttggatgcgatcgcgtgtgtgctcaccccggacaagtggttgcgatttaacttggcagcacaggggtcaacctcgcgttccgatcaacgcagtttggtcagctacgtccgaggtgcgtggaccagagtcacggatgacgaccaagaccgggttgtgagtaaatatttgcgacccagttctacgtggagcggaatcgtgttgcgctttcacgacggtgagggcaagaccctgagcctcgcccgccttttcttcctcaaagggtccagcgtcagtgcgcgcgacctcggcgatatttgcgtccttgaggagactgagcttgacctgattgacctgcaaaagtacgccgcgggtgggttggagaccaaaaaactcaaagccgatcatcccgccgctatcgtcacgtccaatggcacacacacgaagttttatgcccggttacgccgtgcgttcgggatcgaaaacgaatctgccctgcaactcctccacaggacacaatcagcaaaaagcctcgacaaccttgaccggctgttccgcgatttcatgctgcctgtgccggacacgttcgaaatcgctgacactgccgttcagcaatttggtgacctgcgggacgctcacgcgcacgttgtcgaactgcggaaacagcgagatcttctcctcaaactgcgcaccgcctcggaagagtacgacacctgctgggccaaacatgttgacctcaacactctgaacgacttactcagcccgttcttaaagcggcgcgaacttgcgatgctcaacgagcagcaacagcacttacggcgtacgctcgcgcagaaacgagcgcaactcgaagagaatcgcgcggaagaaggtagggcggagtcagaacttgacacggctacacgggttgttagacaaagcggtggtgcagaagttgaagtcctgcaggccacactggacggcgccaggaacgatcacagtgcaactgaaaaccggcgacgtcggttcgaagcgcaactgcagtcggttgggatcatgcgcatgccacagaccgcagacgagtttgctgaactccacacggaaattgctgccgaaaccaagtctcaagagcagtcggtaggcgcgtcttacgaagacaatgaccggcttgcgaaagcgaggcgtgacgttcgtgaaatcgaggcccagatacgcacgctccggcagtccggttcaacagttccagacaacttgcaacgtgtgcgccaagccattgcaacacgtatcgggattcccgccgaatcgatgccgttcgcagcggaactcattgaagtgaaaccacacttcaaagaatggacgggcgcgattgagcgggttctacgtccgtttgcgctcacgatgctggtgcggagccagtatctcccagcggtgcgcgagtgggtagataacaacgaaatacgtggccgactcgtctacgaagaagttgctgacggcattgaacgaccgcagccggtgcttcaccgcgactcgctcatcaaccgcatcgaaatagcagactcagcagtaggcgcgtgggtttcgtgggcgctttccgtgcgctacaactacgtgtgtgtagaaactcccgacgatctgggggaccactcgcgggcagttacgatccgcgggcagatgaaaacctcggctacgcgctacgaaaaagatgaccgccggggcatcaacgaccgtagccactgggtgctgggcgaccgtgcaggtaaactctctgcgctcgcagaccgtttgaaagaagcacaggaggaattcaacgcagcccaagaggttgtggacgcggcaacccggcaagaacaggaacgcaatattcggcgaggtcgccttgaaagcatccttgacgggtcatgggcggaatacgacactgtttcaagtcagaagaaagtcgactcgattgaacagcgtttgcggactctcacctcgggagacgcgactctcagccgggcagtgcaagcagagcagaaagcgaaggcggcctacgacgccgcaaggagcgccacggaggacacgaggcacgaggtgcgcatggccgaacgcgacctggcagtgtgcgaagagaaagccggtgagatcaaagcgcggattgcggcaggcgaactcgaagacgtgccagaagacacggctacgcggttagaagagcggctgcgacgtgaaaagcgggccatccgcttggacaacattcacgaggtgggtcaacgtgtgtccacagcgctacagaaagaaaaagacacagcgcgggatgctgctgaccgggcttcgcatcaagtgacgcaactgacgaccgaatttaaagaacggtgggaagcggttgccagcgatttgatgcctggggtggaagaccgggccgggttcttgcggattctggacgaaatcctcacgaacgggctgcctacgtatgagactcggtttaggaagttgttgcaggagcgttcgcaggacttggtgggcgagctgctgaacgaaatcatgtccgcgcccaacgaaatcagggaccgggtggtgcccattaattcggccctggcgcggaaaccgttcgatgaggcccgatttttgcacttgcgcgtgaaaacccaacggagcgctgttgttgaagacttcatggggcaactccgcacgatcgtggacggtagttgggatgaccaagatatgcagaccgcagaaagcaagtacgcggtgttggcagaaatcatgcggcggtttgactctggtgagcacgttgacaaggcgtggcggaatcagtgtttggatacgcgaacgcatgtgaagttcctggccgatgaggtcgacgaacacggcacggtgagagcaacgtacgactctggggcagccatgtcaggtggccagcagcaaaagttggttgtgttctgcttggcggccgcgttgcggtaccagctcgcacagcgtgacgacgatgtgcccctgtacggcaccgtgatcttggacgaagcgttcgacaaagcagataccaggtacacgcggatggctctggatatttttgtcgagtttggttttcatttggtgttggcaaccccgcagaagctcttacagacgatcgaaccgtatgtgggagcagtgactgagattgataaccccacgaggcagttgagtacggttgccaatatcgattggtcaggccacacggcaggggacagtgatgcgcggagttga

SEQ ID NO: 42377 - DNA, 1164 bp, Brevibacterium mcbrellneri ATCC 49030
atgcgcggagttgaggaagcgcggtccactttgcgggagcgtcttcaacggaacatgtccgggtgggttgcttcgcctgacagttttttgcctatcaagtttgccctccacccgcccacggaaaaacaggcaattgtcgatcagcaggcggccattgactgggtcgttcagtggcgtcacgtgagtgataaacctgagtttgcgggggctgtgacgtgggaagagcgggcgtggtcgcgggtaggtaggcaaagtgtgcccgtgcggtttgtgttgaaggacgccgaggtcgttgcacgttttgttggtggggaacctgcgtcgcgttttaggcggatgaaagaccgtgctacgtgtattcgagaggtgtgcggggattctgctacggtcgccggggccatacgtgcgaacggacagcgcctcgtgggcttaaacgacgaagatttcggccgggtcctcgaagtcgtcacatggttaggggacaacccggtggggcagctgcgacctcggcagttacctattcgcggtgttgactcgaagtggttttctacgcacaaaaccgcggtgacggccttgttgaaggcgtatggcagggaagatgccgtttcagttcttgaaccggagcctcgtttgcacgtgaggtttttggaccctcagctcgcgccgtgtgaggcgttatgcgatgtcacggctcccgttgacgagttagcgtgcatggagattgagccggagacagtgttcgtgtttgagaacttggagtcggtgctgtcgatgccgaggtgtgccggagctgttgtgattcatggtggcggttattctgtggacctgcttgcgcggcttccgtggttacgcaatgcgcgcgtggtgtactggggtgacctggatagtcatgggttcgctattctcgcaaagtttagaaaacaggtgccgggcgcggtttcgatacttatggacgttgagacgctcgtggctcaccgcgacctgtgggtagaggagccgaagccgcatactgggtcggttgcggggttgactagttcggaggagcgggcgttagcgcgggtgcgagcggaaggtaacgtgcgtttggagcaggagagaatcccgtggaaaaatgcactcgaggccatcgcaccaagggcgctggaccagtgcggtagaacctag

SEQ ID NO: 42378 - DNA, 1488 bp, Corynebacterium variabile DSM 44702
atgacgaacccacgtgccgaagccgcctaccgccatgcctcggcggccttccgcaaccccaccctcgatctgctgcacggtcgttacgcgcccttcgtgatcgcggcattgtccctggtcttcaccgcggaacgtcccaccgtcaccgtggcggacgcccatgtcgaggtcggcgacatcgccgaggccctgcgggcgtccggtgaggagaatctcccggtcggcaccggccgtgagatctgccggtactgggtgcgtgtcggctggctcgtcccgcacatcgacgacagttccggcaccggcaccgaggtctacaggctctccgcccaggcggtcagcgccctggagatcgccggccgtgccggtggtcgggtgagggtgtcgcggtcccgtatgcggacgctcctcgactcgatcgaccagctcgtttccgactccgagaccgaccctgagacccgccgggccaccctccttgcggagcgggacgccttggacgcgcagctctcccggctggaggccggtgaggtcgagccggtggatgacgaccagctgctggaggaggcggagaacgtcctccacctctcccgggaactgcccgccgacttcgtgagggtggcggagtccatcaacgagatgcagcgcgatgtggtcgccgacctgcgtcgggacgtgcgtccggccggcgaggtgctgcgcgagtacctccaccgcggtcagcacgtcatggacgccaccccggagggacgagctttcgccggcgccctggagctcatcggcgaacccgagcacatcgaccggctcaccgaccagctgcagaacctgctcgcccagccgttcgcccggcatctgccggtgacgcagcagcacgacctcgccgccgtcgcacaccgtgtcgagcagggggtgacggaggttctcaccgcccagcggcgggcgtcccacgtcatcaccgcccaggtcaggacgcacgatccggtgcgcgaccgggaggtcgacgacctgctgcgcacggtgatgtccgggctgcagtcctggatgccgcagtccagtaggggcgaccgggtcgatccgctgcgcagtttcccggcggcgaaggtcggcgcgctgcgtcgcaacctcaatgacctgcagcccgagtccgcacccgagccgctgcacgcttccgaggaggccccggagttcgagggcaccgaggggcgcgagtggggtgggccgcgctacgaggacctggagaactacatcgggtcgagagaggacgccgatttcgatctcgcggaggccttcgcacatctcgtggcgtccgccagaaggcccgtcgacctgctcgggctgctggagatcgcccaccgcaacggcatggtcgagaccgggggcgtcgccaccgtcgaggcgcggcgtcctgacgggaccgtcaggcgcttcgccttcggcgacgtgacagcaggaaccaccggcaccaccacaggacaggagaacaccgatgactga

SEQ ID NO: 42379 - DNA, 627 bp, Corynebacterium variabile DSM 44702
atggaggaggacctcgacgggtgcttcgccggcgaccgcggcgtcctcgagcctgcggtgcgtcgggtgctggtgcgcctgctgcagcgacggttcctcagcgcggagaagcaccccgcggactggacggtgctgctggacaaccagcaggtcatcgagtcgcggctgcacgatctcttcgtccgcctcgtggtggacgccgaccgtggcctggcttacaagcagcaggtccgtgccgacgaggcagacgagaccgcggtctccgatatcccggtgctgttgcgcgacgaggcctacacccgcgccgagacgctggtgctggtgtgtctgcgcagcgtgtggcagcgcgagtcgactgccggggaaccgtccgcccgcgtcgatgtggaggaggtcgagcagaccgtactgacctacttcaccgagtccgacggtgacctcgcccgccggcagaaagcggtgcgccgcgccctggaacggttgcggcacgagggcatcgtcgaggaggagaccgagggacgctacctcatcagtccgctcatcgagatcgtgctcagcgcgcagaagctgcgggagctcgccgactggctcagcgcacagacggcacaggcaggagaacttcagtga

SEQ ID NO: 42380 - DNA, 3351 bp, Corynebacterium variabile DSM 44702
gtgaccatgctcgacaccctcttcggtctcatcccttcggggtcccgcgggcagcagtggctcgccggtgacctgcagctggtgaactggggcggctatgacggcgcgcaccgcgtccgcttctcgccctcggcgacactgctgtgcggtgggtccggttccggcaagtccacgctgatggacgcctacatcgccctgatgatgccgcacaccacgccgttcaacggggcgtccaacggtgcggtgtccggccgtgcccggggcgaggaccagcgcaacatcctgtcctacggtcgcggcaaaatcgacgagacccgtaccgagcacggcacgagggtgcgtgtgctgcgcggcgacgggacagacacctggaccgccgtcgccatgacctgggtcgacgccagtggaccgatggagaagcggttcaccgcggtgcgtgcctggtatatcccggccaccgcccgcgtcctcgatgacgcggtgaaggtccgcggcgtcatcgagggcgacttcgacctcaccgacctggaggacgccgcgtcccgccgtctgtcggacgccgccgtgcgcgcgaccgggctggagacgatggccacggaccgcgagttcctcgcaaggatccacgcggtgctcggcatcggtgccgccggtgcgggtaccaaggcgatgaacctgctcgcccgtatccaggccggccagcagatcaccaccgtcgacgaactgtacaagcgcatggtgctcgaggagccggacaccttcgccaccgcggacgccgtggtcgagcacttcgacgagctggagggcacccggctccggatggtgaccgcccagcggcaggtccgcgcactgaccccgctgcgcgaggcgcggacccggatcggggacgcagccgaacggctccggctgatcaaggagatcggccagttccgggacgactcctcgccggccgcgatgtggcggacctcccggcggctcgacctgctgcgcgccgctgaggaggagctgcgaagccaggcggtggacgccgagtccctggtcgccacccacaccgccgccgccgaggccgccgaggccgagcgcgacagcctgatccaggtgctgcgcaactccggcggtgaccggctggagaccgccgagcgggagctcggggcggcgcgtcggcgctgcgagcagatcacccgtacccgcgagaaggtcgaggaggacctcatcccgctgggtgctgtcgtgaccgacgaagaggcgttcaccgcgctggtcgcgcaggggaagtccgcgttggcggatcccgaggtcaaggcgggtgtccgtgagagctacgcggaggcccggaccgcggcgtccgtcgcccgcgaccggtggaatgagctggagtcggagaagaaggcgacggctgagcgtaccgacaacatccccggggagctgcacgccgcgcgtgccgccctggcggaggccgctggtctgtcggtcgatgagctgccgttcgtcggtgagcttgtcgaggtgcgcaccgagttcgagccctggcgggaggccttcaacctggccctcggcgggttcgcgacgacgctgctcatcgacgagaccgctctgccgcagttccgggcggcgatcaaccaggtgcggacccgcatccgcgtccccttcgagggtgtgcagaccgggcaggcccggatcacctgtgacccccggcagctgcccggccggctcgactaccgcgacacccccttcaccgggtggctgcaggaccgcctggaccagcggttcggcttcgtgtgcgtggattccgccgaggagctccgcgcccaccggtcggcgctgacggtgtccgggcagatgtcccagggtgcccgtggtgcccacggcgggcacggccgacgcaatgtgctgggcttctccagtcaccggcgcgtcgatgaactcgccggggagatcgcggcggcgaaggccgaggtggaggctgcgtcctccgaggtcgccgctgctgaggccgagctggacgcggtggacgtgcgtctggccgcctaccgccggatcgtggacctgacctgggaggagatcgacgtcgccacggtcaccgacgaggtcacccgctgggaggaggccgtcgaaggtatctccgagggcagccccgagatcgcggcgatgcagaaccagatcgccggcctgaaggtgaagatccagggcctacaggagaagaccggccgcgccaagggtgagcaccagcacctcatggagcggtgggacgccgtcgccgaggagatcgacgaggccgaggtggcgctcgacgaggccgccgaggccggtcgcgaactcaccggggaacaggacgcctggctgcgctcccggttcaccgtcaccgacggtgagaccggtgatccggcggcgcgtctggcgaggttggatgcgtcactggagtcggcgtcccgcgtcctcgaggaggaccgtgcctcggcgcagacgacgctggccgaccagcgcgcggcggtgcgtcggacgatggagtccttcctggacgcctggccgaacccgaacctgcgggccgatcccgatgcgtcgctgaaggacttcgagcggatcctcgacgacctcgagaccagcgggctgcaccggctggaaggggagtggaaggagagcctgctgcggctgtccggcaacgacctgacgaacctggactcgacgctgggccgggcactgcgggaaatccgtgagcggatcgagccggtgaaccggatcatggctgacctgccgttctacgacgacgaccaccggcttcagatcacgctgcgggagaaccagtccgaggtgcggcgccggttccgcaaggagctgcgcgaggtgcgtgcgctcatcggcgacgcctcgaccgacgaggagcgtgccgaggtgtacccgcggatggcgcggctcatcgaccggatccgccggggcgcgccggactacgcctcgctggtggacgtgcgtaaccatgtccgtgtcagtgcggagaagatcacggctgtgtccggtgagcatgtggcgctctacgaccacatcggtgagaagtccggtggtgagtcgcaggagctcatcgccttcatcgtcggcgccgcgctgcgctaccagctgggtgacgccgatgcggagcgtccccgctatgcgccggtgttcctcgatgaggcgctgatcaaggcggacgcgcacttcacggcccgggcgatcggtgcgtggcgtgggctcgggttccagctggtcatcggtgcgccgatcgacaagtacagtgccatcgagccgcacatcgacgtggagtacgacatcctcaaggacacctccgggcggtcctgggccaagccgaaggtcggcgtggcgtag

SEQ ID NO: 42381 - DNA, 1425 bp, Clostridium sp. HGF2
atgtccttatttgagaaaatggatccatccttctttaccatactggtatcgaagaaccgggatatttatgtggatctgcttctgcagattcatgactgcatttatcgcaatcagaccatgagtatggagcgtgccctgcttcaggatttactggaagattatgtgcaggataaaaaatatgaaatcgactttcaggaggaagcggaatacagcgatatcgagaatgagctgcgcagtgagaaggatgtttatgaccgggatatccagtttctgttacggctgtttgagaagcatacctggatcaatgtcgatctgcatatggatacgatgaaaaaaatggtgtctctgccctatcacagccgggtgttcatctccttcgtgaatgatattatcaaggaacgggaacagatcggctatctgattcgcatccatgcctccctgaaggatatggatgatcccgtgaaaatagaagacagctatcagcatatccgtaatgcctatgccgatttcaaggagctgattctgacactggaacagaccaatgccagaatacgggattattatgcgattcaggtgaaaaaggcatcaacgaaaatctatcatgatttctttgatgtttattatggtgatattgtggagggctatgtttttccaactcttgtggaggacagcttaaaacggtttaaaaacccggtcgcaggtattttggaaacccttctgcaggaggaagcagtcaaggagaaaattgtagacagtgcggtaagtcactatcgtgttgccagccgtgatacggcaaaaaagcatatcgaggaaatgctgtatgccatgtacaatgatttgaatatcgtggaaacgctgactgcccagctggtggacagcgacgcgggttaccgcagactggcaaagcagaaaattatgtatctgtgcaacagtgatcaggggttaaagggaaagctggtggaactgatccatcatatgaaggaagagccgcagagagtgtgtgagcagatcagtgaatccatcaatatccagcagacccgctacatggagcgtgatgaggtgtacacctttgaacgacgcaggcgtagggatgagcgggaagtgatgaccttcacctttgaagagagcacccagaatcaggaggagcttgaaaagcgcattggctttgaccgctacgctcgctttacccgtgaaagcatatcggcttactatgcagagaagctgcatggggaagcggtaggaaagctgaaggatatcggggtaaaggatatggatgactatatccgctccattctggtgtatgtatatggaagagaccgcaaaatggatgtgcaggcaaccctgattccgaatcagacggaagggattacagaaggggatttccattatcccaatctgttgattaaaaggaaggtaacaaaatga

SEQ ID NO: 42382 - DNA, 669 bp, Clostridium sp. HGF2
atgaaggtagaacaactggatctgaaggaccgcgaggaattcggacggatcgtcaatatattactggcagaaaactgcatttaccagtatgcgaaaatcagacagtttgagaaaaaggaacgaaatgcagactatgtgtttatccatgatcactgggactgctttgaggaatatctccgctatgcgggatggctgctgtgcagggagcgttcatcttatatggggatgatttatctggtcaatgagcgggaggactgtagctgccgctatcgtctgacaaagctggaaacgcagcttctgctgattctgcgtaattattatgaggagaaaatgctggagctggatgcatctctcaccatacgtatttctgtcaatgagctgctgcagctgctggtggatgtgcatgcgatggtaagcgtaaggccttcgatgcaatacatccatgcggcattacagtccctgcaaagactgaatattcttcagaaatacacacagggggatgaggagctgatctgggtactgccttatatcacctgtgttctcacaccgaagcgggtggaggaaattctgatgaagctgcgtaatgaggaaggagaggaagacgatgaagctgaagaaaatgctgctggtcaactggctgtattacgagaagacgatcctgagctttga

SEQ ID NO: 42383 - DNA, 3318 bp, Clostridium sp. HGF2
atgaggaaggagaggaagacgatgaagctgaagaaaatgctgctggtcaactggctgtattacgagaagacgatcctgagctttgaggatatcgtctttctgagcggtaaaaccggagagggaaagtcagcgctgattgatgccatgcagctggttattctcggtcgaaccgacaattccattttcaataaatccgcaaatgataaaacaacccgtgatctgatgggatatctgaagggcaaatacaaggatggtacctttaagcgtgacaaagggatgttcagctcacatctgtgtatggaatttgaggatgaacagcataggatttactgctttggtatcgtatttgatgtaaacgggcctacgcggggggatacggagcattgctactatatgatgaatcagccgattcccgggcattgctttacggatgagggaacggtattcaatatccgtcgtatgaagaagctgctggccagctttcaggatcgcagctgccgttcctttaccacacatatggattacaaaaactatttccgtcagcgcatgctgatcaaggaccagcggtttttcgatgtctttaaaatggcagttgcatacacaccgatgatgaatatttccgaattcatcgtaaaaaatatctgtcaggaggaggaagacctgaatctggaagagatgcaggaggaaattcaggattaccggcagatgaaggaacagctggaaaccgtacagcagaaaaaggctcagctttccctgatccatgaacagtatacggatatatgcggggaacaggagcgtgttgcgaacttgcgtgtggagcaaaaggcagctgtatatcacggtatgctggtggaacatgatgaggcagccgcacaatatgaggtatatacaaagagctatcagaagctgacaaaggaatcaagggaaaccgaggagcagcgggcactgctggaacagaacatggaagccttacgggatgcacgcagggataatgcggcagatattctggaacgaaagatacaggcgcatctggagcagcgaaacaccctgcaaagagatacgaccgccgttcagcagcagctggttacgaagggtgaatttctgaaggaacagatagagcagctggaggaaatcgaggattatgacggcttgcagctggaggacttcgatttgtccggagtcaagctgtctatacaaaggtccgtgcatgcggcacagcggctggctgcgtttgatctggatgcctatagggatattcagcgacagatgagagacatcgagaataccctgtccacggtgcgccaaaccatgcaaagcagcctgcagacatgcagggaggagcaggaggtgcttgcggcaaatcgccgtgcgctggaagccgggaaaaagacatatccgaaaaagctgctcgttttaaagcaggagctggaggaacggctttatcagcaggtgggaaaaccggtagaggtatgcatactcgcagacctgttcagcattcaggaggaggcgtggacaaatgcgatcgaaggctacatccataaccagaagctgaatctggtggttgaggcagaatatttcatggatgcctatcgcatttaccgctccattaaggaagaaaaaaagattcatacctattccattgtggatatcgcaaaggcaaagccggggaaacgtcccgatgcaaaaacactgtatgactgcgtgcaggtggaacgcgaggatgtgcgcccctatgtggaatatctgctgggcagagtcgtatgctgtgaagcggaggagacactgcgaagctatccggtaagcatcaccagcgactgtatgctgtacagcggctatgcagtgtcgcatatgaatccggaattgtataaggtaccctttatcggtgccgattccatagaaaagcagctgcaggagctgattatccgccagcaaaagctcacctccacctgccgcaagctggaaacagtcacaaggacattgcaggcggtacagctgcaaaccgttatcagtgatgactttatccgtcagctggaggatggactgtgcaaggccaaagaggtggagcagctggaacaaaagatcaaagagctgcgtgacgctcagacaccggaatccctgcaggagcttctgctgctggatcaaaaactggatgaggcaaagaaaaagaaaaacgaactgtatatgctgcaggtggaacaggaaagccggcgccgtcagctggaagaggatatgaagctttgcaatgcacgtatacaggagcttcagcagcaggttaaggaagcgaaaaagcccgagcaaggcataccggacacaatcggggcaatcaccacggcagacggtatccgcaggaaacagaaacagctggaggaagcactgcgggagctgaacagccgtgttgaaatttccaagctggagctgataacgaaaaaaacacattacaatgataccttccgcattgccctcaacccgaattttttatgcgatgattatgagcgggaatatgaaaagcattcggataatattgttgaggactatatcgataaatgccgcctcgcacagcagaaggcatatgagtgcttccagaataatttctttagtgcgctcaatagtaaaatcgaaaatgtgcgaatgcagattgaccggttgaaccgctctatccgcaggcataaattcggccgctccagctatgaatttgtgtgtacctgcaatgaggattaccgtgagtattacaatctgatcaccaacaaggaattaaacgggcacaatctgttgaacacgaaggtgtatgaggaaaatgaggagctgattcatgagctgtttgataaaatttcttccttatcctccatgcaggaccccaaaaagtatcaggagctgcaaaaagaggttcagctgctttcccgcttcaccacctatctgaaatttgatattctggaaaacggaaactcgctgcgtgccacgatcggctccagctccggtggagaaacacagacaccgttttatgtcgctgtactggtatcgctgttcagcgtatatgatgcaggaaacgacggtctgcagctggcaatctttgatgaggccttcgataaaatggataatgagcgaatcgaggaatgcatttacctgttgaagtcactcggctttcaggcaattatcgtaacaccgacggataagatatccaatctgagcaaggttgcggatgcgacgctgattgcgacaacggatgagaaaaacggccagcgggtttccaccgttcagaaatggagtcagaaagaaaacatagccatccccgactcggaaatgagacaggaagaagtataa

SEQ ID NO: 42384 - DNA, 1437 bp, Mycobacterium gilvum Spyr1
gtggacgacaacgcgacactgtcggccgccgacctgctcgagcgcaaccgtgagctgcagagttcccgtgcgatccgactgctggccgccaccaacctgagcctctacgcgacgcttatggaacgccactgcgccgacggcgtggtccccgagaccgagctggtggtgcgcctcgagcgcgacctcgacgacctcggcgatccgcagtccggaatcgcgctgatcaagtcgtgggccgcccagggctggctgcaccgcatcgttgatccccgcagcgatcagaacgtctgctatctgacgcaggacgcgcgccgagcgctggacttcctgcgagggatgcgccgccaggacaccctcgccacgggtggttccatcaacggcatcgcgtcgcggctcaagcaggtcgcgatccgcgtcggcaacgaccccgcgcgcatccgcaagagcatcgaagccgagatcgccgcactgcacgaggagctcgacgagctcgacaacggggcgcggccggagcccgatgtgaccgacgcctacgacgaggcgcgggcgatcgcgatgcagatggaacgcctcatcaccgacatcggccagtacggctcgatgatcgagcaggccaccgcggcgctcgacgagccgatcgacagcaatgtcgcctaccgcgaccggcagcgccagatgtacgccgactaccaggccgcctgggattcgcagggccgcgacagccaccgcgcgttcctgcggatgatcaacgaccccgaccagcgcgccgagttcgaggccgacgtggccgcggtcgccgatgcgctgcccgcgctggacccggcgctgcgcaaggtgatggccgggttcttcgagctcgtcggccatcagatcgacgaggtcgagcgcatccagcagcggtgcgcacagcgggtcaaacggttcaccgcgttcggcacgctggagcagagccgcggtgtggcgcgtcagctcaacgaggccatcggcgcagcccgcaacctgctgaagtccagcctcatcgactcacgcctggacctcgaactcccgctggcccgccatgcgatcagctccgtcggcgcgctgagcttcaagatcggcgacctgtccaacccgaagccggcgaaacccgccgagggcgacgtcgacctcgccagcttcgcggcactgaccacccaggtcgatgcgcccgcgatgtcggacatgctcaactccgcggtcgcgcgcggggcggtgtccctgcccgaggcggtggcgatggtccataacgcctacctcggtcacgtgatcgtgctgtggtcgtgggcgctcaaacaacccaacgaggcatcccccgggtcggcgaccgtccggttccgctcgctcgacggcaaggatcgcgaaatggccgttccccgtttgatgttcaccgaaccgatcagtgtcggagtaacgcagtga

SEQ ID NO: 42385 - DNA, 690 bp, Mycobacterium gilvum Spyr1
gtgaccaccgaatccgaagccgatttcgcggcgttctccgcgctgcccgaggtcgaccagaccgcccgtcccccgcaccagcggcggccgcgtttcgacggcgacgtctccgagctgcccgatcgggcctgctgggcgttgcagcatctgctgacgcgccgctacatcagcgccgagtccgacgccgacatctacgcgtgggtgctggagtaccgcagtcagctctcgacgcggctgtcggagctggacctgatcctgcgggtggtggacggaaccgacgtcgcgttcgtcgagcaggcccgctacgaatccgccaagggcatcaagcttctgcgccgcgagccgctgggcacgtacgactcgatcctcgcgctgcacctggctcagatgatgcgcgccgcgggcgggcagagcgtgctgatcagccgcgaggagatgcacggcctgttctccggcgtgctcaacgacaccgaccgcgacgcggtcacgttcgcgggccgcatcgatgccgcgatcgcgcggctcgcgggtctggagatcctgcgcaagagccgcgacgacgaggacagctacaccatctcccccgtgatcacggcagtgatgacggccagcgtgatcagcgaattgcagcagcagttcgaactgttgatcaacggcgcgaccgcggaagcagagaccgatcttgactga

SEQ ID NO: 42386 - DNA, 3393 bp, Mycobacterium gilvum Spyr1
ttgactgagcaattccacctgtcccggctgcaggtcatcaactggggtgtcttcgacggctatcacgacatcccgttcagcgacggcggcgcgctgatcgccggcgcttccggtagcggcaaatcgtctctgctggatgcgatctcgctgggcttcctgccgttcaaccggcgcaacttcaacgcctcgggcgacaacaccgccgcggggtccagcgcgggccggcgcaccgtcgacaagtacgtgcgcggtgcgtggggccagcgcagcgacggcggcacgagccgggtgatgtacctgcgcggtgacggcaccgcctggtcggcggtggcggtcacctactccagcgattccggacgcaccgtgacgggcctggtgctgaagtggctgacgggcgaatcgcgcaacgattcgtcgagccgcttcgtgctcggcgacggtgacctcgacatcgaggacgtctgcaaccgttgggcggcaggacgtttcgacaccgcggtgttcaaggacagccggggtgagcggagcgacgggagaagtcacggctggcggttcacgaccaaggtcgagtcgcagtatctggcgcagctgtatgcgaccatcggcatccgcgcctcggacgcggcccagcagctgctcggcaaggcgaagtcgctgaaaagcgttggcgggctggagcagttcgtccgggagttcatgctcgacgaacccgagagcgtgacccggctgccggaggcactcaagcagatcgacccgctggtggaagcccgcgagttgctcgcggtcgcgcagaagaagcgcaagatcctcggtgacatcgagaagatccagcagcggtatgcctcggagtccaccgatctgggcatcatcgacctggtggatctgccgatggtgcgggcctacaccgaccacgtccggctggcccagtgcccggcccaggtcagccagctcgacaccaccatcgatcagctcgacaacgagcacgaggacatcacgcggagcctgaatctggccaaggcggaggcggattcgctcaacgcgcagatcagcggctcgagtgcgagcatcggtccgctgcagtcgcaggtgaccgccgccgagaccgaggccgagcaggtgtcacggcgccgcaacgcctacgaggacatgctcgccgcgcagggcctcgacgcgccggagaccgccgacgcgttctggaacctgcgcgaggaacttctctcgcaggccaccgatctgctcgcgaaggtcgaacgcaaccgggaggcgtccaccgacgcggagtacgcgcagaagtcggcccggctcgcccgcgacgaggccgccaaggaactcaagcgcgtcgagcacgtcggctcggcactgcccgagttcgcgctgacgatgcgcgatcagatctgcgccgcggtcggggtggacgccaccgatctgccgtatatcgccgagctgatggacctcaaggccgaccagacccgttggcgcactgcggtggagaaggtgctgcgcggggtcggcttgcggttgatggtgcccgaccagcactggacagaggtgctgcgcttcgtcaacgagaccaatatgcgcggacggctgcagctgcaccatgtgcgcgcgaagttcctcggcgccaccccggccgatccggagccgaacacgttggcgggcaagctgttcgcggtcgatccggagcacccgtgtgcggccgaggccgtcgacgtcgtgaccgccgcgggcgaccacatctgtgtcgacacccctgaggtgttcgcccggttccggcgcgcggtcaccgataccgggctgtacaaggattccgatcggttggcgatcaaggacgacagccgcccgctcaagcagtccgagtatctgtaccagggcgacgtgtcggccaagatcaacgcgctcaccgtggatctcgcggcggccgaggaggcttaccagaaggcgcgccgcgtcgccgacgacatcgccgcgcagcgccagcagtggcgcgaccgggccgcggcgtgcaaggcgatctgcgagcagtacccgcagtggagccagatcgacaccgagaccgccgacgggcacgccgaccggctgcgcgagcagtacgagctgctgctggccgagcatcccgacatcgaggcgctcaacgcgcgcgccgacgaatgctggtcgcagatccagaagttgatgacgcgacgcggtgcggtccagacccggcgcgacgcgctcgatgaccgccggacccggctgctggaactcgccgagcggctacagcccgcgttcgtgtcggagccgttgaccgagctgctgcaccgctacgccgggcagctcccggtcagcctggaactccttgagcccgaaccgcatcgcgacgcgttgttcaccgcgatcaagaaggagcgcgagcagctgcgcgagagccgccgccgctcgtatgacgaactggcccgcattctcaacaccttcgacacgtcgttccccgacgcgatcccgaacgactccgacaacttcgacgagcgggtccacgactacgtcgcgctgtgccgtcacatcgacgagtgtgagctgccggaggcctacgagcggatgatgcggctggtcaccgagcaggcaccggatgcgatcctgacgctgcaccgggtggccgagcaggaggcgcggcggatcagcgaccagatcgaccgtgtcaacaccggtttgggcgcggtggagttcaaccgcaacacccgcctgacgctgcgcgcgacgccgcgcagcctgacggcggtgtcggagctgaccgagatcgtgcgggcgatctcgcggcgcatcgccgaagtggggctcggcgacaagcaggcgatcctggaccagtacgccgacattctacggctgcgcaatcggctggcgtcgacggcgccggaggacaaggcgtggacgcgcgacgcgctcgacgtgcgcaaccggttcacgttcgactgcgccgaatgggatgtggcgagcgaggagttgatccgcacgcacagcaacgccggcgacaactccggcggcgagcaggagaagctgatggcgttctgcctcgccggtgcgctgagcttcaacctcgcggcccccgagagttcggacaacaggccggttttcgcgcagttgatgctcgacgaggcgttctcgaagtccgacccgcagttcgcccagcaggcgctgcaggcgttccgcaagttcggcttccagctggtgatcgtcgcaaccgtgcagaacgcgacgaccatccagccctacatcgacagcgtggtgatggtgtccaagaccgaggcgacgggacgcaacgcccgccccgtcgcgacggtgtcgacccgcaccatctcggagttcaccgatctgcggcacgcgatgcgcgccgaggcgaaggtcccggcgggcgtctga

SEQ ID NO: 42387 - DNA, 1407 bp, Lachnoanaerobaculum saburreum DSM 3986
atgaatatttttgatgaggtggatgacaatctgttcagaccgctgaccggaataaataaaagaaaatatgtggatatcctggctctgatttgggaaaagtgcaagagaatgccgatgtatgctatagaaaaaagcactgtctttgatatggcggaggaatatcttttgggtctgggagagaatgtagaacttgatattgaagaacaaagtgagataagcgggaatattacagatatgagagtggtggcaggtactcttataagaaggcttagagatacaggctggcttttagaaaagcccggtgagtatgaagatgatgacaagctggctgtacaatataaggtcgtgccgatacttaaatcatttagagagattgtcagtccgacaatagttacatataagggtaagctttttaagatatattcaatgtttgaacatatatgtgagcagggaagtccgtatgaaggagtgctaaaagaagcatcggaagattttgacaatctgaatcaggcacttagaaccttgtcagcttctatagaagaccatataaatgaactgactttaggaaaaagtccgcaggagatactggatttttttgaaaaatatgaagaaaagatagttgtaggttcatatcacaggtttaagacaaatgacaatctgttctactacaggtcaagtctgtatgagagccttgacaaatgtgaagacagcctgtttgatgcacttgtgcttgactatatcgacactgagcgtgtagaaaaggatgaagcaagcataaagataaaggaacttataacaaaagttcgtatggatattgaagagatggaagaggttatgcgagctattgatgacaggcatattctttatagaacgagagcggtacaaagagcacagtttttgttgctgtctgatggaagcagtaagagtaaaatcaacaatatactaagattttatgcaagtgagatacagtcaaaaggagacggcaacaaggatgatgatacggtagcaagtgaaatctttaggatattcggacaaaacttttttgacagcgcatcacttgccactcctgtaaaaaagagaaaacctacacctattgaactgatgaatataatagaagaactggatatagagctggtagaagagaaaaataaaaagatgatggagtatatacgaaatgctttgacatctgagaatgtaaacaggtttgcaaaagatattttaaacggaaatcatgcagtacgggtaagttccgtatttgaaaaagaacctgatacgtttataaagattataggtttatatacatattcaaagactgctgaaagaggatatgatataaagttaaaggacaatgtggtggaagtaaacggtgttaggttcaaagatttcattgttgaggaaagaagataa

SEQ ID NO: 42388 - DNA, 576 bp, Lachnoanaerobaculum saburreum DSM 3986
atgtcagttgatataaaagaagagatagccaattacctgttaaataattgttttctgatggggaatgtggatactacaagagaaaaatattactatgttataaatcatgaggagagtttcagacagatttttttacctatcggatatacattggttattcataggaatttgagagtagttcagctgataaataatcatggcaccggcagagttgtattaaaaaaatatgagagcattattttgcttatattcaggctcctatatgtagaaaaaagagaaagtctgtctacaagtgaagacagagtttttgtaactgttgaagagataaaaaacgaatatgaaaagctgagtcttccaagaaaatttgataaagtgtttttagaggagtctgtaagaaatataaagaaatataatctcatacaggtagtggacaggcttttggaaatggatgcaaagatacagatttatccgtctgtgatgcttgctatgccggataccaatataagtaaggcatatgaggaaactgccaaacttttagcacagtatgaaaacagtgaagagggagatgaaggatga

SEQ ID NO: 42389 - DNA, 3330 bp, Lachnoanaerobaculum saburreum DSM 3986
atgataagaatgaaaaggcttcatctgataaattggcataattttcaagatgatataatagattttaaaaatatcacctatcttttgggtgtaaatgccgtaggaaagaccactattatggatgctgtgagatattgcctcactaccaataaagacttcaatacggcaggaaataaaaagagtggaagaacgcttctgggttcagttcaccaaaagcaaagggcacaagaatcctatcttcgcccgggacatacagtttcatatataggaatagagtttttggatgaggcaatcaaaaagaactttgtgataattgcccgtatagaatctgaaacaccgaagcaggacttaagaggagtatatcaggattggtatattacaaagcccggatacagtctggaggatattccgttttttacaaagaaaaaggatggaaagagtccgacttccagagacgcctttaagcttgagaacaagggtatggacagagcgtccaatcaggcggatgcaagaagaaggatttgcagaatgcttggtataggtgaagcagactcacctatcggaaagaagttcaatgaagtctttcatatgggtaccagcttagaggatataagagatatcagagagtttatctatacatatattttgccggagcctgaagtaaatatagaatttttacaaaaggacatgattgagcttgagagattgcaggaaatcttgcaggaggcctgtgacagagaagaactgctaaaagaaatcaatgataaaataaaagcggcaaaagaacttctgggtaaggtcaaagtaaatgagagtctggttgcctatgcgaatctacagggaaatattgaggataccgatgagaaaaaatatcttattgaggagtggagtacaagtcttaagataattgacaagaaactgcttgatctttttgaaagtgagaacaaggcatccactcttttgtatgaggcacaaagagcggcggaagaaaatgcggaaaataaggaaatgctctcacttgaaagtgaaaataaaaataataagcttgaaaatgataagcttatattggaagtaagtatatttgaagatgtgttgcaaaagttattttcacttaaagacagtttgaataaaataggctttgctgtaaaagtggctgattgtataagagatgaaaatgcagctgtagatgaaagaatcagagaaatcaaaaacagtgcaaagctttttgcagatatagaagaagaaatcaaaaatcatgatgcaaagataagaaccgatattacaagtttgagtgataaaagtgatattctttcaaaaaagataaaaagtcttgaagcaggtgtgatgtgttatcctgatgaagcgatatttgtcagagataagataaatgattttttgagtgagcagagtaaaagggcggatgccaaactgctctgtgagcttttatatatgacggacagcagttggcaggatgctgtggagagctatttgaatactcaaagattcaatattattgttgagcctgacaattatctttcggcaaagaaggtctttgtttcactgggagacaaggttaaaggtataggacttatagataccagaaaaataagggatgtggagtataaaacttcagatgagtcatatctgggagataagatagagtctgaaaatatctatgcaaagacatatgcaagatttgttatgaaaaatgtcatttgttgtgagtcatcagatgacttggaaaattttacaaagagtgtgacaagggatagacttagattccaaaacttctgtttacaaaggatggcaaagaaggagcattttataggtgtggatgctatagcaaagcaattaaagagtgcaaaaacagagtttacaggcgtcaaaaaagaacttacgaaacttgaagaagccaagaaaaactttgactctatttataacggctatacaaaattcagagcgggagacaacttcggaaagcttgaaaattactgtgaatcaaagtcaaagtcaaaagcactttccgccaagatagaggatatagcaaagaagatagaagagtttaagaaaaatccgattcttttagctatgtatgacagggttagggaatgtaagaaaaacctcagtgttatcagagatgagataacggataataaggctaagaaacaaaatcttaattcaaatataaatcaggcaaaagcagctgttgacgagcttgaaaaaaatcttgcacaaatgcaggctgtatatgagagcagtatagaggagtatccggagtttatcaatgatgttgaaaagaaatatcaaaatgagagaaagtcaaagaaagcttccgccattgcttacaacttttcaaaccgtgcggtacaggataatattacattaaataactatttgaatcaggaacttataccgcttcaacaaagatatactgcgacatatacctgtgattatgctgccggacttggcggtgcggacagataccgtcaggaatatctgacattgcagaatatagaacttgaaaggcataagagtgaacttgccgatgcacagataagatgtaaggacagattccgtaaggaagtgctgtttaggatgaaggatgatatcttaagggcaaagcaacagtttaaacagattaatcgtgtgatggaaaaccttgaatacggcgaagaaagttatagattcgggattgataagagtaaggacaaggaacttggaatgttctatgatattattatggacaaggacaatcagcagattgacagagaaaatgatatgctcatgcttatgaatgaggcaagtaagtctgaggtctttgaaagtcagattgatgattttatgagcagaattatgattgatgtggaagaacatgccaagcagaatctgtcaggtcaaaagtcaaatgcaaagagtatgggaatgtatgtggattacagaacctatcttgactatgacatcattgtaaagaatgctgtaacaggtaatgaggtggaactttcaaaggtcagcggtgaaggaagcggaggtgaaaatcaggcaccgttttatgtagctatttgtgcatctcttttgcagatttatgagcagagcaaggaaggttcaataagacttatacttcttgacgaggcgtttaacaatatgacaagtgacagaatagaaccgatgatgaatatgtttaaaaaattgaatctacagctggttttgatagctacggcggaaaaggccacggccatattgccgtactgtgatattacatattctattgtaaagtccggaaacagaaatgcgataggagtatttgagaggattgaggatggactacactaa

SEQ ID NO: 42390 - DNA, 1227 bp, Lachnoanaerobaculum saburreum DSM 3986
atggactacactaaggatattttgaacagattgatagatatatatgaaagaagagaaggctacaaaaaagagccttcttctttgcgtgtgatacaaatagatataaaaaagacatatcctgcatatgtggacagatacaatcacaatgtgtataaggagatcaatgtagcaatagaaaagttgataaatgaaaatcttgttaattcaaatattgatgtttccggaaaatatgaaaaggtaaagttaaatgttgagaatatttcagtgtgttacaaaaaagtaaagagagttaccataatagagcagtgcaaaaagatggaagctgtacttaatctgtttaaagataaaaatctgcctgtattagacaatattttatctgattggagaaaacttatatcagaatataaaaagattccatatgatataaaatatgatgcaatcagactgatgaatatactgaaaatacttgaagccatactaagactaagtaatgagagctatatcagaaacttttcaaccgcaatatttcaggactctaagaggtttcaaagagaatttaagtccggtatagagagtatactttttgattatacaaatgaggcggtagaaagagataagatacttgaatattataatctgtatgaaaatccaacatatacatatataaagggagatgcggtaattaagtttgaagattccgtcatttatgtaaaagaactgcctgacgggattgcactgtcaaatgtatcacttgaagcgataagagaggtcaaagtatttgcaaagtctgtaataactgtagaaaacctgaccacttatcatgatgaagatgaaagagaggcggtatatatttatctgggaggttatcacaataaatcaaaacaggtgatattaaaaaagatatatgatgaaaataagaattgtgaatttatgcatgaaggggatatagatgtatatggttttttgatacttgaaaacttaaaagaaaagaccggaataccttttaaacctttaaatatggatgtagatactctaaaaagattttttgaagcaaatatatacaaggaacttacattttccgatatcaatatgatagagaaaaataaagaaaagcttagagattataaggaagtattggaatttatgcttttgcataattgtaaggtggagcaggaatctataaaggcggttgagattttagagccggtaggcagacggattttttaa

SEQ ID NO: 42391 - DNA, 1359 bp, Lachnospiraceae bacterium 5_1_63FAA
atgaaatttgcctatgatatcccagattcattctggagtttatttcgttcgatgaacagagaactttatatggaagccctgctgaagatcaacgaagaatatgaatataacaattattatttaagtaaagaagtatgccttcaggtattagaagactggaacgaaagccagcggatctggttatctcctgaagaatttgaatcagaaaatgatgcaagccagacaccgccaaacaggatcttaaactggctgatcaagacaggctggttaaagaggatcgaagatttctcaacattaaccaccaatatcatcattcctgattacgcagccgtatttttaacagcatttgaagaattagtcaacccatcaacggatgacacagagatctatatccagaatgtatacgcaacactgttttcattctggcatgataagaagatgaacttagccatgttaaaaacagcgcttgttaatacaaagaaattaaataaagccttgcaggatatgttacacaacatggaccatttctttagccgactgctaaaacagaaatcatatgaagaagtgctggcagaacatttggaaggttacgtcgaggagatcgttgagaagaaatatcatatcttaaagacaaatgataacttctacctatataaaaatgatatcaaacgatgtttaagagaaatgagagaagatattccatggatggaacaggtacagaagaaagcagataaagaaaaaggcgaagatgtgctaagcatcatcaatgcgatcgaacgtggatttgatgatattgaacatcgaatttccaacatggataaagaacattccaaatatatcagggcgacagtaacgcgtatgaattacatgctgaatggagaatccgacacaagaggtctgatgatccagctgttaaagacgatcggggattctaaggacagcgaggaaaagatcgagaaggtcggacaaagtatgaatctgtctcattttgaagtgctttcagagaagtctttgtataagaagagaaaacgaagagattttgcaagtcaggtagaagaagaaaagcagcaggaagaattatcaagagaagatgtcctaagattaaataagattcatacaagataccagcaggctgagattgaagattttattgaagcttacatgcatgatgaccatatggaagttaaggatattgatatcagggatgaagagtcctttgagaaattaatccttgcctacgattacagcacgagaagaaacagtaaatataaagtgatcgagagagacgataaattgatcgataatggaagttaccgctatccggcattaacttttgtaaggaggaaaccgaaatcatga

SEQ ID NO: 42392 - DNA, 657 bp, Lachnospiraceae bacterium 5_1_63FAA
atgataccgtattatgaagaattgaatgacgaagaaaaaaatgcggtcacgaaagtgatccgtacgttattaaaacagacatttgtattagaaagaaaatatgataaaaagagcggaagacttgtatacaataaagaatttagaaccattgacctgcatcaggaatttttaagagaatattttaagatttcaggaatcgaattaagagaaaatctgcatctgggagtcttttatattgaaggagaaactttgatcggagagaagatttccagattatcaaccatttatcttctgatcttaaaattattgtacgatgaacatatggcagaggcttcatcgaatacaagtgtgtatacatcattaggagaaatccatgaaaagatcaatgatttccatctgatgagaaccttgccatccatcactgagatgcgtcgttccatcgcattattaaagaaatatcagatcatcgaacccctcgatgtattagaagagttaaatgacgagacaagaatgatgatctatccatgcgtgaatgtcgtgttactaggagatgacatccgcagattgatcgaaagtttcagtaaggaggaagtagacagtgagtttgacgaagacgaagcagccatttctggcattatcgaagatatgcctgaataa

SEQ ID NO: 42393 - DNA, 1923 bp, Lachnospiraceae bacterium 5_1_63FAA
ttgacgaagacgaagcagccatttctggcattatcgaagatatgcctgaataattggcattatatagatcagaaaatattaagtttcaacgatggaatcaatttttttaccggacattctggaagtggaaagtcaacagtgatcgatgcgatgcagatcgttttatatgcgaatacagatggtcgtggattctttaataaggcggcagcagacgattccgatcgaaatctgatcgaatacctgcgaggaatggttgcggtcggagagaaagatgaagttacttatttgagaaataaaaacttctccacaacgatcgttcttgaatttacacagacagaatctgacgaaaaagaatgtcttggagttgtatttgacgtagatacagcaagaaatgatacatccagattatttttctggcacaaaggcggcattttagagaatgcttaccgtacggaagaacatgcgatgacaatttcggaactccgcaaatatatgcagaaaaacttcaaaaaagaagatttctattttggaacaagcaacgagagatttagaaaacagatgtatgacatctatcttggcggtcttgatatggagaaattcccaagactgtttaaacgcgcgatcccatttaaaatgaatatcaagctcgaagattttgtgaaagaatacatctgtatggagcaggacattcatattgaagatatgcaggaaagcgtgatgcagtatggaagaatgcgtcagagaatcgaagatacattaaaggaagcaaagagcttagaagagatcaaagaaagtttcgttaaattcaagaccaaaaaagaggaacaggattattgtcagtaccgcatgaacaaactggatgtcctgaaattaaaaacagatattcatctattacagcaaaagattgaagatggagagaaagatctaaagacacaggaagagaatgaaacagttcttgagaagaaactagagaaactcgccaaagaatacgatgcattagtagcacagatcgcaggaagtggatacgatcagatcgcaacaaggaaaaaggatgttcaggagttgttaggacagttaaatcattccgtacagcgttgggaacagacatcaaaagacttaaaaaaatggtgtgatctcgatattacgccaaatcaggcaatctgggatatcgagaaatttgaacagggagatatcacagaagatgatctaaaccgattaaaacatacattggatatcttaagaaaagaaactgaggaagaacgacaagataatgcgtctgcactaagaaccttaaagaaacaggaaaaatccatttctgatgagttgaaagaactgaaaaagggtaacaaagcgtatccaaaagaagttctggatgcaagatatgaattacagatgaaattaagcgaaaaatgtggtgattttgtaaaggtaaatgtgcttgccgatctgttagatatgaaagatgagagatggcataaagcggtcgaaggatatttaggatcgaataaattaacactgatcgtggaaccaaaatacgtcaaggatgccatggaaatctatcgtgatatggatcagaagaaatactggagaatttcgattgcagacacacaaaagattgataagcaggacatgaaggttgaggaaaatgcattgtcagaagaagttcttgcagaacagtcttatgtgaaaaagctgatagaatccttgatcgggcgtgtgatcaaatgtgagacgatcgatgaattaagaaattgccgtactggtatcacaccagatggaatgctttataaaaatttccagttaaaacgattagatccaaaacagtacacaagaaattcctacattggagacaacagtttacgccacaggatcaaagaattagagaaagaaaaggataagatctttgataaaaagatccattag

SEQ ID NO: 42394 - DNA, 1452 bp, Lachnospiraceae bacterium 8_1_57FAA
atggaaaggatccccaaagatttttataaattattttcaagtaaatatacggattactatatgctgtttctcacggcaatctatgaggaaatgagtctgtcttattccgtgcttggattgacggaaaaagagtgcagggcagttatgaatgaaaagatcgcggcagcggctcttctgtgggatgaggaaaattatgatgaagagggagagtttcttacacgttctaatatggcgtccgtgtgtctgaaacattttcaggagtggggatggctgaaacaggactatgacgaggctttgaacagttacgttgtgacatttcctgaatatagtcagatgtatgtggagttgtttaggagtctgcttgatgaacaagagagcgaagagcgggaaagcgttatgacgatatacagccatctgtatacatatagttccgataaagaaaaaaataatgagattttaaaaagcgcccttcgtgtttccaaaaagcttgtgcagatgcttgtaaatatgcaggacggtatgagagggtattttgatgaactgtcccgtcagaaagattttcggggaatacaggacgtccttgtaaaggagatcaataacagtgacagccgaaaatatgcgatcttgacgacaacggacagtttttatcgatataaagaagctgttaaagaactgcttgacagaaatttacaggaaaatgatatgagcaggctgaaactgttgcgggaactggaagaggtccgtcaaaagaagatgaaagacgaagaaaacgcgggaaaagttaaagatccgaaaaaaacagatgaggcggagaaaataaaagaactgcggctggaacgggcggcggcaatgtgcgaggaagcggcagatacgctgatacgaatcgaaaggcagtttgatgcgatcgaaagaagatataataaactgatcgaacagaagacgatttttgcgtccagggcggctgcgagaatacggtacgttcttcaggaaggagcagaagaagaccgtacggttgcgcttgtagatctgttgaataaaagcaggagaaaagaagaaatatcggaaaaactggcggagcgtatccgccttagcagacctcacagagcgttgacggatgaaagtctgtacaaacggaaagaaaaagggagagaagcgtttgttccggctactgtttcggaaggcggacaggcggaagaaaatttggagtcgtttgtcttaaaaccgctttatacaaggaaagagctgcaggagttcaaagaaagaaacagtgtcggaaacgtatttagaactacgcggcagacggttcggtcggctgaagatttggaaaaattgttttttatatggcaggaagcgacggaaaatgcgtttggcagtggggagatcaccgtaggagaggaagaagaaaccgaacagggaatgcgtttttcaacgctggaaataagagaggactaa

SEQ ID NO: 42395 - DNA, 639 bp, Lachnospiraceae bacterium 8_1_57FAA; identical to SEQ ID NO: 42117

SEQ ID NO: 42396 - DNA, 3366 bp, Lachnospiraceae bacterium 8_1_57FAA
atgaaacagccgaagaaaatttttacaagaatgctgatcaataactggggcggcatcagccataaaatgttggaattccacgagtatgtgaatcttttcagcggaaagagcggatcggggaaatcgacggttatggatgcgatacaggttgttctgtatgggagtgtgtctgctaattttctgaataaagcggcagatgattctaaaaacaagagaagcgttttaagctatcttagaggagcgcaaaaagacggaacggcaaacaggggagacgttgatttttgttcacagattgttcttgagattgaagataccgccactcatattgtgacttgtgtcggggcggcgttcgaggtggcaaaaggggatacggatctgaaaaaatatacttatttcagtcattcgggaagaattccaaaggatgaatatttggaaaataacgtaccttattcgatcgcacagattagaaaacttacggaagaaagaagcagaagcgccgataacagaggccggggtgaagtaaataaagtgtatccgtcgaaagaagcttatctttatacgctgtacggggaaatcttcggtcaggtagaacaaggtcgtatgatcacgatggaaaaaagcgccattgctctgaaaatgacgagtggaacaggtcagtttataagagattatatgtttccgaaaacgaaagaagatacggtggcgacgatcagtgaacagcttggcgcgtacagagagatcaaagaacgggtggaagatctggaaaaacggatcgaaatgctggataagatccaagtatatgacagagaactgacgaatgtgcgtgcggagaaagtacgaacggaaacagtgctcaaatgcattgagatcgaggaaaatataattcgactcaaaggacgggaaagtgagttggaatccgttgaaaaagaagcggacgaggcgaaaaaagaacagaagatacttcaggacgaactgcagacgatacgggatgaaagagcccgggtacaggcagaattaaataacagcgattatggaaagaaagaacaggaactaaaagatttagaatacagaattgctcttctggcggataattcggcacagtggcggcagatcgtgaaaggattgaaacgatgggaagaagaggatgttgtcactgattatgtgagcaacagagctcttcagcttattcaggaaatacgaggcggagcgcttacggaaaagttatgtaaagaactgaggacacatcttgacttggcccttgataatattacaaatgaattgtcggaacttcgtatttcgatccatgaaacggaaaaagacatcaaagaaaaacaagatgctgtcgaagatctccaaaacgacagaaaaccgtatccgttggaattgaaaaaggcgagacaggaactgcagcgtgcgttgagcgacaggtacggaaggaaaatcgaagttcatattttcgcggatttgtttgatattacggatgaaaaatggaaaaatgcgatcgaaggacggcttggcaggattaaaaaaagtatgattacagaaccggcatacgctcttgatgcagcgaaaatatttcgcaggatgcagcagtttgaagaagttgatctgatcaatagtgaggcggttcaaaaggattctccggaagcggacgaaaactcgctatatgaagcggtacacgcagaaagcggatatgttgaccggtgcttgaaacgttatcttggaagaatacaaaaatgtgagacggtggaagagttaagtacggtaaaagacggagtcacaccggattgttattcgtacagcggatatatgttccgccatctgcgcaggaaggattatacgaaaaatgcatgtatcggtacaaaagtatcgaaggcaaagctaagagagctgcaggaggaaattatagatcttcaaagttcgctgatcgcagatcgtcagacggaagagtcgttgaaagaagcccggcaatttgaacggttcggtcaggaaccggaacatttgatgcgtcttgcgggtgcggcagacgaactggccgatcattaccgccgccaagaccggctcaaagaagaaatcaaagaactgaaaaacggaactttggcagcagaactgcaggctaaaacgaaagaacttacaagccggattgaagaaaaagaacaggcggcaggaagattaagagaaaaagaaatcgaaacagggaagaaaaagggcaaactggaagagaaaattaaagcgctgaaagaaagactcgattttttgatgaagggatatgttccgaatgatgagatatttgccgaagtgaggtcggctttggaaacgaagagcgaagcggcttataaaaaagagatgacagtgatggcggagaggctttttgagaaagaaacaaaacttcaggatgagcggataaaatcaagaaatgcatttaacaatacatatcccgcatatggattttcaggtgtagaacatgacaatgaagtttacgacaaagttttggagcgatgcagaaaagattttgagccgaaatataaagaagaatttgaaaaacaatacgagctcgtgtaccattctctgcgcgataacgtgatcgcaacgatacacggggaaatcaagtcggcatacagacatcggcgtcagatcaataaaatgctgtcgcagatccgtttttcggacagcatttatcagattgatatctctccggcaaaaaatgaaaacggacagttttatgagatgcttatggcagaagaactggacagcaaagtaatagatcatagtgggtttgacggtcagatgagtttgatggaagatgaatttttcagaaaatatgaaaggaagatcggacttcttaccgagaaattcatgccgtccagagaggaagacggggcagggcgtgaaaagcacaaaaatgaaatggaacgctttgctgactacagaaactatttggactttaatatgtatgaacaatctatcgatgaaaacgggatcgagaagaaaaattatgtggacgacatggcgggcgtcgattccggaggagagggacagaacccgaaatatgtggcgcttcttgcaggattcgcaatgctctatatgcagcagagtaatcgggattcaaagattcgccttgttcttcttgatgaggcattttcaaaaatggataaggagcgaagcgaagtctgcttaaaatacgcaagagaattggaacttcagttgattgtctgcgtgccggatgaaagacttcagtctctgatccgaaatgtggacagcgtatacggcttccgcaggtttagaaatcaggttacgatgatgcatattgacaaaggaaattatctcgatatgatcgcaggggaaagcagatcggaagaggtgtag

SEQ ID NO: 42397 - DNA, 1233 bp, Lachnospiraceae bacterium 8_1_57FAA
atgagcggcaatttgttggcaaagtggattattgggaaagcggaaaaaagtgaagcttatcgggcgggaacgctgacaggcatgaaacatccgaaaccggacagagaaatgatcaaggcagcaggtggcttgcctgagctgatcagacaggctgatgagttggagaaaagcggatatatccggacagaaaaaagcaatctgggcgcggatatgaaaaaaatctattattccataggtgtcattccaaagctgtgcgaaaaagaaggaattgaagatccaagaaagcagcagcttcgttatataaaacaaatagaacaactgcgcgctgaggtacaaggcagttttttggaaggttattatgatgagatcataagacggttggaacttggggagatcgtaaaatcacccgatatggaggacgttgattttttccgatgtttgaatgcagttgtgaatttgaaaaaatctctgtggatgcgcgtattcagtgctgctgtgcttaatgactctaagcgttttaaaaaagattatgagaaaaaagtggtgaaagtactggtcagatcacctttgtatgaagaggggatgactgacgatgagatattaagcgttcatggaattctcagttatgcacaggtgatggaatggaaaggtccgcttctgtataaattaaagggcggacaggagtatatagaagataaggcgagggaaaaggaatatgaaatagatacatctcaaaatcaatacggaacagtgattaattcgcagacattggaacgtgcctttcccgtttctataaaaggagtccaaagaattgtaacgattgaaaataaggcaaattatgaagaaatgaaatacagagaggatacgctttatctgttctgtcatggattttattctccgaaagaacggatttttttgaaaagattaatggaagtggcggaaggagagatacagtattttcattggggagatatggatatgggaggcattcgtattttccggtttaataagaaaaatatttttccgaaattgaagccgtataaaatggatcgagaagcatttcaagaagcgcttgaaagaggagcgggcattcctctggaagagaaaaagaaagaaaaattggaaaagcttaatgcgggagaattagaagagcttaaaaagtgtattttggaaaaaggagtagaaatcgaacaggaaattttattggcggaaaatgcgatagcggaaaattga

SEQ ID NO: 42398 - DNA, 1620 bp, Bifidobacterium sp. 12_1_47BFAA
atgcgggagctggaacggctgcgaccggtgtatgagacgggcgtcctgcggttgctgttgcgccagaacgcgatgctgtacgtgtcgctgctgcgttccacgttcgacccgctcaccggcgagctgccgcgcgagaccgtggaggagcggttcgcgcaaagtctgagcagtctggccgacgccggcgagtatgcgccgcgcgaggaccagaccttcgccgaggccgcccatcagatcctcgccgacctgacccgtgaaggcgaaggcgactacgcctggctcgccaactcgcatgatgcggcctcacaccgattcctctaccgtttgacggcccgcgcccaccgcgccatcgaggcgctgagcaggctcgaagacgaatcacgcgccctgtccggcgcgcaggccaacagcatcatcatggaaatcgagcacgcgcgcatgcagctgaccgccgaccccggcgagcgcatcaaactcctcaaccgtgaaatcaaggaacgcaagcacgagatcaaacgcatccaacagggcaagcagcatgccacgctgagcggagcccaggtggaggacgtgatcgccgtgatccacaacacgctgcgcggcgtgcccatcgacctgcgcgaactcgtgctcgacgagcgggacaacggcgacgccttgcgccggcgcatgcaggccggcgacatcagcgtggacgagaacctgacccgctaccacgatgaataccgccgctcgttccgcgaatcagacagcggccgccgcttcgaggacgccttccaggtgatcatcaccgacgagggccgccagcaaatcgacgaagccctgcgcgccatcgccaaaaccccgtatctggccggcgaatccggcgtgctgctcggccagatccgcgacgaactggcccgcatctacgacggcatcgaagccgtgcgccgccagatgcgcgtctccgacgaggcgatcagccggctcgtgcgccagcaaaccgacactcgctaccgcacgatgctcacccgcttgaaccgactgtacgcgcgcctcaacgcggatgcgaaaacccatatgggagacgcctcgcgcccgtacgacacggccacctcggacgcgctgttcgcgccattgccgatgcgcccggccaaatccatgacccgcgccaccgcacccggcctgagcgacctcgccgccgaagccccgcagtcgactccggtggccgatctgcgggacatggtcaacagcggcggcccccgactcctgcgcatggtcagcctcatccggcgcaacccggtgaccgttgacaggtccgatgacaggcccggcgcaaccctcgtggacatcgccgccagcttcaaccggctgcccgaaagcgaacgccgcgaaagcgagatcgtcggcttcctgggcgggctgggagccgtaagcggcaacgccatcgccgacgagccgtccactgacggcgtcggcgtcggggtcgacagcgacatcgccaccgagccggccccggcgcagcgcggcgataccgcgacctggcattgcgtatcgatcgacggcgagccccggaactggatcactagaccggtgctggccgacatggacgagctgagcatcattgtggaggaaggatga

SEQ ID NO: 42399 - DNA, 675 bp, Bifidobacterium sp. 12_1_47BFAA
atgaccgtggccgaggaacacgaggaacacgaggagcatatggacaacgccaacccgtacgccctgttcgaaggcgacaccggcgacatgccggccgaggcacgcatggccgccatcgccctcaaacgtgaccgctatatcagcgggcccacctacgacaccgtgctcgacaaccgcgacgccgtcgtacgctccctgaacaacgacctgctcgacttggtgatcaacgaacgctaccgcatcatgtacgccacgcccgtggccggcgacgacgtgaccctgcgctcgctcaaaacccgtgtcagcctcaaacgcgaggaggccgcgctgctcgccttcctgcgcatccgcgtcctcgaatacgagaacgtgcacgccgaccccgccgactggctcgtcagctttgaggagatccgcgccgcgctcgccaccggcgccggctatctggccgcccgcaacgacgaggaaggcgtggcaaagcagatcggcgccatcgtctccgcgatgatcacctacgggtatttggtgcgcctggacgacgaagccatgtaccagatcacgccgctcgtgcccgtggtgctcgaccgcgaactggccgacacctggctcgacgtcgcggaacacggcgacggcgacacggaagatgacgatgacgacgagaagggagccgaatga

SEQ ID NO: 42400 - DNA, 3549 bp, Bifidobacterium sp. 12_1_47BFAA
atgatgcaggcgacagacgtgcagatgatcgcggaccggtggatgctggaatcccgccgactcatcaactggggctcctatgagggctaccacgaattccgcccctccacggaccacaagctgccggtgaccctgctcgccggcgccagcgaatccggcaaatccacgctggtcgacgcgcagatctccctgctgtacccaaccggcacgccgttcaacaaggcctcgaactccggccgctccgaacgcagcgactacacctacctgcgcggcatggtcggcgtgggcagcaccgaaaccggcgacgagccgctctacctgcgcggccgcgacgagaacggcgcaccgcaacccgtgtggggcgccatcgtggacacctatcgcaaccagaccaccggccaggtgctctcctgcgccaaattcctctacctgatgcccggcgacggccgcggcgacgtgcgccgacagtacgtggtctggggcaagcccgtggaccccaggcgcatggaccaataccgtgacgccccgttcacgccggcccagctcaaagccacctaccccgactgcctcacattccccagcgccgaagcgttccacacacacatctggagcgcaatgggcctgagcgaggccgcctgccgactgctgcacaagatccagtccgccgacgcgccctcccggctcgacgacatcttcaaacaaggcgtgctcggcgtgcccgaagccctggacctggcccgcaccacggtcgaggactacgaacgttacgacgagaacttccacgccatggacgagaagacccgccgcatggacacgctgcgcggcatccaacaggcctacggcgaatacgccgccgcacgcggcaaggcccgcgccttcgaaccggtcaagccggccgtcgacggcacggtgccggccgtgctgcgcgactgggcattggcccgcatgcgcggcgaagtcgccgtccaactgcccgccgatcgcgccgaacaacagaacagcgaggcggaagccaagctgctgcgccgccgaaccgaagacctgcgcacccgtctcgacatgatccgaggccagatgcagggtctggacggcggcgacctgacccgactcgaactcgaactcgaccaggcccgccgcaccctcgaagacgtgcaagccaaccgaacacgaatcgaacaaacgttcgcatccatcggcgagacgctgcccggcgacgaacaggcctggaacgaacgccgcatcaacgccgtgaacttcaaacgcgaatacaacaaacgagacggcgaatgcgaggaagccctcaccgccgccatcaacgcgcgggccggcgcacgcggcgacctcgaacgactgcaacgcgacttcgaccggcaacgctcccagcgcacccgcatctcccagcagatggacgaaacccgcgccatgctctgtcgcgccaccggactcacccccgccgaactgccgtacgtggccgaactcatggacgtgaacgaacacgaggaagactggcgtctcgccatgaacgtcgcctacgcgcccatcgcccagaccatcctcgtcgacaagcgccacgaacagggcttcgccgccaaagtcagcaccatcgacccgcgcaccatgccccgacgcacctggcagttcgtggacaccgcacgccactacgacgacaccggcgcgcacgcgaacatactcaccggagaacaggacggcgactggctgtccggcaaactgcgctaccgcgacgactcgcccttcgccgactggctgcgctcgcagacccaggacgaacgattcgacgccctatgcgtcaccgccatcgacgacaccgaccgcaccaaccgtcaggtgcaggccgacggtcagatcaaatccggcgcacgcggccagcacggcaccaaagaccgcgcccaggtcatcggattcgtcaacgaaacctacctcaacgcgctcgcagcgcaggtcgacgccgcccgcaacgcgctcagccaagccgacaccgactacacggccgccaaaacacagtccgataacctccaccgcgaactcgaactggccaaccagctcgcctacacgtcctgggagcgcatcgacatcgccggcgcgcaacggaccatcacggacacgcaggacgccatcgcatccatcaaaaacgatcccaagctcgccgaactcgccaaacagcgcgacgaactgaacgccgaactcgaccgtgtggaacgccagcgcatcgaatccgaccaggccgcggcccgcgccggcagcgccgtcgaagcggcgctcatctggctgcgcgaccatgccgacaccggcacgacggacgccgccggtgccaccgccgacaatgacgatgacgccgcgtccggcccgctgccggacgaagtcacggcggcgctcgccgaatcctacgacaaccgattcgccggactggcggacgccgccatgcgcgcgcacatgatcatcggcgcgggcgcggcaggaacgcaggcaccgggggagagcttccccgaacgcaccatcgccggcatcggcaaggacatggcctcccgcatcaacctgctgaacggccaggccgatgccgcacgcaccggcgtcgaatcgaagatgagcacctacatcgcgctctacgcggccgacgatgattcgctgaccgccagcgtggaggactaccggtactatctcgacgaactcgccagcctcacccagctggccgcggttgccgccaccgacgccgaataccggcgctgcctcgaacagctgctcaggagcttcctgaccatcaaacgcgccatcgacacggatgccagcgacatccacgaccagcttgaccgcatcaacgccatgctcaaaggccagcagttcggtcccaagcacggcagcctgtccctgcacgcggacgtgcgccgtcccgagcgcaccttctgggcgcagctcatccgcgtcatcggcaccctgaacgattggaaatccgccgacgtcaacgattccgacgcctcgcgcaaggctttcgcggcctgcgcgccgatggtcgggctgctgcgcgccgaactcgcgcaggtcaaggacgcgaacggcgtgaaaagctacggcgcccgcaacctcgacccgcgctgccgctcgtccttctacgccatcgtgcatcatgccgacggcccggatgaacgcatcacctccaccggcggccgttcgggcggcgccttgcaggagctcacctcattcgtatacggcgcggcgctcatctacctgctcggcggcggcctgaccagcgagccctcgtacaccacgctgttcctcgacgaggcgctcatcaaggccgacggccgttacacgcagcgcgccctcacggtgctgccgcgcctcggattccaggtcatcgtctccgctccggaaagcaagaccggcgaaatcctcgaggtctccaccaaggcctacgtgacctacaaggaccccgacaccggcctcacctccctgcgcgaggccgtgctgcatcagaatgacatggacgatgaatcatcgtcggatatattgaaggatgacggggttgccgaatga

SEQ ID NO: 42401 - DNA, 1185 bp, Bifidobacterium sp. 12_1_47BFAA
atggtcggcatgaaagacatcgctgcgatcaccacatgcgtgaagaaacatatgcgttcacatatgtacgacatcgaaccggcatggccatttcccgtgccggtgggattgccggaccaagcatttttggaaaccaatgcgattgcggtgcatgacaacaacaatgagatacggcaatgggcaagcaagaatggttgcgaaatcataaccaagcatcgcaccataggcacctctgtcgagctgatctccaaagtcgtcgttcctgacgaatcaatagccatgcgtgtggttggtcgtacgctggcggcggaatgtcgcgaagcgcgccgccgcatagcatgtctggttgctgcttgtgacgttgctccggaaacaatcgaatcggccgctcgcatgacaggccatgaacagcctgacgacttcgatctgcttgtcagcgcagttcgatatttcaggcatcatgacgtgaccggtatgacgccgcgacagattccactgacaggattcagcggcaaatggctgaatgagtcaaaaaccaatcgtcgtaaggccatttgccgactgctcggtgtcgaaacgttgggtctgtcaaaacggccgaccgaactgcggttccgttatctcgatccggtccgcgacgatgctgagctcgaacgcatcatatggtgtccgtgggaaggcgaagcgttatccggcattaaatatgctgtcatcgttgagaacaaagacacgtatcagactatgccgccgattgcgcagggcatctgcatatggggttctggtcgcgctgtaagcgatgctgtacctgcggttcctgcactgcgtgacatgcgtatcgtgtattggggtgatatggatgcggatggactggaaatactttcgacattacgtgaatcaggtatcgaatgcgactccatcctgatggattgcgatgcatacgatcggtaccacagatttggtaccgatcgtactgaacgcagcgcgaagattgctatgcgggagcctaagccgacgcccggccttcaatcggcggagcgacgtctttatgaacgactgtgtgctgacaaaaccatcgcttatcggcgcatcgaacaggaacgcattcccatgcgtgatgcagttgacgaattacgcaagcttggcatccccgtggagtccattgaaaatcaggatttgccgatttag

SEQ ID NO: 42402 - DNA, 336 bp, Anaerostipes sp. 3_2_56FAA
atggaaacagcgtctgcaagcagctatgtgtatacgtcgctgggagaaatcaatgaaaagatcggagattttgccttgcttaagaacctgtcttctgcgacagagatgagaaagaccatttctctgctcaaaaaataccagatcatcgagccgatggacgtactcgaagaccttaatgaggagagccgcatggtggtgtatccgtgcatcaatgcggttcttctcggagcagatgtacagaaattgattgaaacatttacggaggaggacgaacgtggagaagaagacggagagcaaacaggcattcaaagcactatcgaagatctgtctgaataa

SEQ ID NO: 42403 - DNA, 3384 bp, Anaerostipes sp. 3_2_56FAA
gtggagaagaagacggagagcaaacaggcattcaaagcactatcgaagatctgtctgaataactggcattatattgaacggaaagtgctttctttcagtgaagggatcaatttctttaccggacattccggcagcggaaaatctacggtcatcgatgcccttcagatcgttctgtacgccaacacggacgggagaggatttttcaacaaggcggcggccgatgactcggaccggagcctgatcgaatatttgagaggcatgatttcggtgggagacaataatgagggaaaatatatcagaaaccgaaatttttctacaacgatcgtgctggagcttgaacagacggttaccggagcaaaagagtgtgtcggagtcgtttttgacgtggagactgccaccaatgagatttccaggctgtttttctggcataaaggaggaatccttgaaaaccgctaccgaaaagaagaccgcgccatggcaacaacagaggtgagagattacataaaggaacattttccgaaagaagaattttatttcggttccagcaatgagaggttccggagacagctctacgacatctatctgggaggactggacgcggagaaattcccgagacttttcaagcgggcgatcccgtttaaaatgaacattaagctggaagattttgtgcgggaatacatctgtatggaacaggatatccagatcgaagatatgcaggaaagtgttcttcagtacggcaggatgcgcaggaagatcgaagatacgctgaaggagatcggcagcttaaagcagataggaactggttacgaccggttttccagggcagagcaggaggttcgggtctgtcagtaccggatggaaaagctcgtaatgctccagctgaaagaacagatcagagacctgcatgaaaaaatagagaaggcaggggaagataagaagactcaggagaagaacagaaaggaactgtctggccagcttgcagatctcgcagaggaatatgaccgtctggtaaagcagatcgcaaacagcggctacgagaatctaaaaacagaacttcagggtgtcaatgaacttttggagcaattgcaaaaaagcaaggccgcatggcagcagacgtcggcgggcctgaaccagtgggcagaactggacgtgacaccgaatcagaccatatgggatattgaaagcttttccaagggagatatcagtctcggagaactgcgcagactccggcacagtttaaaggaaatccgggaagaagtggaaaacgaccggcaggacgcggcctcagaactgagaaggatcaagaagcgggaaaaggaaatcgacggggagctgaaaaaactgaaaagagggaataaggcttatccaagggaacttgaaaatgcccggtatgagcttcagacccgtttgagttctaagttccaagcagcggtaaaggtacacattctctcagatcttctggacatgaagtcggagacatggcataaagccgtggaagggtatttaggatcaaataagctgtcactggtcgtggagcctgattatgccaaggcggctatggagatctatcgggaaatggatgaaaagcagtttttcagagcctccattttagacacagaaaagatcctgaaagaaaagccgtccgtcatggatcacgcattggcagaggaagtggttgccaaggagccgtatgtcagaaattttatggatctgcttctcggaagagtgatcaaatgccattcgattgaagaacttagaaatcagaggaccggagtgacccctgactgtctgctctacaagaattttcagctgaaacggctgaatccggcggattacacgaagcgttcctatatcggtgagagcagtgtgaaacagagaatcagagatctgaaggaagagctcaaacagctttcggccaaaaaagaaccgtttgccaacatgctggcagaagcggaagatattttgagactggaagctctggggcgttctgaggaagaatatatagaacagcaggaagccttaaagaaaataaaagaaaaaacggtgcttaaaaaagatcttcaggatcagatgctgaagatgaaggaagaatccatcggtgaactggaagaaaggcagagagagaataagaggcttcaggcacagaaacaggaactgttaaatgaagtttcaagagctgtctggaacagggaaaaacaaatcgaggactggcagaggctctatgtttccgcaaacagtgagctgacggaacaggagagaagtttttgtcgcagcgaagaactggaaaaagcctttgatgactatatgcaggggcggatgccgtcaaatcttgaaagtcttaaaaacgggacattcaggaagatcaaacaggcggagaacagcagggaagaagcttacagatcacttgtggaactgcgctccgaatatttgagggagtatccgaatcggaccttctcgccggccatagagacgaatgagccatatgaagaattgctgcagaagcttgaatgtgaccatcttgcggattatcaggagagggccagagaacaggccaggtcagcggccgagcattttaaagacgattttatttccaagatcaggtatgccattttggaagcatatcagagaagagacgaattaaaccggatcatcagccggctggacttcggaaaagataagtaccagttccgcatcaccaaaaacaaaggccctgatggtgtttattatcctatgtttatggatgaatcgcttcagattgatccgtccaccttggatgcatccatggatcaccagatgaatctgttttccatggagcatgaaaaccgctacggagaggtcatgagtgacctgatcgatattttcatacctccggagaatgcatccccggaagaactggaagaggccaagcggaacatggaaaaatacgcggattacaggacctatctgtctttcgatatggaacagatcgtggagggggaagaaaagctgaccatcggtcttggcaggatgatcaagaaaaattcgggaggggaagggcagaatcccctctatgtagcccttttggcgagctttgcccaggcctaccggatcaatctgtcgccaaagttaaggagaagccctacgatccggctggttgtccttgacgaagccttttccaagatggatgcggagaaggtagccagctgtattgaactgatccgtggactcggattccaggctatcataagcgccaccaatgataagatacagaattatttggaaaacgtagacaagacctttgtctatgccaatccgaataaaaaaagtatttctatacaggagtttgaaaaacgggaatttgatcatctgatggaggaagcagaggatgaagaaggaactgcttaa

SEQ ID NO: 42404 - DNA, 1212 bp, Anaerostipes sp. 3_2_56FAA
atgaagaaggaactgcttaaaatgatcatcgaaaagactgagaagtctgcatcggactggaagaagggagcggaaggaaaccgttcctttctggttcaccaggaactatatgatcagatcggaaaaacagagtttataaatgcagccagagaacttgagtgtcagggcctgttgaaaattgagtgggaagccgtaggggtggatatacgaaggatacgctattctttaaaggatcttgcgctcatatatgaaatgtccggtatccggccgaagtttcaggtgatggaagaaaatatggcggatgttgaaaactttcttcattcggtcaaaggactgtggataaaagattatttaagggactgtatgaaacggttagagcagggcaaaatcccgtcagaattttcaaaacgggaagagctgtttcgatgtcttaaagggatcgatggattgaaggagccgctgtataaaagggttttcagcaaatattgtctgggcgattccaagctttttgagaaaaaactggaaagcactgtgctgtctatagccagaaaatatcatacagatatagaggaaggtatggatcatacgcaggtcctttcccagcttttcattgaagaatattcacaggagcttgcgttaaaagggccgctgcgaatttcagtggacggacaggaaataaatttgggacaatttcgttacggcgcagtcttaaattcacagatgctggtccatgcaaaaccccagtcgggtcaaaacataaagagaatcctgaccatagaaaataaagcaaactatatggcagcgccctatgatgaagaagccgtcatcatttacagccatgggttttttacaccgaaagaaagggagtttctcatcaatctgcgggagagtctttgtgcagagacagaatgcttccattctggagatttggattacggaggtatcctgatctaccggtatatcaaacaaaaaatatttccggatctcatgccctgtcaaatggatgaggaaatctatcataaatatgaaaagtatgcggtggaaatggaacctgggactttaaaaaaattaaaaaagttgaggatggacgaaattcctgaactaatggagatgaaagaacttttggtcagagaaggaaaaggtctggaacaggaaagttttttactggcatccggtgaaccacaggaaaatgcggaacttagatgccggtaa

SEQ ID NO: 42405 - DNA, 1494 bp, Pseudoxanthomonas suwonensis 11-1
ttgagcagtaccgcgttcccgtccctgttcgcgcatgtgccttcggcggccttcgggccgctggcctcgcccaaccgcgagcgctactggcgcctgctgtgccggctgttcgacgaatacttcggccccgacgcgccgctgccgccgagccacggctttgcccggcgcgagatcgtggccgcgctggagcgctacctgctggccgaggaaatctgggaggacgagggcgatgcgcccctgcacggcggcctggccgcgcgcgccacggccgtctacgagcgcctgcgccaggccggctggctgcgccaggacaagctcggcgcgcgcgagatggtgctgatgccgccgtccctggcccagctgctggccaccctggtggagttcgccgaccgcgggccgaccttcgtctcggccaagatccgctcgatcgagctgcagctgcagcaggtggtggaaggccgcgccggtggcgaggcgctggacgaggccgccgagcaggcgcgccggctgctgtcctcgctggcggcgatgagcctgcaggtgcgcgacctgatgcccgagctggtgcgctcggagaccaccgcgcagttcgcgcggcagtggttcgagcgctacgtggcccagttcttcatccgcgactacgccgacctgcaccgcgccgaccacccgctggcgcggcgcgcgcagatcctgctgatggtgcaggagatcgagaacggcccgctgcacgaggccattgccgcctggtaccgcgagcacgtggccgagggcgacgatgcccgtgccggccagctgctgcagcgcagcctgatgcgcctgcgcgagctcgagcgcatcgatgagtacctcgcacgcctggacgaggacatgcgccaggccaaccgccgcgcgctggcgttcctggactaccgcctgcgtgcgccggaccggctggacgtgttgctgcaccgcgccgccaggggtgcgctggccgccgacgagaacgcgctgcgcatgccggtcggtccgggtgggctgatggacgagacccagctgcgtgcgccgcgccgccgtccgcagccgatcccgcgcagtgccaacagcaatgcccagcccagcgccgagcagatcgcgcggctgggcctgctgcggcggatgaagcgggtgcgcctggtcaccgccgaggacatggcggcctacgtcggcaggcagctgccgcccggcggcagcatcgattccgaaaccctggacgtggccagcatccaggacctgcgcgcctaccagaccctgctgaccctggccctgcgcggcagccgccccggcggcctgcgccgcgacgacccgctgggccgcctgctgcgcggcttccgggtcgaactggtcgacggcggcgagcccggcgacaacggctggctgcgcgccccgcgcttcgtcgtccaccacgccgcaggccgcggcccctccgcttccaatgccgcgcgcaccacggcgcaggccgagcccgatcccgcatga

SEQ ID NO: 42406 - DNA, 663 bp, Pseudoxanthomonas suwonensis 11-1
atgaaacgttcctggaacaccctcagccagcagtccaacggcatgtacgccgtggccgacttcgagcgcgccgcctaccgcctggtcaccgagcaggtgctgtacgccagcgatgcgcgctcgcgcagcgcctaccacctggtggaggcctacctcgaggacttcgcctccgcgctggacccgttgggcatccgcctggagcgcaacgcccaccaccgctacgtggtcgccctgcccaggcacggcgagggcacgccggtgcgcctggacgaaaccctgctgctgctggtcctgcgccagcgctacgacgagggcatgaagcagggcctggtcgaggagctgggcgaggtggtagtcgagctgccggacctgcaggaggcctggccggcgctgaccgggcggccgatgcctgaggtcggcgcgctgcgcgcgctggccgccaccgcgcgccgctggggcgtgtgccgcctggtcgagggcgagccggacgacctgcagccgttccacctggtggtgcggccggcgatcgtggacatcgtcggcgagcagtggctgcaccgcctggaccagcacaacctgggcggcggcgggcccgatgccgaaggcgaccccgatggcgacgccgacaccctggacgcggaggacgaccatgcagctgcttga

SEQ ID NO: 42407 - DNA, 3429 bp, Pseudoxanthomonas suwonensis 11-1
atgcagctgcttgagcgcatgcacctggtgcagtacttcctgttcgaggccaagaccctgcagctggaccgcacctcggccatcatcgcgcccaacggcgcgggcaagagcgcgctgctggacgcgctgcagctggtccttctcggcggcgaccgccgccatatccacttcaatgcccaggccggcggcaaggcgcgtgcgcgcagcatccgcgactactgcctgggcgtgtaccgcagtggcgaggacggtcgcaagcggcgcaccgccaccacctacgtgaccctggtgttccgcgacgaggagaccggcacgccgctgaccgcgggcatttcgctgggcgcctcggtagacgagcccgagcatcgccagcacggcctgttcctgctgccgggcgtggccctggagctggaagagcacctggagcgggtcgacggccgcgagctgccgctggagtggagccgcttccgcgagctggccgccaaacgctgccgcaaggccggcaccacgccggagttccacgccagtggcgagcgcttcgtcaaggacctgctgcaccgcctgcgtcccggcagcggcgccggcgtggacttcaacgcctaccgcaaggccttccagaacgcgctcaacctgcagcgcgtcgaggacgtggacctgttcgtgcgcaccctggtggccgaggaccggcctaccgacattgcccgcttcaaggcattgctggacagcttccgccagatcaaggaacgcatcgagcagctggaacgccgcatcgccgaggccgaggcggtggacgcgcagtacggcaaggtcgccgcgcaggcggtacgcgccgcctcctaccgcgcgctggccgccgagtacgcgcgcgacctgctcggcgagcaggtcgagcaggcgcagtccgattgcgatgccggccgcgaggaactggccgccgccggcctggccctggagcaggcgcgcgccgagcggcgcagcctgcaggaagaatacgagcgcgttcgcgagcagctgcagggcagcagcgcgtacggcgagcaggcctcgttccgcgaactcgccacccgcgaccgcgaacagctgcagcgcctgcagtcggacctgcagcgtcgcctcgagcagctgcgcgagccgctgcaggaactggccgggctgcgcctgccgggcgtggatgaggccgggctgggcaaggcgctggcgccgctggaggaactgcatgcggaagtcgccgccagcgcagagggcgacggcgaaggtccggcacccgatgcattccacgcgcgcctgaagcaggcgctggccgcggccgcgccggtgcagtccaccgtcgccgcgtgggcgcggcagtcgcacgaggcctggcagctggcgcgcgcgcgccgtgacgccctgcgcggcaaccagcagcgcctggatgccggccaggccaacctgcgcgacgaggtcatgcgcctggtcaaccacctgcgcgaggccgggatcgaggcgcagccggtgtgcgacttggtgcgcgtgaccgacaagcgctggcagccggcgatcgaggcctacctgcgcagccatgtcgaggccctgctggtgccggccggacgcgaggaggacgcggtgcgcgtctatcgttcgctgcagggcgcccgcgccgtctacggcgtgaagctggccctgcccagccaggcacgcagccatcgccaggagcgcctggccgaggacagcgtcgccgccctcatcgagggcgacaacgccgatgcggtggcgtacctgcgccgccagcttggcgacctgcgttgcgtggagaccgaggccgaggtggtgcgcacgcgccagggcctgacccgcgacggcctggtggccaagggcggcggcatcgagcgccggcgcctgccgtccagtggcgagctgaagatcggcgtggcccaggacggcgagcgcctgcgcctgctgcgcgccgagctggagaacgccgagcgcgaactgcgccagtgcgaaccggaggcgcgccgcgccgagggcctgcgccagaagctggcacggctggaaggcgacgacgtcgcccgcagcctgcacgaactgctgctgcagtaccgccaggtgctggcgcgttaccaggcgatggagcgcagccatgccgacgcggtcgatccggacctgctgcgcctgggcgagcgcgccaccgcgctgaaggcgcaggtgcagaaggccgagtccacgatcgagtcgctggtgcgcgccgaggccctggcccagggcgaactggagcggcgccaggcgctgctgcgcgcgctgcaggcgcaggaggagatcgtcgcgcggaatgcggtggaggccttccgcgatccgcatgtcgatcccaaccgggtcgaacagctgcgcgaggagctggaggccaagggcaccggcctggaggaggcgcgcaacctgtgcgagcgccgcgcccaggacaacgaccgccagctggccgcgctgctgccggaggcctggagccagctgcagcgctacgccggcagccatggcctggacctggacttcgccgccgacgcctggaagccggcgcgcgcgctgatgcagcgcgagctggtgcagctgcgcgagaccgagctggtcaactaccgcgccgaggccgaccgcgcctacgagaccgcggtggagaccttccgctccaacgtcgccaacaccctgcacgacaacttcgtgcggctgaaagcgcagatcgacgcgctcaaccgcaccctgcgcaacagcccggcgttctccaacaacgagcgctaccgcttccactacgaagtggtggccgagtaccgcgacctgcaccgcttcatccagaaggtggcggacgtgggcgccgaggacaccctgttcggcagcgccggcgaggttccggaggcgttccgccagctgatcgaggacagcgccgcagccaagctggccgcctcgccgctggacgactaccgccgtttcttccacttcggcgtggagatccgccaggacgaccgcgtgatcggcaccctcagcgagcgcatgcgctcgggctccggtggcgagcaccgcgcgccgctgtacgtgatcgccggcgccgcgctggccgcggcctacggcaagagcgaggcgcatccgggcggcatcggcgtgatcctgctggacgagttcggcgacaagatcgacgcccagaacgcacgcgccaccaccaactacctgcgctcgctggggctgcagctggtgctggccgcgccggacaccgcgcagggcacgctgtcgggcgtgctggacagctacatcgagctgttccgcgacggcgacctgctccaggctgagcggatcgaggtcaaggaagcggcgcgcgagctgctgctgtccgaccagttcgacctgcacccggaactgctggccggggagcttgaacgcctggcgcgcgagaccggcgcgacgacctga

SEQ ID NO: 42408 - DNA, 1497 bp, Dietzia cinnamea P4
atgagactcgtgtccgcgctcgcccgtttcctccagctctcaaggctgaacggcgaatcatccgccctctcgctgctgcgtgcccagttgtggccgctcatcgtggcggtgctggcggaggtcttcgaggggtcgtcacggcgtgtcccgtcctcggagttctacgagttcctcgacaggaccctgactgccgtccgcgactccggcgcggacgttccgggaacagcccaggcctacgtacgtcaatgggtcgacgccggctggatgctgcgcagacccggcaccgcggcgacgggtgagacgctcgaacccacccagtccgcactcgtggtgatggactttctcgacggcctgcagacaccgcgacgcggactgaccgtgtcccgcgtcgagacgctcacccggcaactggaggacctcgcacgggacaccgacccgtccgttcagggccggctggccgccctccaccgggagcgcgaccgtatcgacgccgccatcgcacgtgtcgaggcgggcgacctcgagctcgcggacccggagcaggtcggggagaaggtgtcggagatcctccgcggggcggatgacatacccgccgatttcgcccgcgtccgcgccgaattcgagtcgctcaaccaagacctccgtcgtcgtctcctcgaccaggacggcgcgcgcggtgacgtcctcgacgccgtcttcggcggcgtcgacctcatcggtgactccgaggccggccgcagcttctcgtccttctactcggtgctcctcgatcccgaacgctcggcgtcggtcgacacgtggatcgacgacatcctgagccgaccgcaggtcgccgacctacccccgtcagccaggcggggcctgcgggagctgttcgacgagatggagaccgccggggctgaggtcaacggtgtcctcacctctctgtctcgcagcctgcggcacttcgtcacctccgacgcctacgtcgagcaccggcagatgctggcactgatccggtccgcccgcgccgcggcagccgaggcgagcggcgcgcgcgccgtgaagccgaccagtcagatgtcggtgccgctccgtcgggtcggaatgtcggtccggtctgtgagcgcgctgcgcctgcggaatccgggagaggaacgggtggcggcggaggtcgcgcaccacgaggagggccacgcggacctcgaggccctcacggcgcttgtccgggcctcggagatcgacgaggccgaactccgcgcccatgtccgcgacgtggtgtccaggctcggcccgtcatccatcggggcgatcctccgcgaacacccggcaacccagggcgtcgccagtatcgtcgggctgttgaatctggccatcaccacgcaggccgaggcaccaccggatgacccgcgttcggtcgagaccgtcacatggacgagtggatccggccccaccttgagcgcccggatcccgaccctggtgttcacggccgatcgagttctggaggaggatctgtga

SEQ ID NO: 42409 - DNA, 720 bp, Dietzia cinnamea P4
gtgacgacccctgcgacggccgatcccgacggacccgacggcgcgggtgatgacggcctgtggcccggtgacaccgggacgctgtccttcgcctccagacgcgcgttggcccggctgctcacgggcccgctggtgcaggcgcatcgccagccggagatctgggcggctgtggtctccgacgagcccgccatgcgatcgcgactggcggacgtgttcctcgatctggtgctggaccacgacgccggtatcgccttcaccaggcaggtcgacacgggtggtcgggtcgaggtcccggcggtactgcggaccgagacgctgtcgcacatggacaccgtcctgctgctgcacctacggtccgagttgtccgtggcccagcccggcgagcgggtgatcgtggatcgcgaggacgtggccgagcgggtcgacgtctaccgttccgtcgtcgactccgaccgaagtcggtatgcgcgcaagttcgacgcctcgtggaaccggctcaagagctactcgctgctctccgacacggagacagaggggcgcgccgaggtctcccccgtcctccgccacctgttcgacgcggacgtcgtcgcggggatccgcgacgagtaccgcgccctgatcgaggcgcgcggtggggccgacggtgagcacgacggcgaaccggccggcgggcgggacgacgctctgttcgacgacgacgaggtggtcgacgatgactga

SEQ ID NO: 42410 - DNA, 3216 bp, Dietzia cinnamea P4
gtggaggtgccgcggaaggggttcctcatcaccggcggatccgggtccggcaaatcgaccctcatcgatgcggtctcagcggtgctcgtgcccccggcgcacctgcgattcaacgccgccgcgcaggaggaggcgggacggggatcggggcgcaccctcgtgtcctacatccgaggtgcctggcggcggggagccgacgccgaatccggcgacctggcctccgtctacctgcgtcccaaggccacgttctccgcgatcgccctgacctactcgaacggccgcggcaccagcgtgacacttctcctgttgctctacctgcgttcgggcgacaattccgcggccggggtcaagcgtctccacggggtccgcgagcactcgtccgacgagcccacggacctgccgggcctgttcggctaccttcgcagtggcatcgacaagcgggcgctcaagcgggagatcccggacgtgaggttccacgacagctactcggcgttcgccgccgcgttccggcgtcggctgggcatcgcctccgagtccgctcagctcctgctgcaccggaccctgtccgccaagtcgctgtccagtctcgaccaactcttccgcgacttcatgttggaggagccgggcaccttcgcggtggccgaccgcgcagtggcgcagttctcggagcttcgtgaggcccaccggtcggtggtcgacgtgcgcaagcagatcgcccatctgaccccgctcgccgacctgcgggcctcccggaaccgcgtgctggcgctggccgacgagctggacgctgagagtcaggcttttcccgcggtgcaggccgccgtgaccatcgaactcgtcgaggaggagctgcggacggcccgcggggcgctggtggccgcggagtccaccatcgcatccgctcgagatcgactcgatgtacgacgcacggcggccgacgacatccgcgcccgactccggggtagcgccggcgccgggcgggatgagttcgcgagagagctcgaccgggccctcgaacacgccgccgacgtctccgcacggcgtgcgcgtgcggagacggaggtcgagcgcctgggcggcgcccttccgacttcggccgaggacttcgccgccctgctcgccacgctcgagcgcgaggacgcggaacaggaggccgagcgggcgcgagatcgcgagacgctgcgggcggtggccgggtccctcaacgaggaacaacgctcgctcgaggaggtgaccgcgcaactgcaggcgctgttgcgacaccgctcgaacatcgattcccggctgctggccgcccgggacctcgtgagcgaggcggcggggctgagcgcgcgcgaactaccgttcgccggagaactcctcgacgtccccaccgagcacgcccgctggcgtcccgcgatcgagcgggtcctgtccggcttcgcccgcacgatgctcgtccccgaccacctccgggaccgggtggccgccgccgtcgactcgacccacctgggcgtccgcctggtctacgaggtggtcgaccacggcgacgactccgccgcccgcaggaccggcccgcacagcctcgtccggaaggtccgccccgccgccgggccgttcctccagtggctcaaccgcagactcgcggccgaattcgacgtggcctgcgtggagaccgccgccgaactggcccagcacgacaaggccgtcactctgcacggattgatcagacgcggggcgcggttcgagaaggacgaccgccgacggatcgacgacccggcggcgttccagctgggcagtatggacgactccaaggtggaggcactgaccactctccggaacgagatccgggcacgtatcgacacccacgagcggcagtgggccggactggacgacctcgacgcgcagcgtcgcgcccgccagcgcgcggctgccactctcctgggcctgcggtgggaggagctggacgccgacaccgccgaggaccgcgcccgggcagcccgagatcgcctggaccaatggcgggagcagcatcccgaggtcgcggagatggagcgggacctgcgcgccgccgaggaggcgcagtcgcgggcccaggcggagtacgactccgcgaaccgggccggagcggttgccgctagcgtcgtggagggtctcgagaggcggctcgccgacctgaccggtcatgagaggcgcgacgtcgacgagggcgccgcggcccgcatccgcgaacgcctggcggctgcgacgcgccgcctgaccgccgagaacgtgcaggaagtctgccagcgtgccgagcggtccatcgccgccgagcaggtgtccaccgcgaccgagcgcgaccggatccatcggcgcatcaccgcggttctcacgtcgtacctggagctgtggccggccaagaaggccgatctcaaatccgacccggaattcgtcggtgaggccgtcgaatggctggtccaacttcgccgggaccgcctcgcggagttcgaggaccgattcctcgggctcatcggggacatgcagacccggaatctgggcgaactcgcccgtcacatccgccgcgcccgctccgagatcgaggccgggatcagaccggtcaacgactcgctgcgccggtcggagttccagtccggccggtggctgcagatcgaggtgcgtgaccgacgtaccgagaccgtcacagacttcctgagcgacctggagaaggcggtgtccggagcgctcgacaagcgcaccgtcgacaccgcggaggccggtttcgcggtgatgtcacgactcttggaccggctgggatccgcggattccgccgaccgacgctggcggtggaccgtgctggacacccggcgacacgtcggcttcatcggcgtcgagatcgacgaggacgggacgccgaccaactaccacgattcgtcctccggcctgtcgggcggtcaggcgcagaagctggtgttcttctgtctcgccgcggctctgcggttccagctcgcggacatcgacgccgatgtgccgcgctacggaaccgtggtcctcgacgaggcgttcgaccgggccgaccccgactacacgcgccgcgcgatggacgtcttcaccgatttcgggttccacatggttctggcgaccccgctcaagttgttgcagaccctcgagccgtacatcggtggtctggtggtggtgggcatcgaggacgggagccgctcccgcatcgagcgggtcacctgggaagccgcgagctga

SEQ ID NO: 42411 - DNA, 1206 bp, Dietzia cinnamea P4
atggccgggccgacgacgccgcgcgctcccgatgatctggccgaagcgtgcgccacccggttcgcccgccggtaccgcgagtggatcgccgacccggactccgctgccgcgtacgtcctgcgattctccaccgcatccccgacggcgacgcgcgcctcggacgacccggccggcacggcggactggatccggcggtggcgggagttcgactccgcccaggacgccctcgacgtacagatcacatgggtggaacgccgattgcccgggttcggcgcggtcgctctccctcagcgcgtggaggtccggggcggccgggcgatcgcgcggatcgcgggacgagccgcgcactgggaggcgatgctcgccagggccaccgacctgctccggttgggccccgacgagtcggtcctgcgactcgccgccgcggccaccgcaccgacctgggagaagctgagcgacgcggacatggagcgcctgctcgccgtctgccggtgggcgctcgcgcatcccacggagggattgcgggcgcgcgagatcgcggtccccggagtcgacaccaagtggatcgaatcccggctccgcgtggtcgagcaactggtcgacgccgcacgaagcggtcgcgacagcgcgacccccgacggtgcggtcactgtcgccggtctcgggttgaagcgctccgacctccgcgtgaggatgcggatcctcgacccctcgatcgacttcccactgcgcgatgtggagagcccggtcgatcagctcgccgcgctgtggcccggttcggaagggccgcgcaccctcgtcgtcgtcgagaatctcaccacgttcctcgcgctccccgacctgcccggcgcggtcggcctgttcggccggggcttcgcggtcgatgccgtcgccgcactgccctgggcgatgaccgcccgcatcgtctattggggcgacctcgactcccacggtttcgcgatcctcgacagactccgacaccacgcgccgcacgcggtcagcgtcctcatgaacgtcgagacgctcgacgcctggggcgagttcacggtccccgagcccacgcccgctcgcaccatgcccacgcgactcaccgcgagcgaggtcgctgcactcgaggcgctgaccggccgaggcgaccttcggctggagcaggaacgtatcccgtgggactgggcgctgcctcgccttcgatcggcgctcgactga

SEQ ID NO: 42412 - DNA, 706 bp, Dietzia cinnamea P4
tcagggccgcagcttccaggcgttctacgacctgctgctgtccacctcgggtcaggaggagctgtcgatgctgctcgaccgaatgacaggcatcgaggaggtcggcgccgaccgccgcttgcgcacggtccaccacagttgggccgaggccgccgagcgcacccagcacacggtccgcagcatctccgagcagctgcgccgcttcaccgacgaccaggtgtggttggagaaccgccgcgtgttggatctggtgcgcgaggtcgagaccaccgccctgcacctccgtgacggagagctcccggggttcggcctggagctggaggagaccagcatcgacgtcgccctgcccaccgatcgccccctgttcaccgtccgtccggcctccgaggtcaacagcgacctggagccggtcgaggcggaggaggtcgacacgtccgtgctggccaaccaggtcgtggtggaccccgcgcgcctggccacccgcatccgcgcgctgatcccggtgcacggcaccgcgcggctggaggacatcatctccctgtacccgctccagcacggcgcggcggagatcgtcggctacctggcgctggacgaggacgatctcgaggtgaccacccacgagcatgaggagaccgtgatcgagtaccacgaggcgggcaggcacatgcgcgcgacgatgccgcgggtggaggtcacccgccgatga

SEQ ID NO: 42413 - DNA, 696 bp, Dietzia cinnamea P4
atgaccgcctccggatccagcacctccgacggtgccgtcggggaccgtgtcgccgccggccgtgtcacccccgagcgcgccgtggcgatcagcgccatccgcctcatgcagggcgtcgtgtaccaggagtccgacgcctgggacgacctggtgcgccaccagggcgccgtccgtgaccacttcgccgtcgtagggcttgaggtcgttgtcgacgacgacgagggctacgcctacctgcggaccgccgacaccccggagggcgagaacgctcttccccgtgtcatccgacgacgaacgctgacgtacgccgacagcctcttgctggtcctccttcggaagcgcctggccgagttcgagtcggccggcgacccgggccagctggtgctcacccacgacgagatcgtggagatgatccaactcttcctgcaccgcagcaccgacgaggcgcgcgagcagcaccagatcgacgcctccatcaaccggctcgtgggcatgggtttcctgcgtcagctcaaggaccgcaagggggagtgggaggtgcgccgcatcctcaaggcctacgtggacgccgagacgctctcggacttctcggccaagctcgccgagtacgccgaggcaggcgctgccgacgagggcgtcggccacgcgcgcgccgcggacgagagcaccgccgaccacccgagcgaggacatctga

SEQ ID NO: 42414 - DNA, 3405 bp, Dietzia cinnamea P4
atgaccagcggcctgttctcctcggtcgagctcggcagcggcgagcgccccggcttccgcctggcccgcctggaggtgctcaactggggcaccttcgactcccgggtgtggaacctcgagccggcgggggagaccctgctgctcaccggcgacatcggaagcggcaagtccaccctggtggacgcggtgagcacgctcatgctgccctcgcaccggatcgactacaacaaggccgccggcgcctcccgcaaggagcgcactctgcgctcgtacgtggagggccaccacaagaccgagcgcaacgaggccaccggcagcgtccgctcggtgggcctgcgcgacgggcactcgtactcggtgatcctcggcgtcttccgcaacgaggggtacggcgaggaggtcaccctcgcccaggtcttccagcagcaggaggccaccggccagccgtggcggcgcttcatcaccgccgaccgggcactgtccatcgacccggacttcaccggcttcggctccgacctcggcgccctcatcacccgcctgcgcgacagcggggccgtggtggataaggacttcccgacctacggccgcgccatgcgtcgcctgctgggcatccgctcggagcaggccatggagctgttccaccaaaccatctccatgaagtccgtcggcgacctcaacgagttcgtccgcacccacatgctcgaacccgtggacgcctccgcccgcatcgagggcatcctgcgccacttcgaggacctcacccgcgcccacgacgccgtcacccgcgcccgtacccagctcgccgccctcgagccgctggtcgagcagatccacacctacgacgccgcgctcgagcgccgcgaacggctgcgcgaggagcgactggccctgcgcccgtacttcgccgagctccgcatggccctgcgccaggccgagatcgacaccctgaccaccgaggtcgcctccgccaacaccgaggtcgtccgcctccgggagaaggccagggaactggccaccgagcgcgaggccctggtcaccgcgcgcgccgaatccggcggcaaccgcataggcgacctcgagcgagatgccgccgccgctcgggagcagctggacgagcgtcgtcgtcgtcgggatcggttcaccgacgcggtgacccgcgccggcctggaccccgtcaccgacgaggcggccttcacccgcctgcccgaggcgatcgccgcacgtgaggccgagctggactcccacggcgtcgacctggccacccgccacaacgcgctggtcatggaccacggcgagcgcaaacggcagctgcgcgaggtgcagcaggagctggccggcctaaccgggcggaccagcaacctgcccaccgaacagctccaggtccgcgcccagctgtgcgctgaactcggcctggacgccgccgagctacccttcgccggcgagctgatggacatcgccgccgagcacgcacagtggcgcggcgccgccgaacgcgtcctgcgcggattcgcactgtccctgctcgtgccgcaggagcactacgccgacgtggccgagtgggtggattcccgccggctcacctcccgccgcgccgacggccgcgaggtgggcgtgcggctggtctacgagcgggtcccggaacggcacgtcccgctgcagcggccccagaccgacgggttgctgctcgccgacaccgtggagatcgccgactcgcccctgcgcgggtatctggccaaggagctctacgcccgtgccgaccacctgtgcgcgcagaccatggaggagttccgccacgccgaccgcgccgtgaccgtgcaggggcagatccgctcccgcaaccggcacgtcaaagacgaccgcagctctaccaccgacgctcggcactgggtgctgggctggcgcaacgaggacaaggtcgacgccctgcgggcgcggtgcgcccggctcgaggccgaggtcgccgagctggcgacccgcctcgacgccgccaccgccgaacagaacgacgccggccaggcccgcaccgcgctggtgcggctggccgagtacccgtcctggcgggacctggactgggccgaggcccagcagcgcgccgactccgccgaggccgagcggctgcggctcgtccgcggcagcgacgagctgtccgagatcgaccagcggatcgccgacctcgacgcccgcgccgccaccgtggccgacgacgagcgggagctgtccgaccaccgcagccgctggcagagcagcattgaccacgagcagcgccagatgctccgggaccagcgggtgatcgacgagctggacgaggccctgctcgagtccgcccgcgaggtgtacccgcggctgcgcgagcggctcggctacggcgaggaccccggcgccgagctggcccagaccgccgacgaggcccactccgccgaggcggcgctctcggatgcgatcgatgcggacgtcgagcgcgcccagcgcgaacttaacggcctcaccacgcggatccaccaggccatggccgagatccgtcgcacctggccggagcagaccaaggagatggacgcggctgtggccgcccgcgccgagtacgtgcggttccacgcccgactggccgacgacgacctcccgcggttcgtggacgagttcgagagccagctgcgcaagaacaccatccgcgagctcgccggcttccataactggctgctgcgtcaggccgatgacatcgggcagaagatcgagaagaccaacgaggccctgggcgcgatcgacttcaacccggggcggttcgtccgcctggactgcgagaacacggtcaatcaggaggtgcgccagttccgcgccgacctacgcggcgtcaccgacgacgcgttcggcggcgacggccagtactccgagagccggtacgagcaggtgcgcgccatcctcgaacggctccgcggccgcgagggccacagcgagtcggatcgcgcgtggcgcctgcgggtcaccgatgtgcgcaactggttcaccttctccgcctccgaacgcgaccgcgagacggaccgcgaattcgagcactaccgcgactccgacgggaagtcgggagggcagaaggagaagctggcctacaccatcctcgccgcttcgctggcctaccagttcggcctggagtggggagcggccaaggcgcgcgacttccggttcgcggtgatcgacgaggccttcggtcgcggctcggacgcctccacccgctacgcgctggagctgttcgccaagctcggtatccagctgctcatcgtgacgccgctgcagaaggtgcacgtgatcgcgccgtacgtgcggacgatcggctacgtggacaacgtggagggccgctactcgcggctcgtgcagatgacgaccgaggagtaccagcggcagaacgggagtcagtga

SEQ ID NO: 42415 - DNA, 843 bp, Lautropia mirabilis ATCC 51599
atgaacggatccgcatcttctcccctggcctccgcgctggggccactcgcctcgctggacgcgctgttccggctctttctggcgggccggcacctgaaccgcgtggccgatccggcgctgtgggccgagctggaaaggcacgaggccgattacacgctgctgttctcgtcgctgggctacacgctgcgcgtggatcaccggggatttgcgtggttccacacgccgtcggccagtgcccccatcaaccggatcagccggcagctggccctgctgttcatggtcattttcgatacgcaggccaatgcagggcagacactgcagcggtttgccgactggctggtcacgcgcgagctgctggccgagacgcacaagcagcatcaggacatgctggaggccgaggggctggacaccgaagggctgcgggaactcttcgaccgggccgctggtctgggttttgcgcagcgtgatggcgccggctggcggctgctgccggcggtgtatcgctacctggaccattttcaggcgctggccgccgacgaacgcgacaccacagacgccgggttcggtccgtccgacgatgcagatggtatgcaggcaggcgcagggggcgcggcctccagcgaagcggacggtctttccggcaggatcagcccccggagaaggccctcccccatcgatgatgacaatgccggcggggatgccccctgcccatccggcgatgcgataggcaacggcaacgaagtcatgaccggtgaagacgacctgtccattgacgacaacccagccagtgaggacgccccgtccagcgacgcccctgataccgacaccggagaggctccctga

SEQ ID NO: 42416 - DNA, 2748 bp, Lautropia mirabilis ATCC 51599
atgcaatacggtttccagcgtctggtgctgctcaacagtgccggctattcccgcgccgagctgccgctcgatggttcggtgtcgctggtggcacccaacaacacgggcaagaccagtctcatcaacgcgctgcagtatctgctgatcatcgaccggcgggtgatgaatttcggcgcacacgatgccgacaagagccggcgtttctattttccgcacaacagcgcctacatcctgctggaggtcacgctgcccgaaaccggcaccgtggtgctcggttgcgtgggcaagggcgtgagtttcgattacgagtattttgcctatgcggggccactgaatgtggacgaataccggctgcctggtggcgaactggtggcccagccgcagctggcggcccatctggctacgcacgagcggcgggtattcagctattcgggcagcgaatttgccgacatgatctacggcggtcgcaaccgcaaggccaccagcgagctggacctgtgtgtgttccggctggaacatgccagtgatgcggccagcttccagcgggtgctgacgcacacactgaagctcgaccgtctcacctcggccgacgtcaagaaaaacctgctgcagatattccggcgcgatctgcccgatgcgggcatcgatttcaaggccgaatgggaccgtgcctttgccgatctgaatggggaatggagccagtatcgtgcggccgttgcccagaaagtgttgctggaaacactggaacagaaacacgaggcgcgactggaattgcgcggccggctgctgtgcatgaagccgctgatcgacgacgccctcgcccactggcagcagcattacgacacacgccaccaggcactgacgcgggagctgggccagcacgacaccgagatgaaacgcctgcgggacgaggacatccagctggcccgccagcagagcctggccgaacaggaagaaaaacagctgcgccagcagaccgaccagctgcaggcgctgcagcgccgctttgccctcattccggaacggcagctgctggaccagcagcgcgccgcgctgcagcaggacatcgatgccatcgtcgtgcgcatcggtcaggcgcaaagccgcgagccggccgccatcgagcgcgaaatccagcgcctgcaacgggaactggcccagctggaacaggaaatccgcacgcagggcaacaacctctaccagcagctggccagccagctcgcgccggaacagctgaccgtcctcaacaggacactggcccgctccgtgctcaccctgggcgcagatgatttcacgctggatgcagcggcgcttgcgtcaatcctgacctcgcagccctccggcctgccggggctgaaactcaatctggacgcactgacggcccagcacgaacagcgcagcctggccgaactcaccaccctgcagcaggagttgcaggcacagctgaaacagctgcatgaacagctcgacacggcccgcacgctggaaacggtcagggcccagcgtcaggcactggatgcgcagctgaagcagctcgacgaggacatccgcgcctgggccgagatgcagaccctgcaaaccgccgaaccggcacgccagcagcggctgacggaactgcagcagatgctggccacactcaccgaaacgctggcaaaggccgctgaaagacagcaggccctggaccggcagcgccagcagctgcagcaggatctgcacacgctgcaggagcagcaccggcgcatcgagcagcgccgcaaccaacggcaggatcaccagccacccttcacctggctgcccgaactgccccatcacccctggctggcccagccggacctggccatggacaagctggccgaccacctgcagcactatctggccgactgccggcagctaccggaactggacgagcagattcgccggctgctcatcgacctgaacaccggcggtctgaccaagtaccacctgagcgaaaatccggaaacggaggtgagccgcctcatcacttttgcgcatcacctgccgcaggaattcgaggccctggaaaagaaatcccgctcggccgtggtcaatgtggcagccagcctgcgcgaactgcgcgatgggctcaatgccttcaaaggccggatgcgcgaattcaaccgcaagatcggtggccgccgcctgtccgacctgagcgtgttcaaaatcgagcccgaagacaacaccccgctggtcgaggccatcgaactgctgatcagcaccgcagccacggtggacagcggcgaaaccttcgatctgttcaaccagcagagcgtgctggatgacgaccagctcgaccgcgccaagaccctgctgatcgaggaaggcaacgcccgccaggggctgcgcgtggccgacctgttcgagctgcgtttctgggtgggcaaggaggggcagacggccgaagccttcaatgatctggacagcgccgcctccaacggcaccgtgctgatggccaagctcatcaccggcctggccatgctgcatctgatgcaggaccagcgccgtcccattcagggcatctgctatctggacgaggcactggcactggatgcccgcaaccagcgcagcctgatcgacacggccgccgatttcggcttttcgctgatctttgcctcaccggcgccactcgtcaccgcccgctacatcgtgcccatccagcatcacgacgggcacaaccagatcagccgcctgagctggcagatcatcgagccgctggaagaagcatga

SEQ ID NO: 42417 - DNA, 1152 bp, Lautropia mirabilis ATCC 51599
atgagcaaacacgaaaacgcattgcgagccgccctgctcagactcaacggccagaacccactgcccgtcagcgcattcacccctgcccagcgccgggcactggaacggttcggccagcagacgggcgccgtacagtttctggcccggggcagcggcggcagttaccgcatcagcaaccccgccgtcttcgcgctgcatctgcgcaccctgtcgccgctggcccccatcccgccagtgcctgcctctcccgaggcagcaccggcacctcacccccgttcctgggtaccgtctcccgccaaaggtgcaccgcccgttgcagattcgacaggcacgccctgcgcgccacctgatacagacacgcccctcaccacgggcacatcagccgctgcaggcgcgcctcccatccgcgcccacaacatcggccaccgccgtgacagcaaggccggccggcatgcacacgacgctggctatgtcctgctgaaggcagccttcccccgtcggaacagcgtcatgcctccttcttcggggcaaccggaaagtggttctgactcaccctggggtgccagccacatcgccatgacggtgccggacagcgtcccagccggacagggcacatcgagcgcccccctcgactggcatgcccccaccagaaacctgcacctgcccctggcagcacacacccgcgacttcggggcagcctgcctgcgcatcaccccggacgacgactggcataccgacgcccccctctggctcatcgagaaccaggcgctcttcgaccgcaccgactggctgcccccggggcctgccgtcacgctgctctactacaacggccagctctccgacctgctggtccgctggctggcagcacgcccacggggcagccggctgatccatttccccgactacgatggcatcgggctggccaactttgcccgcctgcacgcgcagctgggcgatgcctgccacttctggctgatgcccggctgggcagacagcctgcagcgctatggcagccatgcactgtggctcagaacgctggacccgtttctgcgtgtccggcccgacctgcccagccatctggcccccctgctcacgcagatggagctgaatggtctggccctcgaacaggaggccgtgtggctgacggcatga

SEQ ID NO: 42418 - DNA, 1449 bp, Pseudarthrobacter phenanthrenivorans Sphe3
gtgccccgcaccgccaggtcatccgctgacgccatcagcgcccggctccgggacctcgaactcctcaccaagggacccgcctgggccctgacgcgttcggccccctgggtgatcgcggtgctgcaggcatccttcacccgcacccgcccacagcttccactcgaggagttccatgccgacgtcgactccttccttgaggagctgcggcgccaggacccggggctgggcggcggggcgaacggcaagtccttcggcgacgaatggacgcgccgccagttcctgacgcggcggaaccagtccggccagatcgtgtacgaggtcaccgaacccgcggcgcgtgtgctcgccttcctggacagcctttccagcgaacggtccaccctcaacggttcccgcctcggaacgctcctgggtgacgtggagaaactcgccaacgagaccaacccggaccaaagcgcacgcctcgaatcgctggaagaggaaatagaggaacgccagcagctgatccaggacatcagcagcggcgagtttgacggcctgctggacgacgacgaggccgtggaggcagccggaaacatcctggacctcgccgcgagcctgcctgcggactacaaaaagatgcgtgaccggatcgaggagctggtgggcgggctgcgcaaccagatcatcgaggagtcgctgaccaaaggcgccaccatggcccaggtgctggaggcggacaagcggctccggcagagtccggaggggcgcacgttccgttccttcacggcgttccttgaggacccgcagcagcagctgaggttccggtcagccatcggggaagtgctcagccggcagttcgcggatgacctttcccccgaagaccgggaaacgctgaagaacctggtggccgaactgcgccagcagcacagccagatccagcgcatctacggcaagctcagcgagagcctcaacacctacgtccagagcgacgacttccggcagtcggtccggctccggcaggtcctgcgcgaagcggagcaggccatccggtcccttccctacgagcgggaacgccccggcctggttcccgggcctgtcctcttcaacgccggcttcgagtcactgtccatggtcaagctcttcgatcccgacgagttcgcggccccgcccaagctggctgaccccatcgccttcagcgactccgaccggacgcgctcgccgaggaccggaaaagccaagcctggcgtggtgcgcgccgccatggccggcgcagccaccctgtccgaagcctggcggcagctgccgccggaggagcagcacatcaactccatccgggcgctcctctcggaagccctccatgccggcgcggggttcgacgaggaagcctttgaaggcctggactttgaacagatagacggcaccacgcgcagggcttacctgccgctcgtgaagctcaagaaggactga

SEQ ID NO: 42419 - DNA, 756 bp, Pseudarthrobacter phenanthrenivorans Sphe3
atgatgactgaagtttcgaacgctgagcggccccacaccggaggaatcaccccccgggacacgttcgtcgacggcgcagccctgttccccggcgataccggcgtcctgtccatgaaggtgcggcaggcgctggtgaagctcctcaagggcccctacgtggacggcggccgggacgagaagctctggaccgtgctgctggaccaccaggtcatccttcgcagccggctgtccgagctgttccttaatctggaactggaccatgagcggaagatcgccgtgctgcgcccggtggacccggacgcgatcggcgggagtgcccgctcgtccatcctccggcagcagcgtgccctcagccgggtggaaactatcgtgctgcttcggatgcgcctgttgctggaccgccacgtcacggcacagacggaccccaccattacgcgcgaggaaatcgccgacctggtggcgcactaccagccggcagggcagcaggacgcactccgggactcggacgtggtcaacagggccatcaccaagctccttgcccgccagctcctgctccccaccggcctggataacgtctacaccatctccaacgccctgcccctggccctcccgttcgagaacatcggtgacatcccggcccagatagcggcgctggcagcagccaccacggatcccaccggcaccgaggcgctcatagagctcgacacggagccggcagctgaacctgccgacaacgaagcggaggatgcccagtga

SEQ ID NO: 42420 - DNA, 3462 bp, Pseudarthrobacter phenanthrenivorans Sphe3
atgttacccctgggcgacctgacgaatcccggccagatgcgccttgccttggtccaggtggtcaactggggcacgttccacggggcgcacaccatgcacgtggaccggaacggcaccctgctcacgggcaactcgggcgtgggcaagtccaccctcttcgacgccatgctgcgcgtcttcgatgcgcggccgcggtccaacgaagcggctgcacagcgttcgggcggagcggtggaggacaagcgcaccacgtttacgtacatgcgcggcaaggtgggcgacaaggccgtcggcgagggctcggcaagtgctttccagcggccgggtgccacgtggtccgcggtcgcgctgacgttcgataacgcggcaggcacccgcgtgaccatctcggcattgttcgacctccccaagaacggcacggagtccagcgtggggcgcttctacctggtcgaccacgcgccgctggaccttgaggcgctggaaggcattgcggacaagcggttcaccaaggcagccctggagacgatcttcccggacgcccaggtcttcgacgtccacaaggcgttcgccgagcggttccgccggctgctgggcatcaactcggaccaggccctgccgctcctgcgcgtcatccaggccggcaagggcctgggcggcagcgtcaacaccttcttccgggaccaggtcctggatgcgccggcaacgctcgcggcggcggatgacgtggtggaggagttcagcaacctgatgtccatccggcagcggctggaggacatccggcagcagcgggaccagctggccccggtcccgggcctgaaccgggagtacgcccagtcgctgctggacgcgaaccggttgcgggacctcgccggcgaggagttcgacgcctacaaacagcaactggccgtcaccgtccaccagaagaccctggcgcgtttcagggagctggcccaggcaaaggccaaggagctcggcgccgagcggtcggtccgcgacggcctggccaaggaactgcgcgagctggaggcggactacaacaaccagggcggcaacgccatctcggccatcgagcagtcgctggagaacgcccgcgtgggcttgaagcttcgccagcaggtggaggaagccgcacgccaggctttgtccgacgccggcctgaggctggactggtccgaggaaggctgggagcaggcgcacgagcaggcagcggccaggtccgccgagctgaaggatgattcccaggcgctgcaggaactccgcttcgaagccttcgatgcccacgcaaccaggaagcgcgaactggcagcggctgagcaggagctcgtgtcgctgaagacgcgcaagtccctgctgccgccgtcgagcattgagaaccgggcggccatcgccgccgccaccggcatccccgaagaccgaatgccgttcgccggcgagctgatggaccttgccgaggggcaggagaagtggcgccccgccgcagaacgcgcgctccggaacctcgccaccaccctgctggtgcccggcgagcactttgcggcagtgacgcgctacctcaatgaccacaacgtgcggggcgccttgcgggcggtggacgtttccaagccgctcgccggcggtgcgctggctttggaggacgtgcacgacggcgacctgctgaccaagctggacatcctcgccacgggtgccgcgaccgaagcgggggagtggatccgggagcgcatcgccctggacttcgcctacccctgcgtggaggacccggacgagctggcaactctggaccgcggcctgagcctgggcggcgtggtcaagcgcaaccgccacaccgtggagaaggacgaccggttcaccagcaggcaggattacgtcctcgggttcgacaacgccgccaaactggaactggtggccggccaggtggaggacctgcgccaggaggtggccaaagcggcggagctcgcccagagccgcgaggactcgcaccagggcatgagccgccagcttgaggcgctgcgcaggatcgccgaggaccaccgcccttgggagcaggtgtcggcggcagtggcggccgaggagctcgcccgcatcgagcagcgcctgaaggatgccctggccgcgcaggcggacctggaacccctccgcgccaccatcgaggaggtgcggcacaaacaccagtccagcaccgaggccgccgcggtcctgcaaagcgaatacaaggccctggacaggcagctcactgctgccgactccctcctggaagctgcgcggcagcgattgacccaggcaccgccgtcggacgccaccgtcacggcgctggaaccgtacttcgctgatttcggcgacgtcagcgagatgcacgagctggacaaccttgccaaccgggtgcggaccgcgctcttgggcgaactgcacgctgcggagtcccgtggacaagcgactgccgagcgcctgacccggatcttcgaggggttcgtccgcgaatggggcactgccatctccgctgaccacggcaccacgatcggcgccgccggtgaattcgaaacccgctaccacgcgatcgtcagcgacggcctgcctgcacaggaggcggagttccggcagttcttcaaccagcgcacgcacgaatccttcagcacgctgctgcacctgctcgatgaggaacgccgctccatcaccagccgcatccttccgctcaacgggatcctttcgcaggtcaacttccacgaaggcagcttcctggaactggacatcaagcagaccctgccgcccaccgcaaagcagttcaaggacgccatccagaacgccctcaaggcccggcacacccggcctgcccgtgcggacgcctccagggcggagggcggcggggaaagggacgacgacgccgagctcaccgcccgctacaagtccctggaaaccctggtcaagcggttgggttcgcaggcacccgaagaccggcgctggcgggccgaagtgctcgacgtgcgcggacatctcttcatccagtgcaaggagcaccgcgaggtggcgggcccggcgtcgggcacaaagggcggcgcgaagaagtccgaggtgtttatgcacgcggacaccgggtccatgtcaggcggcgagcggcagcgcttcacagccttcatcatggccgccgccctgagctaccagctggggatcgccgagcagggcttcaccacttacggcacggtgatgatggacgaagcctttgtgctggcctccgaagagttcgccggtgccgggatcaaggcactgcacgagttcggtttccagctgctgctggctgcccccgaaaacgtgatcgacctgtcccggcacctcggttccgtcacggaaatcctccgcgacaagcgaaccaaccgctccggcgtgctgacggcgccggtcatcaagccccggcccggtgaagaaggcgcgtggcggtccgaggcgaacccggtggacatcattttgcgctag

SEQ ID NO: 42421 - DNA, 1419 bp, Clostridium symbiosum WAL-14163
atgagactgatgaatgaaataccggaccggttttggagcttattccgctccgttaaccggcccgtctatatagaagcattactaaaaatcaatgaagaatacgaatacagcaattattttttaagcagggaggcgtgcatccggattctgggagagcattttgcccggaaaaaatacgttatctggcaggatgaactggaggacgagctggatacgctggaacctccggcaaccagggtgctgggatggcttttgcgggccggatggctcaggaaagtcgatgattacgcatccatgacggccaatatagtcatacccgactatgcggctgtcatgctggaagcgtttcgcagactccacagcgatgaggaagacgaaacccagatctatattcagaatatctatgcaattctgttttccctgaaaaatgacagaagagccgggctgagccttctcggcacggcgctggtcaacacgaaaaagctgaataagacgcttcaggacatgctgcacaatatggataaattttttgccggcctgctgcagcagaaaaactatgcaaatcttctgaaagatcacctggaaggttatgtggaagaaattgtcaggaagaagtaccatattttgaagacatccgataatttctatctctataaaaccgatattaagtactggatcggggagatgagggatgatgagcagtggctggaggctcttgtcagaaagagcgccgcagattcatacggccggttatccgccggcaggacggcagaggaagaacagaaggccgccgagacgcggatgatggaggatatccttgaaaagctaagccagattgaacgcggttttgatgatattgaacacaggatttccaatatggacaaagagcattccaggtatgtccgcgccacggtgacgcggttaaattaccttctgaaccaggaggacaatacaaaggggctgattatcagactgctgaaccgcctggcggatgacggggagcaggagaacatgctcacggagacaggaaaacggatgaatctgtcccggatgaatatcctgtcggaggcatccctatacaagcgcagaaaggtaaaggccgatttctcaaagaatctggagccggacgaggaggataaggagctgaccacagaggaaattctcaacttgaaccgggtgaagaaccgttacagccgcagcgagatagagaattttatcacgcagagagccgtatcggggaaaatggaggcagatgcggacaccgtatcctgtgatgaggaatttgagaaactgatccttgcctatgactattctacgagacagaaaagccggtaccttgtggaggaggaagaggcggaaatgatagataacggcagataccgatatccgaagctggtatttgtaaggaggaacgaatga

SEQ ID NO: 42422 - DNA, 690 bp, Clostridium symbiosum WAL-14163
atgacagatattccatattttgacggtctgatgggagaagaacagagggagattacagactcaatccgccttttgctccgtcagacctttattctcgagcggaaatatgacagacggaccggacggttccagtataaccgggaattccgtatctgcaataaacacctggagtttatacgcacttatttttccatcagcggcatatcggtttatgagaacagccagcttggtgtcatttatattcagggagagacgcttgtgggggataagctgcccaggcttgccaccctgtatcttctgatactgaagctgatttatgatgaacagatggaaagcgtatcaaccagcgtcaatgtgtatacgacgcttggcgagatgcatgaaaagctcggaagctaccggctttttaagaaacagccgtcgccgaccgatatcaggagagcggtgactcttctgaaaaaatatcaggtgatcgaaccgcttgagcttctggacgacctgaacgggaacagccgcctgatcgtttatccctgtatcaatgtggtgctgctgggggacgatgtcagggaactgctggaatcattcagggaggacgaggccctgcaggcggggacgccgcagcgggagattaattccgctttggaaccggagattgaggaggacgatgatgatacaacagacgaagactga

SEQ ID NO: 42423 - DNA, 3372 bp, Clostridium symbiosum WAL-14163
atgatacaacagacgaagactgacagggagcgctttgtggcactttcccgcatctgcctgaataactggcattatatcagccggaagactctttccttcagcgaagaaatcaactttttcaccgggcactccggcagcggaaaatcgactgtgattgatgcgatgcagatagttctgtatgccaacacggacggaagaggctttttcaataaagcggccgcggatgattccgaccgcagcctgattgagtatctgagaggcatggtgaacataggggaaaataatgaatttgcctatctgagaaacagaaatttctctacgaccatcgttttggagctgaaacagacggacacggaggaatgccagtgtgtcggcattgtatttgacgtggagacggcttccaatgaaatctcgagaaagtttttttggcataaggggcctctgtgggagaacaactacaggacagaggggcgcgccatgaccatcgcggaggtggaggaggagctgctgcgttcttatggaaaagaagagtgtttttatacctcccataatgagcggttccgcaggcttctctacgatgtatatctgggcggccttgatcaggaaaaattccccctgctttttaagagggcgataccattcaggatgaatatcaaactggaggattttgtaaaagaatacatctgcatggagcaggatatccatattgaggatatgcaggaaagcgtgatgcagtacggcagaatgagacagaaaatagaagatacctgccgggaaatagaggaactcaaagagctggccgcacaataccgtgaggtacaggcccaggaggagctgattcgggcgaatacctatttcatgaataagatggagataatgaatcttcgtcttcaggtgtccgagatatccgaccgtatcggacaggcggcctccgatctggataaacaggaagtattggaaaaacaggtggtgagtcaggctgcacagttgaaattaaggagcgacgagctgctccggcagattgcgtccaccggatacgatgagctgaaggataaactcctcaatctcaatgaactgctggaacatctttcaaaaagcgcagacaaatggcagaggacggcggaagggctgaaggcgtgggtcgatgaggatgtcacatccaaccagaccatctgggatatagaggaatttgaggcccgtaccatcggcagggaggcgcttatccggctgaaggcatccgtggaggagatgcgggaggatgtgggaagacagaaacaggaggccggttcaatcctccgtgagctgtcaaagcgggaaaaacaggcctgtgaggagcttagccagttaaaggccggaaacaaggcatatccgaaaaacctggagaatgcacgggcatatattaaacggcggcttctggaagagtgcaaaagatcggtggaggtccatgtcctgtccgaccttcttgatatcaggaacgatgagtggagaaatgccgtagaaggctatctggcgggcagcaagctgtctctggtcgttgcaccggcttatgcaaagacggcaatggagatttacggggagctggaccgcagggagtattggaatgtagctgtcctggatacggaaaaagcgtcaaaagccgctccgcctatatttgaaaatgccttgtcaaaggaggtggaggtgcgggagaattaccttcggcccttcattgatatgctgctggggaaggtgatcaagtgccgcggcatagaggaacttcggaaaaacaggacgggaattacgccggactgcatgctttaccgcaattaccgcctgcagtatatcaatccggatcattatacgaaatgggcttatatcggaaaggcgagcgtgaagaaaagaatccgcctgctggaagaagagatagaacagtgccgtgcacagaaaaaaccgcaggaggagcttcaaaaggaatgcatccggctcctggggcttgagaagctggaaagcagtgcggacacttatcttgaatggctcctcgatatcaggcaggtaaaggagaagaccagggagaaaaagcggctggaagataagcttctcaaactcagggaacagaatatcgatgagtgggagaaagagcgggaggcggtcgaggccctgcgctttgccaaagaggaggagatccgcgagacaggcagacagatagaccgcagccgggatgaactcgagagatataaaaaagaggccgtatggcagcagggagagctttccgaccgggagcgcagcttcacaaaggtgcaggaactggaggaccggttagacgaatttctttccaaacgtgaaaatccgaggcttgacaaactgggggattatttcaaaggcagggcggcagcggcggcggaagcaagggaccgcgcgtttgaacagctgctcggccgccggcttgaatacctgaaacgttatccgaacaggagcttttcacccagcgcaaaggataatgcggcatacgacaagctgctcgatacgctgagctgcgataaccttgagcattacagggaagcggcggcagaacaggccaagacggcggtggagcattttaaagacgactttatgtataaaatccgcagcgccatccgcgaggcggttcagcgaaaggatgaactgaaccggattatcagcagcctgaatttcggaaaggacaaatatcagtttgtcatcggcagaaacaggggagccgacggccgtttttacgacatgtttatggatgaagcgctggaggtaaatccgtctaaactcagccagacctttgaaaaccagatgaatttctttacaatggagcatgagaaccagtatggtgagcagattaatgaactgattaatatctttatcccgccggagaacgcttcggcggaggagatggaagaggcccgcaggaatatggataaatatgccgattaccgtacctatctctcctttgacatgcagcagattattaaaaatgacgatggaatcatgaagctgcagctgagcaaaatgattaaaaagaattcaggaggcgaggggcagaatcctctctatgtcgcgcttttagccagctttgcccaggcgtaccggatcgggctgccgccaaaactgagacggagccctaccatccggcttgtggttttagacgaggcattctctaaaatggatgcggaaaaggtggcaagctgtatccagctgatccgggatctgggcttccaggccatcatcagcgctaccaatgataaaatccagaactacgtggagaatgtaaataaaacgtttgtctttgccaatccgaataaaaaggctatttccatccgtgagttcgagcgggaggagatgccgcagctgatgaaagggttggtttag

SEQ ID NO: 42424 - DNA, 1419 bp, Clostridium symbiosum WAL-14673
atgagactgatgaatgaaataccggaccggttttggagcttattccgctccgttaaccggcccgtctatatagaagcattactaaaaatcaatgaagaatacgaatacagcaattattttttaagcagggaggcgtgcatccggattctgggagagcattttgcccggaaaaaatacgttatctggcaggatgaactggaggacgagctggatacgctggaacctccggcaaccagggtgctgggatggcttttgcgggccggatggctcaggaaagtcgatgattacgcatccatgacggccaatatagtcatacccgactatgcggctgtcatgctggaagcgtttcgcagactccacagcgatgaggaagacgaaacccagatctatattcagaatatctatgcaattctgttttccctgaaaaatgacagaagagccgggctgagccttctcggcacggcgctggtcaacacgaaaaagctgaataagacgcttcaggacatgctgcacaatatggataaattttttgccggcctgctgcagcagaaaaactatgcaaatcttctgaaagatcacctggaaggttatgtggaagaaattgtcaggaagaagtaccatattttgaagacatccgataatttctatctctataaaaccgatattaagcactggatcggggagatgagggatgatgagcagtggctggaggctcttgtcagaaagagcgccgcagattcatacggccggttatccgccggcaggacggcagaggaagaacagaaggccgccgagacgcggatgatggaggatatccttgaaaagctaagccagattgaacgcggttttgatgatattgaacacaggatttccaatatggacaaagagcattccaggtatgtccgcgccacggtgacgcggttaaattaccttctgaaccaggaggacaatacaaaggggctgattatcagactgctgaaccgcctggcggatgacggggagcaggagaacatgctcacagagacaggaaaacggatgaatctgtcccagatgaatatcctgtcggaggcatccctatacaagcgcagaaaggtaaaggccgatttctcaaagaatctggagccggacgaggaggataaggagctgaccacagaggaaattctcaacttgaaccgggtgaagaaccgttacagccgcagcgagatagagaattttatcacgcagagagccgtatcggggaaaatggaggcagatgcggacaccgtatcctgtgatgaggaatttgagaaactgatccttgcctatgactattccacgagacagaaaagccggtaccttgtggaggaggaagaggcggaaatgatagataacggcagataccgatatccgaagctggtatttgtaaggaggaacgaatga

SEQ ID NO: 42425 - DNA, 690 bp, Clostridium symbiosum WAL-14673; identical to SEQ ID NO: 42422

SEQ ID NO: 42426 - DNA, 3372 bp, Clostridium symbiosum WAL-14673
atgatacaacagacgaagactgacagggagcgctttgtggcactttcccgcatctgcctgaataactggcattatatcagccggaagactctttccttcagcgaagaaatcaactttttcaccgggcactccggcagcggaaaatcgactgtgattgatgcgatgcagatagttctgtatgccaacacggacggaagaggctttttcaataaagcggccgcggatgattccgaccgcagcctgattgagtatctgagaggcatggtgaacataggggaaaataatgaatttgcctatctgagaaacagaaatttctctacgaccatcgttttggagctgaaacagacggacacggaggaatgccagtgtgtcggaattgtatttgacgtggagacggcttccaatgaaatctcgagaaagtttttctggcataaagggcctctgtgggagaacaactacaggacagaggggcgcgccatgaccatcgcggaggtggaggaggagctgctgcgttcctatggaaaagaagagtgtttttatacctcccataatgagcggttccgcaggctgctctacgatgtatatctgggcggccttgatcaggaaaaattccccctgctttttaagagggcgataccattcaggatgaatatcaaactggaggattttgtaaaagaatacatctgcatggagcaggatatccatattgaggatatgcaggaaagcgtgatgcagtacggcagaatgagacagaaaatagaagatacctgccgggaaatagaggaactcaaagagctggccgcacaataccgtgaggtacaggcccaggaggagcagattcgggcgaatacctatttcatgaataagatggaaataatgaatcttcgtcttcaggtgtccgagatatccgaccgtatcggacaggcggcctccgatctggataaacaggaagtattggaaaaacaggtggtgagtcaggctgcacagttgaaattaaggagcgacgagctgctccggcagattgcgtccaccggatacgatgagctgaaggataaactcctcaatctcaatgaactgctggaacatctttcaaaaagcgcagacaaatggcagaggacggcggaagggctgaaggcgtgggtcgatgaggatgtcacatccaaccagaccatctgggatatagaggaatttgaggcccgtaccatcggcagggaggcgcttatccggctgaaggcatccgtggaggagatgcgggaggatgtgggaagacagaaacaggaggccggttcaatcctccgtgagctgtcaaagcgggaaaaacaggcctgtgaggagcttagccagttaaaggccggaaacaaggcatatccgaaaaacctggagaatgcacgggcatatattaaacggcggcttctggaagagtgcagaagatcggtggaggtccatgtcctgtccgaccttcttgatatcaggaacgatgagtggagaaatgccgtagaaggctatctggcgggcagcaagctgtctctggtcgttgcaccggcttatgcaaagacggcaatggagatttacggggagctggaccgcagggagtattggaatgtagctgtcctggatacggaaaaagcgtcaaaagccgctccgcctatatttgaaaatgccttgtcaaaggaggtggaggtgcgggagaattaccttcggcccttcattgatatgctgctggggaaggtgatcaagtgccgcggcatagaggaacttcggaaaaacaggacgggaattacgccggactgcatgctttaccgcaattaccgcctgcagtatatcaatccggatcattatacgaaatgggcttatatcggaaaggcgagcgtgaagaaaagaatccgcctgctggaagaagagatagaacagtgccgtgcacagaaaaaaccgcaggaggagcttcaaaaggaatgcatccggctcctggggcttgagaagctggaaagcagtgcggacacttatcttgaatggctcctcgatatcaggcaggtaaaggagaagaccagggagaaaaagcggctggaagataagcttctcaaactcagggaacagaatatcgatgagtgggagaaagagcgggaggcggtcgaggccctgcgctttgccaaagaggaggagatccgcgagacaggcagacagatagaccgcagccgggatgaactcgagagatataaaaaagaggccgtatggcagcagggagagctttccgaccgggagcgcagcttcacaaaggtgcaggaactggaggaccggttagacgaatttctttccaaacgtgaaaatccgaggcttgacaaactgggggattatttcaaaggcagggcggcagcggcggcggaagcaagggaccgcgcgtttgaacagctgctcggccgccggcttgaatacctgaaacgttatccgaacaggagcttttcacccagcgcaaaggataatgcggcatacgacaagctgctcgatacgctgagctgcgataaccttgagcattacagggaagcggcggcagaacaggccaagacggcggtggagcattttaaagacgactttatgtataaaatccgcagcgccatccgcgaggcggttcagcgaaaggatgaactgaaccggattatcagcagcctgaatttcggaaaggacaaatatcagtttgtcatcggcagaaacaggggagccgacggccgtttttacgacatgtttatggatgaagcgctggaggtaaatccgtctaaactcagccagacctttgaaaaccagatgaatttctttacaatggagcatgagaaccagtatggtgagcagattaatgaactgattaatatctttatcccgccggagaacgcttcggcggaggagatggaagaggcccgcaggaatatggataaatatgccgattaccgtacctatctctcctttgacatgcagcagattattaaaaatgacgatggaatcatgaagctgcagctgagcaaaatgattaaaaagaattcaggaggcgaggggcagaatcctctctatgtcgcgcttttagccagctttgcccaggcgtaccggatcgggctgccgccaaaactgagacggagccctaccatccggcttgtggttttagacgaggcattctctaaaatggatgcggaaaaggtggcaagctgtatccagctgatccgggatctgggcttccaggccatcatcagcgctaccaatgataaaatccagaactacgtggagaatgtaaataaaacgtttgtctttgccaatccgaataaaaaggctatttccatccgtgagttcgagcgggaggagatgccgcagctgatgaaagggttggtttag

SEQ ID NO: 42427 - DNA, 1359 bp, Clostridium sp. D5
atgcagatgcgttttgaagtcccggacaccttttggagcctattccgctcggtgaaccgggatgcttatattgaggcgttattatatataaatgaagaataccagtacaataattactttttgacgcgggaagcctgcattcaggtcctgagcgatatgaatgcgaagaagcgctttgagctgcagcgcgaagaggacgagacggagtttgacatgctggagacaccgtcctcccgtattctgaactggctgcttcgaaccggttggctgaagaagattgaggattataacacactggcaacgaatattgtgataccggattattctgccatttttattgatgcttttgagcggctgacctcggaagatatggaggagacggagatctatatccagaatgtatatgccacgctgttttcctttcagaatgattcccgtgtgaatctgaatatgctccggacggcgctgattaatacaagaaggctgaataaggcgctgcaggatatgctgcacaatatggaccggttctttgccaggctgcttgatcagaagacttatggggaactgctgaaagagcatctggaagggtatgtggaagagattgtgcagaagaagtaccatattctgaagacttcggacaacttctacatttacaagatggatattaaaaaagttctgcgggatatgcgggaagacgaggaatggatcgagacggtcagggaacgttccagggccgtgggagatacaaaggaggatgtgctggatctgctggatatgattgagcgtggttttgatgatattgaacaccggattgccaatatggataaggagcataccaagtatgtccgcgctacggtgacaaggctgaattacctgctcagcggggagacagatacgaaagggctggtgatccagctgctgaaccgcatggcgcagggggacgattatggagagatcctgcagagtacgggcagacggatgaatctgtccctgctggaaatgatttctgaaaagtcgctgtacaaacgccggaaggggcggcaggattttatcagccagatggcgccggaggaggtggccgaagatctggagagagacgatgtgctgaagctgaaccggatacaggccagatacagcaggaagcagatcgaggagtttattgaggcgcatatggagaatgaggtgctggatgcatcggagctggagataacaggggacggggattttgaaaagctgatactggcgtatgacctgagtaccaggaagaacagccggtatatggtgctggaggaagatgcggagatggtggaacagaacgggtaccgctatccggggctgcggtttgtacggcggcggtga

SEQ ID NO: 42428 - DNA, 645 bp, Clostridium sp. D5
atgattgagtattatgaacagctgatgcaggaggagcaggaggcgctgacggaagtgattcagcttctgtaccggcagacgtttcttctggagcggaagtatgacaggcgggcggggcggctgtcctatgtgaaggaataccggacatgcagcaagcatctggaatttctaaaagcatattttcaggtggcggggattgcacttcaggagaatgcgcatatggggctgatctatatccagggcgagtcgctctggggagataagctgcccaggcttgctaccatatatcttctggtgctgaagcttctttatgatgaacagatggcggaagtttcttccagcagccatattgtgacgaccatgggggcactcaacgggaaggcgggggatttccgggtactgaaagggattccgtcgccgacggagatgcgcaggacaatttctctgctgaagaaatatcagattatcgagccgctggatgttctggaggaactgaatgaacataccaggctgatcatctatccgtgcatcaatgcggtgctgatgggagatgacatccgggaactgttgaatacatttaacgaggaggacaacattggagatgaagcagccgttcaaggcactttccaagatatgcctgaataa

SEQ ID NO: 42429 - DNA, 3216 bp, Clostridium sp. D5
gtgattgatgccctccagatcgtactgtatgcaaatacggacggaagaggattttttaataaggcggcagcagatgactctgaccggtcgctgatcgagtaccttcggggaatggtgaacatcagcgagaacaatgagtcccagtatctgcggaaccataatttctccagcacgattgtgctggagctggaacagacaaacacccatgaaaaacagtgcgtgggagttgtctttgatgtggagacggccaccaatgagatcagcaggctgtttttctggcatacgggaggacttctggagaacagctaccgggcggataaacgctgcctgaccaccatggagatgcgggaatatatgcagcggacattttcaccggagcagcattactgcggtcccagtaatgaacggttccgcaggcagctgtacgatatttatctgggcgggctggatatggagaagtttccaaggctttttaaacgggcgattccattccgtatgaatattaagctggaggattttgtgaaggaatacatctgcatggagcaggatatccatattgaggacctccaggaaagcgtaatgcagtacgggcggatgcgcaataagattgaggagacgatggaggaaatcagacgcctcaaagagattcaggaaagttacgggcagtacctggagcgccgcagggaagcagaggcctgcacgtatcagattgacaagctggagatgctgcagctgcgggcgaagattcaggagctgtcggataagatcgagggccgccaggaggaaatcagccgccaggagacgatgcagcggaggatggaaaaagaggctgcacagattcagagggagtatgaggaagtgctgcttcggatcagcaacagcggctattcagggctggagacggagctgatgagtgtgaatgaggcgctggagcgcctgggcagcagcaaggcgaagtgggaacagactgcaaaacggctgaaggactgggccaactgcgatgccgcaccgaaccaggttctgtgggatgttgagaagttctcggacggcagcatttccgaaggggagttgacacggctgaaggagagcctggcaaagcttcgggaggagcttgaagaggaacggcgggaaacggactcccggatgcggaagattaagaaggaagagcatgaggcccgggaggaactcaaagaactcaagcaggggaaaaaggcttatccaaaggagctggaggaagccagatatgagctgaggaaccggctgcatgagcgctgcgggaagtttgtgaatgtacagatactggctgatttgctggatatcagggatgagcggtggcacaatgccgtggaagggtatctggggaacaataagctgcttctggttgtggagcctcaatatgcgaaggctgccatggatatttaccaggaaatggataagaagaggtttttccgcgcggcggtgctggatacggagaaggttctggaggaggaacacccggtgcgtcccggtgcgctggcagaggaagtggctgcgcgggagacacatgtcagggcatatattgattacttcctcggaaacgtgatgaaatgcgagagcatggaggagctgcgcaggtgccgggtgggcgtgacgcctgactgtgttctgtaccacagctaccgtctgcagcatatgaatccggagaattatacgagaagggcttacattggcgagacgagtatgcgtcagaggattcggcagctggatgagaagtgccgggcgctgcaggaggagcggatgcccttgcaggagatgctggagcagttccgtaaaatcgggcagtacgaggggctgctgcagccggtttcggactatatggaatggctggacgatgtgggaaagattgcgggaaaagagcggcgtaagaagcagctgacggagaagatgcgtacgcttcgggaagagtctgtttctgcatgggagacagagaagctggagctgatgcggcggcaggaagagaaaaagatgcggatccagagggtccaggaagagatctggaagaataaggatttcatcagtaagtgtaagtcagacagtctggagatgaacacacagcttgcggaccgggagcggtattttaaagaggatgccgagtatgaggcactgttcggccaattcatggaaggccggcgttctgtgaattacgattatctcagaaggcagcggctgggagaccggggaccgctggaggagaagaaggagcgggcatatcaggagctggtggatatcaggagcagttatacgcagagatatccaaacaggacattttccgccagcatcaaggagaacagcccttatgacaggctgcttgagagtctggaatgcgacgatctggagggatacaaagaagcggccagggagcaggcacgttctgcggtggaacatttcaaggacgacttcattttcaagatccgcagtgccatccgcgaagcatatcagcggaaggatgagctgaaccgtattatcagcaggctggattttggaaaggacaaataccagttcgtgataacaaagaacaagggcccggacggaaaatactacaggatgttcatggatgattcactgaagatcaatccgtcccagctgaccaatgccatggagaaccagctgaacatgtttaccatggagcatgaagatcagtatggggatatgatgaacgagctgatcaacatatttatcccgcccgacaatgctacaagggaagaactggaagaggcgaagaaaaacatggacaagtatgccgattaccgcacctatttgtccttcgacatgcagcagatcgtacagggcgagaaggatatgaccatcggcctgagcaagatgatcaagaagaactccggcggcgagggacagaacccgttgtacgtggccctgcttgccagctttgcccaggtataccggatcaacctgtcgtctaagatacaccggaatccaaccattcgtctggtggtgctggatgaggcattctcgaagatggatgctgagaaagtcgcgagctgcatttctcttatacgcgggctgggatttcaggctattatcagcgctaccaatgataagatacagaactatctggagaatgtagataagacctttgtatatgcgaatcctaataaaaaacatatttctatacaggaattcgagagaggggagtttggggagctggtggaggaagactag

SEQ ID NO: 42430 - DNA, 1188 bp, Clostridium sp. D5
gtgtatcttgtagaaagaattatagagaaatgtgaaaacagccagaatgactggaggcaaggtgcttcagggggacggtccctgcggattgatcagttggagtatgatgcgtgcgggaagtcagagctggtagcagaagcggaggaattggagcggacgggtctgatccggatcaaatggctgacgcggggcagtgacatagagcggatttactaccggcttgaggatctggagcagttttattcgattttagaggaaacactgcctggccgcttgccgaaacagaagcagatatgggagtatcggggcctgctggaacgggaactggatgtgctggaaacggagtggatacgtcggtattatcgggatatcctggaacagctggagaaaggtaacatccctaaaatgttgggaaaacgggaagtatatctgccctgcttccggggaattgacgggctgaaagagccggtgtttaagaggattttcagcagtaaatatctccacaattcgaaaacctttgaggagtttgccgagcctcatattattgcaaaagccagggcatattgtgaggatgtggaggcggagatggacgacacggaagttctttcgcagctctgtatagaggagtattcccaggaaatgtctttgaagggggcattgcagattgagattgtgcagggggagaaatgtgctgtaattgatctgggagagtacttctacggaacagtattgaacagcgagacactgaagaacgctgtaattttggagcagcagccggagattaagagagtggtgactatagaaaacaaagcgaactttgtatctgttccgtatcaggaggggactttgtatatcttcagccacgggtatttttcgccgagggagaaacggttcctgcaacgtctcagagaggtattggagggcagacaggtagagttctgtcatagcggagatttggattatggtggagttaagatttttgagtatatcaagaaacatattttcccggatgtgcagccgcttatgatggatgtggttacatatgagcgatatctggcacggggggagccaattggtgagaagacactgcagaagctgcgaaagaccgagatcccggagctgcagaatctgatagatataatggtggaaaagggaattgcagtggagcaggaatgttttttaatgtga

SEQ ID NO: 42431 - DNA, 1461 bp, Bacteroides salanitronis DSM 18170
atggcgtcacaaactgaagttttatctgaaatcttgcatacttcgccttgcgtggaattgcttcgcttgcgcaatcgtcagctgattatcttgttcctttttaagacgttctatcaccggcagaccgccgtacctttcgagtctttgcggatgcagcttgccgattatctgaatgccgtgcatttggagcaggatgaggaaagcgggattacggctttcgatacgttcgaggaaaaggcaagcaagtatatccagcggtggaccgataagggtttcttgcgcaattatcaggaggaaacgggtgaggttttttacgaactttcgctttatgcaagcaagaccatagattggcttttgagcctgaaacgcgaagagtttgttggtacggaatcgaagtttatgaacttgttcgggcaattgaaagaactggtagagtttaccaacgaggacaaggaagaacgcatccggatgctggaagagaagaaacgtgagatagaatgccaaatccaagcgattcaggagggaggcgatgccgagattttcgaagaataccagatagtgccacgcttcaagcagataagccagtcggcaaaggaactgctttccgattttaaggaagtggaggagaacttcaagcgcattaccaaagacatttaccgcaaacatgcggaaggcgaatattccaagggcgatatcttaggctttacgtttgatgccttgggaaatctgcaacaaagctcgcaaggcaagagcttttatgccttttgggacttcttgctgactccttccctgcagcatacatgggatgaattggtggagcatctgtatgatacgctggacgagaagcgcttggaggtgaacgatacgttcctgaaaaacatgaaacaatatctgtatgccgcgggaaagaaagtatatcaggcgaacgacaagatggcggagaagctgagccggattatctgcgagaacggagccatgcctgcggtactggcacagcaagtgataggggacattcaggcttccttgctccagctggcgcagaagggcatcacgccggatataacgttggaagtcgagaccttgccggagattgctatgccgatggaacgcaaacttacgttggaacaatctatggaagtgacttatagccaggctttggagatggcaaactcggatataagcgaagcccgttcggctgggaacttgttcgtgcagaaccgggtagaccggcgcatcctgaagcaacgcgtccagcaggcattgcggaagaagaagcaagtttcgctgggagcggtgatagaagaaaacgggggattgagccaaggcttgtccgagttgttcggctatatcggcgtagtgcgcgattttcatcataccgtgagtgccgaacggacacagacggtggtgttcgatgaagagcagcacaaagccattgtcattcccgaaatcttgcttttttag

SEQ ID NO: 42432 - DNA, 576 bp, Bacteroides salanitronis DSM 18170
atgaacttagaatcttatataactccttatgcgagggcggtggtttgcctgttgaaaggagcggtcaatgcatccgaccgttgctggaacgaccttttgcattaccagtctgaaatacagaagtatgttgcccaaatcggactggaattgattgtaaagcgcgacgaaggctttgcttacctgaagcagatgaccgatgagggcgggaataccttggggcttattccgcgcaagccgttggggtttgagtgttcggtgctggcgattgttcttcgggaaatgctggaggaattcgacagcaatttggatgaactgtatgcggcggagtgttacgttacggataaagccttgaaggaacgcatcgaattgttcttgcccgaacgtttcaaccgggtaaagctattgaacgagctggacacctacattgcccggatggtgcaattgggctttttgatagagaagcggcaggacaatgcggtctgttaccagatacaccgcatcatcaaagagaaggtcacgctcgaccagttggtagaatttaaaaagaaacttgaaagctatgttgaatctgtttag

SEQ ID NO: 42433 - DNA, 3396 bp, Bacteroides salanitronis DSM 18170
atgttgaatctgtttagtacatcttccgatacggcggggttccgcttgcaatacatggaaatctataattggggaacgtttcacgagcgtatcttccgtctggctccgcaagggaataatgccttgcttaccggagcgaacgcttcgggaaagagcaccatcattgatgcgttgctcaccttgctggttccggcaaagaaagaccgtttctataaccagtcttccggggtggaaaagaaaggaaaccggacggaagagacctatgtgttggggcattacggaaacatccagaaggaaggtgaacggggagtgaccacacaagccttgcgcgacaaaagcgcctattccattttgctggcatcgtttgcgagtgccggcgagcgggtagtgacggtctttcaggtacgctggttctcggggggagaattgcgccgtacattcgggttggcgcatgtgccgctggagatacagaaggacttccagccttttgacgggaagggaatctggagacgccggttagaggcatcttataaaggtacgcgcgcgttggtggaattctttgagggaccgaccggctatgccgaacgcatcacccagcttttcggcatgcgttcggtaaaggcattgagccttttcaaccagatcgtaggggtgaaggtcttggacgacctggatgaatttatccgtaccaatatgctggaggagcacgatgccgagagccaataccttcagttgaaggatagtttcacgaccctgatagaagcgaaggtgaacatcgagaaggcacgcatgcagattgaacgtttgcatccgatagcggagctggcagagaaaatccggcaagccgatgagcggcttcgccagttgtctaccgataaggatactgccgtatattggttcgccaggcaaatcatccgcatggcggaggagaagttggaccaagccttgaaggagaaagaacgcctggaggcggaaaccgctaagttccgtcggaaagaggaaaagctgaagcaggaggaacgcactttggcgcttgccatcgagaaggacgaggtagggcgtaagttgaaggagctggaaaacgacatcgagcttcttgccaaggaacgtgacgagcgggtgaagcggatggaggaatacaacgggcttgccggaaagataaacttcccttcgttgccggcggatgaagagacgtttcaggctcggcgtacggaagcacgtgctaaggcggaggcattggcggaagagaaagagacatacatccggaaacagattcatgccgagcaggaacggaaagagcttgccctgcagatagaggaactgatgcgtactgtagaggtgctccgccagaataagaataacattcccttgcgcgagaccgaaatccgcgaggctatcctgaagcacaccggggcatcgaaggaggaaattccttttgtcggagaactgtgccgggtggcagagggcgaggaagcatgggaagcggcgttggaaaagattctgcatcattttgcccttcacctgattgtgcctgataaatactatcatcaggtgaacgagtatgtgaatgccacaaacctgaaagggcgcatcttgttttaccggtatgtgccttataactccttgtcggatttgcaggcgtatggaaacggcggggaggaacagcaattgattgacaagatagaaatccgctcggacagcgagtacgaggaatgggtgcgtgacatgattttcgagaaatacaattatgtctgtgccgaggatttgaaagcgttcgagcggtataaggagaaagccgttacccgtgaaggactggtcaagttccccggcgaaaggcatgagaaggatgaccgcccgcatatcttgcgtcgggagaacttcgtgttgggatgggagaacaaggagaaaatcaagcttctccagcaggagttggtccagcttcaggagcgggacgaggcgctttcgcaagaggcggaacggattgggcaggcggctaaggagtgtgaggcacaagccggactgcaccggaagctggcggatgtgttcgctgatttcgagaaagtgaactggcaggcgtacgccgcacagcttcaggaaaagcaggacgagaaagaggcgttggagaaagggaacgaccgccttcatacacttcaggttcagctggacaaggtacgcgaggagcagcatcgcttggggaatacagacataccggaatctacccgcaaggtgattcatgccgaataccgtatcgaacagcttcagaaggaaatcgaggagaaccagcgggtggtttcttcgattaagtcgttgctcttcaccgattttgagaaaagctacgcgtatttgtgcgagctttcgtacgaccagctgaagcaggagcgggggaagtttcaggcaaagaacgagcgcgaccgcaagaagctggatgccgagaagcgtgcttgtgaggatgaagccaagatgaaaatcacggagttcaagcatcccgaagaggagatactggcacgcttcaaggattggcgtgcggatgttgatgctctgcccgatgccgcgcacatcgagctgatagatgcgtaccggcagatgttggagaggctggagaaagagaacctgcccaagtacgaaagccagttcgacgggtatctgcaaaagaccttgaccgataaggtgggtgagttccggatgttcttcatcaattggatgcacgccatcaagagcaatatcgacatgctgaatgattcgctcaagggcatcgattaccggacgcgccccgtcacgtatatccagctttccgccctgccccagataagcgaggaggcacgcgagtttaagcggctgatggatgaggcggtgccggatgtgcagaaaatcaattcgcttcccgatggcaggaggatgcatttctacgaccatgtagaaccgttcatgcgccggctggaggatgaggagtggcgcaaccgggtgatggacgtgcgtttctggtttacgtataaggcagaggaatacaaccggcaggatgggcgcaaggaaaccacgtacgagaacatgggacacctgtcgggaggggagaaagcccaactgacctacaccatattaggctctgccattgcctaccagttcggcttgaccaagagcggcatgcaaagcgattcgttccgctttgtggcgattgacgaggctttcaaggcgcaggatgaagacaaggcgcgctacctcatcacgctctgcaagcagcttcacctccagcttctggtggtgactccgaacgataatatccacatcgtggagaatgatatctcgtatgtgtatttcgtagagcggaaggaggaaaagacttcgtggctctacagcatgccgatagagcaatggaaggcggaagctgttgagagggggtag

SEQ ID NO: 42434 - DNA, 1473 bp, Syntrophobotulus glycolicus DSM 8271
atggagcagaaaaaaaacgagttctcggagcatatgtcctttgaattcctggaattattgcgcaggaaaaatccggcctggcggttattggcttcacctcaggcaccctttgccgcggcctttctctatcaggaattcatcgcggaaaacaggcggctggtcgccgaacaggaattgatcagccgcctggaaagttttatcgaccggttaagtcagggacggagtgagcgcctttttccgagaacagggcgggaatacctggatgattgggcgaatgacgagcacggctggctgcggaagttttatccgccgggccaggacgagccccattttgatgtgacctctctggcccagaaggccattgaatggctgttgagcctgaggcagcaaacctttatcggcacggaatcacgcctgatcaccgtatttgagctcctgcaccagattgtggagcgttccgaaaccgatcccggcctgcgtctggcagagctggaacgacgcaaagcggaaatcgagcaggaaatcacccgggtgcaaaacggacaggtcgccctgctggatgaaacgcaaatcaaggagcgtttctggcaggcgatgacgatcgcccgggagattctggccgatttccgagccgtggaacagaattttcgggatctggacaggggcatgcgggaaacaattgccacctgggaccggggaaaaggagagttattggaagccgtctttaatgaacaggacgggattagtcagtcggaacaagggaaaagtttcgccgctttctggaaatttctgatgtcttcctcctcccaggaggattttcaggagaccttggacaaggtcttgcggctgagcgcggtgcacgatctgggtacgggccggaatatccggcacattcaccatgactgggtgaacgccggcgcccatgtgcaagagacagtggccgcgctgtcccagcagttaagacggtatgtggacgagaattttttggaggaggagcgccggatcaaccagattgtacgggagattgaggggaaagccgtggccgtccgcaataacccgccccggcaatgggaaatggcaattgacggggtcgccccggaaatctcctttcctttggacaggcccctgttcacccctccccggcggccggaaatccaagacgacgcgatcgatgccggtgtggaggatgtgccggcggaagcgcttttttcccagatttatgtggataaggaaaaactaaaggaccggatcggctgtctgctgcagacccaggacaggatcacgctgtctcggatcatcgagcattatccgttagaattgggattaagcgagctcgtcatctatctggtcattgccggggagagcccgcaggctgttttccagccggaggaggtggaggaagtttcctggaccgatgagacgggaaagagaagggtggccaagctggccaggatcatttttcagcgggcttaa

SEQ ID NO: 42435 - DNA, 609 bp, Syntrophobotulus glycolicus DSM 8271
atgaatatttccgatgatttggcctgttcaagggctctggtcgctctgttgaaaaacgttgtctttaaggagacggacccggaacactgggaagtgatcctggcccggagatatcagattgaggattatgtgagcaaaatcggtctcaccctgatggtcgacgagatggacggttacgggtatctgaaacagcgttcttacggggagggcgaggaggagatcccccgcctggtgccccgccatgcgttgagttatccggtcagcctgctgctggttctgctccggaagcaattgctggagtttgattcaagcacaggggaccagcggctcatcgtcacccggcggcagattgccgagcggatgcgtttgttcctgaaggatacaaccaatgaagccaaaatggtggcggacattgacaggcatattgaccggatcgaaaaaatgggtttcttacgccgcttgcggggcagtgaagagagcttcgaagtgcagcgtatcctgcgcggctttgtcaacgggcagtggctgcagcatctgaacgagcgcctggacctgtaccgggtttatgccggcggcgcggagacaggggaaggggaggaacaggaatga

SEQ ID NO: 42436 - DNA, 3405 bp, Syntrophobotulus glycolicus DSM 8271
atgagtttgtttaacctggagcgggaagagccggggatgctttttggagcgacgcccggtttccggctggccaagctggaagtgttcaattgggggacgtttgacgggaaagtctggacgttttcccccgggggggaaacagcgctcttgaccggtgatgtgggctcgggcaagtctaccctggtcgatgcgctgacaacccttctggtctcgccgcggaaggtcgcctataataaagcggccgatgccagcgccaaggaacgttcagttacgtcctacgtccggggttactttgggcagaaaagaagcgccgaagggaccagacagccagattccctgcgggatatccatcattattccgtcctgctggccacctttcaggaccccgggctgtcccagtctgtcaccctggcgcagtttttctggtatcaggacgcccagaaaccgccggcccgtttttatgctgtggccgatcaggaaatgtcgatttcccgggacttttccaagtttgagaaggacgtccgggtgctgaaaaaacgcctgaaaaacagcggtgtccggatatttgaggattatacccgctatgcggaagtcttccgcggtaaattcgggatcgagcaggaacgggctttggatttgttccagcagaccatttccatgaaaaaggtagaagcgcttacggaatttgtacgggtcaatatgctgcagattccccatacggagcaggaagtcgagaagctgaaaaatcattttcaggatctgaacagtgcccatgaggccgtcctgaaagccaagcggcagattgaactcctgagtccagtggtggaacagggggaacgctgcgggcagctggccggccggcaaagcctgctggaaaaggcgcttcgcgccctcagtccctggttcgcggagaaagcggaggctttgctgagcgccgaaatcaccgggctggagcaggagctgcgtctggccgtaggggagcgggaacaggcggaagcaaagcaaaaggaaatcgaaaagaatattgaggagatccggcgggcgatttacgccaatggcggcgaggcgctggaagccctgaaaacggaaatcaacagcctgcgggagattctccagcacacccgcaaggatcgggccgtttatatggtccacgccgaaaagctgaacttaccggcggcggacacccccggcatattcctggacaaccgggcccaattgccgggattgaaatccgccgaagaaagcctgcagggccgtctgcacgaggattttcggacggccgccgcggaagaggacagggcggggaaagaagcgcggaaagtggcggacgaattggaatcgctccgctcccgtaagacgagtattccccgggaatacgttgagaaacggaagcagctctgccggaacctggggattaaggaagaggaactgccctttgccggcgaattattggaagtccgggaagaagaagcggcctgggagggcgcgatcgagcggctcttacataatttcggcctttcgctgctggtatcggaagagcattatccggctgttcagcagtgggtggaccggacgtcgctggggatgcggctggtctattaccgggtccggcccgaagcccggccgtccgtttccggccggcctcatccttcggccgtatcggagaagctgaagatcaaaccgagcacgcccttcggcctttggctgaccagggagctccgccagcgcttcgcccacgtgtgctgcgcgagcagggagcaattcagccgcgaaaccctggccgttacccaagccggccaaatcaagtccaacggcaaccggcatgaaaaagacgaccgctatgccatcgacgaccggcgccgttacattttggggttttccaaccggaaaaaaattgaggcgctggcggccaacgaacgggagctgcaagaggaaatccggttttaccgggatgaaattgaggagattaagcaaaagcaggcggaaagccagcggcgcctgaacgccgtcgccggactggaaggaatcaccgcttttgccgatatcgatacccgctccagggaagaagaaattcgcgcgaaagaagagagacgaaggaaactggaagagggaagcgatgtgctgcaggggctgcagcgccggctggccgagctggaggaaataaagaatacgcaaaaagcagtgtatgacggggcatttacccgcgaaataacgttacaaaccggtttggcgcgtttcagccgggacagggagcgcgccgccgcaaccgccggggaagccgggccggccatgcgggaagcggaatatccttttttagaaaagcacagaggaagtgcgttaaaaaataaaaaaccgaccttggaaaacctgacgaccctggaacgggactaccgggattggatcgaggaagaacgcggcacactggcaagggagctcaatcagctgagaggcagaatcatcaaagccatgtcggaatataacaaccagtatcccgaggaaacgcgggaaaccgacccgagcatggaaagcctccccgactatgcccgcatgctggcacagctggaaagcgatgggctgccccgttttgcaaagcggtttaaacaattgctgcatgagaataccatcaaccagattgccctgttccaggccaaattaaaacaggagcaggacaccatcaaaagccggattgagcagatcaacggttccttaagcgccattgactataatgaaggccggtacatccgcctggaatatgatgaaacctatgataacgagattaaggattttcgggtgcagctcaaagcctgcacggaaggggccctgaccggctccggagacgaacaatacgcggagacgaagtttttgcaggtaaaagcccttattgagcgtttccggggcaggccgggcgagacggaaagtgatgcccgctggaccaagaaggtgattgacgtgcgcaactggttcttatttgccgcttcggaaagatggcgcgaaaccggtgaagaatacgagcattatacggattccgggggaaaatcgggcggccagaaggaaaaactggcgtatacgattctcgcggccggcctggtctaccatttcggcctggaaggtcaggatgcccggcctcaatcctttcgctttgtcgtcattgacgaggcttttctgaaaagctcggatgagtcggcgcggttcgggctggagctgtttaaaaagctggatttgcagctgctgattgtcacgccgctcctgaagatcccgaccatcgcccagtttatcgcccatgtgggttttgtgcaccatgacgatatccagcatcggtccatgctgcgcaatatctccattgaggaatacgagcgggagcggaaggcccgggaggcggcgcgctatgtgcaccaggtggtctga

SEQ ID NO: 42437 - DNA, 1179 bp, Syntrophobotulus glycolicus DSM 8271
atgtgcaccaggtggtctgagccgcagtggatccgggaggaattaaggcggagatgggactccggcaggattctgcgggcgctgctgacagcggatgatttgtttccgctccgtttgccgctgaaacgaccgaaaagtaacgaggtcaatgcaaactttgctgagatttcccattggattaaacggctcagagatcagagcagacaagggattggttttggctatgaactgatcgaaaaggaaatggcgcatcgccagtccggccggaatcttctgccgacccatgccgttattccgacagtgcgggatgccctgcgcctgctgaaaaaggaacgggaagcggataaattcctggagattgccgggacagtggcggcggactggcctcctttacgggaatgggccggaaggtacccccataaagttctggcctccggagatgactggaacggaatactggcggttttgcgatggtttttcgctcatccccgttgcgggctatacctgcgccagctggatattcccggggttgacaccaaatttattgaacatcgcaaagggattttaacggaactgttgacgattattttgccggaggagacgattgacagcagtgccttgtccttcgagcagcgattcggattgcgggccaagccggtccaggtaagaatgcggctgctggatcaggcgcaatatcttcagggtctttccgatctgaccattccggtggagcaattgaaaaattggagtcctgcggcagagcgggtctttattaccgagaatgagatcaacgggttatgctttcctgatacagggaccagtctggtgatcttcgggctgggttacagtgtggatatcttgaaagaggtcgcctggttaaaagagaagaacatttattattggggtgatctcgatacccatgggtttgccatgctggaccaggtccgaagctttctgccgcagacctgttcgatgctcatggacgaaagcaccttgttcaggcagcgccagctttggagcgtggaagaccagcctttcgggggacagttgacccggttgactccggaagagcaccggctgctctgttcactgcaggacaatacgtggggcaagggtgtccggctggagcaggagcggatttcttttcagcaagtgaagcaatttctttcagcgctttag

SEQ ID NO: 42438 - DNA, 1470 bp, Xanthomonas perforans 91-118
atgaagcaccaggcacgtatcgccggttatcggcaactgcgcgagcagccggtatggaaactgctcgccgccgaccacgcacccgaactggtcggcctgctgcagacggtgctgatggatggcgaacgccgcctgccttcggccgtgttgcacgaacgtttgcagcgccagctcgacgccttgcgcgccgacgagctctcgcgcgaactgccgcgcaccgcacaggcatatctggcgcattggttggcacagggctggctggaacgccgcctgcctgaaggcgcagccgaagaagaatacgaactctcgcgtgccgcgacccaggccatccgcttcatcgccggcctgcgcgaaagcagcagcagcgccaccgaaagccgcctgtcgctggtgatccagcaactggtgcagctggccggacagaccgaggccgatccagagctccggctggccgcgctgcgcgatgaacgtgcgcgcatcgatgccgaaatcgaacgcgtggcctccggccgcgtggcggcgctggacggcaaacgcgcgctggaacgcgcgcgcgacctgatccatctctctgacgagctggccgaggatttccaccgcgtgcgcgacgacttcgagcagctcaaccgccaattccgcgagcgcatcatcgacgacgaaggcgcgcgcggcgacgtgctcgaacaattgttcaacggcgtggatgtgattgcagacagcgaagccgggcgcaccttcgaggcgttctggagtctgctcaacgacacccagcaaagcagccagctcgaccaggcgctggatgcgctgcttgcccgtgggtttgcccgcaagctcgatcgccgcgaacgcgccttcttgcgcgggctgaccggcacgctgctggaacgcggcggcgaggtgcacacggtgatgcagcatttcgcgcgcagcctgcgcgggttcgtgcaaagccgtgggtatctggaacagcgccggctcaatcaattgctcaagcaggcgcagggcgaagccttgcaattgcgcgacagcctgcacgccaccaccgccaccggctatacgcaggcactcagcagcagccgcctgcgctcgctgtcgcaatggcggctgcacgatccacggctcacccaggtcgatggacgcgtgcaggccgccgacgcggccgagatctcgctggacagcgtgggcgatctggtcgcgcaatcggagatcgatgtgcgcagcctgcgcaacgacctgcatgagctgctcggccaacgcccgcggctgaccatcggcgacgccttgcaacaacgcccggccgtgcagggcctgggcagcgtgatcggatacctgtcgctgggcacgcgccacggcatggtgatcgaaggacagatggaaacggtgcaatgggaaggcagcgacggcgccgtgcggcgcgcgcgcattcccttggtgtggtttacccgggagaaacgcaatgaactggtctga

SEQ ID NO: 42439 - DNA, 702 bp, Xanthomonas perforans 91-118
atgaactggtctgaggacgccggcccggacgccgacgagagcaccgcggtgtcggccatcgacgaccgcatgccgatgacgcaagcctccagtgccgagccgcgcggcgagctgtttttaggcgacaccggcacgctgccgttcgacgcgcggcgtgcgctgtgccagttgctggcagggcccagcatcgatgcgcaacggcacggcgcgctgtggccggcgttgttgcgcaacgaggtggcgatccgccaggtgctgtgcgagctgtttctggagctggtgctcgaccgcgagggcggggtggccttcacccgccaggccgacaccgccgagctcgaatcgcccaccttgctgcgcagcgcgccgctgacgttcatcgagtcggtgttgctgctgttcctgcgccagcaactggccgaggccgatacgcgcggcgagcgtgcggtggtggacgaagcgcagttggtggaggcgttgtcggtctacgagaagaacgtgtccaccgatcgggcgggcttcgcgcggcgggtgatgacggccatcggcaagatgcgcgacaaccagttgctgtcgcgcttgcgcggcagcgaggagcgctatgaagtctcgccggtgctgaagctgttgttctcggcggaggatgtgcaggccttggtggtcgcgtatcgcggtttgcgggaaggggatgtagctgctgagtaa

SEQ ID NO: 42440 - DNA, 4017 bp, Xanthomonas perforans 91-118
ttgtttgccgagacgctcgccgagcaacgtgcgcagcagttccgcatgcggcgcttgcaggtgcacaactggggcaccttcaacgggctgaccgaagtgccgatcgcggagaagggcttcctgtttgtcgggcgttcgggctcgggcaagtccaccttgctggatgcgatgtcggcactgctgacgccgccgagcatcgtcgacttcaacgccgccgcgcgcgaagccgagcgcagtgggcgcgatcggagtctggtgtcgtatgtgcgcggtgcgtgggccgatcagcaggacagcgcgtccggcgaaatcgctacccaatacctgcgcaagggcgccacctggaccgcgctggtgctggaatacgcaaatgcgcacggcgaggcggtgagcctgatccgcttgttctggatcgccggcagcggtaacgcggcggccgatgtgcggcgtcactacatggtcgcgccacgccgtttcgacgtggcgaccgagctggatggcttcgatcttgacctgcgcaagctcaaggcgcgattgggtgaggacgttgcgcatttcgacggcttcgccggctacgccgaacgtttccggcacgcgctgggcatcggcaacgagatggcgctgcggctgttgcacaagacccagtcggccaagaacctgggcgatctcaatgcgtttctgcgcggcttcatgctggacgagccgcgtaccttcgaagcggccgaccggctggtggaagattttgccgaactcgatggcgcgcaccatgcggtggtcaccgcccggcgccaggtggaaaccctgacccctgcgcgcgagcaccacgcggcgctgatggcgctgcgccacagcgtcggcgagttgcgcgagctgcagctgggcgtggacagctaccgcgagcagcagcggctggccttgctggaggagcggctgcaggagctcgacaaccaggaccgtggactggccggcgaagaaggccagcgccgcgaatcgctggataaccacgaacaaaaactggtcggcctggagcgcgaacagcgcgccgccggtggcgagcagatcgaggaactggaacgcgaacgcgcacgcgtcgagcgcgagcgcgacgaacgcctgcgccgccgtgcacagatcgaacaggcctgccgccagctcggcaccgccctggcggccggcgccagtggctttgccgcacagatcgcgcatgcgcagaccgtgctggataacggcaagcatgacgccagcgcgctggatgaggccatcgccgaacgcatgggcgcgcggcgcgacgacgagcgccggtttgccgaaatccgtgccgaactggaggcgctgaagcgcgcgccatcgagcatgcccgcaccgatgcaggccctgcgcgcgcgcttgtgcgaagacaccggcattgccgaggccgcgctgccgttcgttggcgagctggtgcaggtgcgcgaggaccagacggcctggcgcggtgcgatcgagcgtgtgctgcacggctttgcgcaatcgctgctggtggacgagcggcattacgcgcaggtcagcgaatgggtcaaccgcacccatatcggtacgcgtctggtgtacttccgtgtgcgccgcaacgacgagctgcattcgcggcgggtcgatcccggcgcgctgcccggcaagctgcagctgcgcgagcacgcctttaccgaatggctgcgcaacgagctgacccgtcgcttcgactacgcgtgcgtggacaacgccggagcattgcgcaacgccgaccgcgcgatcacccgcgagggccaggtcaagcatcctggcgatcgctatgagaaggacgaccgccacgcggtcaacgatcgcaagcgttggctgctcggtcacgacaaccgcgacaagctcaaggtgttcgagcgcgaagcgcaggcgctggcccagcgcatcgccagctgcgatgccgatgtggcagcgctgcgcaagcagcgtgagcaggaccaggaacgccaactcgctgcgcacaccttggtggagcgcgactgggacgagatcgatgtcggccccaagctgcagcgcctgagcgatatcgacgaacagttggtgcagctgcgcgaaggcaacagcggcctgcgcgcgctcgggcaggccatcgacactgcacggaccctgcgcgaccaggccaagcgcacctatgaagatgtgcggctggagcgcgcgcaactggcgcgcgaacgcgtgcggctcgaacagcagcacgcggcctgcgcgggccgcgccggttccgccacgctcacgcccacccagttgcagggcttgcgggaacggcttgccgcattgacgccgctgtcgctggacaatctggaagcgcatttgcgcgtggtcgaacgtggcctggccgagcagttggccgacagccagggccgcgacagccggctcagcgcgcagttgctggaatgcttccgcaagtattgccagcagtggcccgaagacagcggcgatttcaccgtgagccttgccagcgccgacgatttcctcgcgcgtctggaccggctggaaagcgatggcctgccgcgtcacgagcatcgtttcttcgacctgttgcagacccagagcaagaacaacctgctggccttgcagcgttacaccgccgaagcccacaagggcatcaagcagcgcatggacgaggtcaacgccagcctggagcaggtgccgttcaatcgcgacaccgtgctgaccatcgaggtcggcgaccgtcgcctggccgaggtgcaggaattccagcagcagttgcgcgcggtgctgtcgcatcaacagaccgaagaccgcgccctggccgaagcgcagttttccaccttgcgtgcgctggtggcgcgcctgggcgcgcaggaaccggaggcacgccgctggcgcgaacaggtgctggatgtgcgcctgcatgtggagttcatcggtgtggaactggacgcgcagacgcgcgcgcaggtggagatctaccgcagcggcgcgggcaagtccggcggtcagcgccagaaactggcaaccacctgcctggcggccgcgctgcgctaccagcttggcggcgaagacggcgaactgccgcgctactgcgcggtggtgctggacgaagccttcgacaaggccgacaacgaattcaccgcgctggcgatgaacatcttcgagaacttcggcttccagatggtggtggccacgccgttgaagtcggtgatgaccttggagcccttcatcggcggcgcatgttttgtcgaaatcagcggccgccataactccggcgtgttgctgatcgaatacgacgagcaggcacagcgattgaagctgccggagcgctcgcgtggcgatgaggcagcggtggccgatgccactgacgccgcgtcagcgatcgaggctgcgagtgagcctgtaggagtgcagggcgctgcaaacgcagacggcattacagctgatggcctcccgctacacatagccttgcccgtgcccggcgatacctcacccgcagcgcagaacacgcatagtagtaagcgcaagccggcagcggcgacggcgacggcgacggcgaacaagcagaacaaaaacaagcaaaacaagaacgccaagaccacatcgcccacacgcgctgcggcacagcctcacgcaaagcagccgaagaaatcgccttcgcgcactccagctgtggctggcaagccggtagcggacaaacgtacctcaggcgcgcagcaagcgccggcggtgtcgtcaggagctgcatccaggtccaacgtgggcaagaccacgcggtcttcaaaagcgcagggcaagccgattgtggccgcaaacgcatccaacgccacgtccagcaaggtcgccgccgcatctgcgccagtgaaaaacactgccgcagccaagccacgtgcaacagccgcatcgactggtcagccagcgcgtggcgccggcaagacaacctcggcgcgcgcggtggctgaaccgtcaccggccacgacgcgcgtcgccagggcaggcgccccgaaggcgcgcggcaagcgctga

SEQ ID NO: 42441 - DNA, 1527 bp, Xanthomonas gardneri ATCC 19865
atggaaggcagggacgacctgagtaaggaggggaggatgcatcgcagcagcgtcgatcggacgcaaagctatattttggcgcggcaccagcaccccgcttggcagttgctggctgggcgtcgggcgccgttggtgctggggtgcctccaagcacttttcgaagccggccaagacggggtggacgacgacgacgcccagcaggcgttggccactcttttgcgggaacatgccggacgatccgaatttgagatcgaaggcgatgtcgaggcactggcccgcaaggagctgaggacttggattcgctgcgcactgatcgtggaacgcgaaggccgcgtctatgcgactgatgcactggaattggcgctgcgcttcgtcgatggactggaaaatcgcgtcatgacctcgacggcttcacgcttggcgatcgtgcagcgcgaaattgaacggctcgaagcgcggctaaatcccgatccaaagagccgcgttgagcacttgcgtgcccagattgcgggtcttcagagggaattagaggacgcggaagatggacgtgttgagacggcagacgcgcatgaagcggccgaaggtgcgcgagaactgtatgcgcttgccaccagccttcgggcagattttcgacgtgtggaagattcctggcgcaacgccgatcttcgcttacgccatgcgatcgtgtcggaacgccagcatcgtggcgccattgtcgacgcgctattgaacgggcacgacgagctgctggaaacccccgaggggcgcgtttttcaagcattccatcagcagcttcagcaagaagttgagttggaagccatgaagcaccggctccaggccatcttgcggcaccctcaagctttgtcagcgctaagcgccttgcagcaggctgacatgcgctggctggtcacccgcttggtcaaggaagcgggcgctgtgattcgcgcccgatcgcgcagcgagcgcgatgtgcgcagcttcttacgcacgaatttggcagcagaacaccaccgcgtggggcaactgctcagcgaagccttggcgcaagcgcagcggatcgattggcaagctgcagtccgacgtggcccttctccgttccctccggtggctgccccttgtggcggtttgcccttggtggatcgcttgcgctttaaatctgccgatcacgaggccctgcgggaactggatttgaagcggcagtcaggcaacatcgaagccatcgccgatgacttttggtcatcgttagacggattggaccgtgacgccttggtccgcgatacggtcgccatccttcagaccagcgatcgccacctcagtttggctgcgttggccgagcgcatcccgttgactcatgacttggaatcgttggccttgtgggtcggcatggcgcgtgaagtcggcgctccagtcggagacgactttgagcacctcaatctcaccacacgcgacgagaagaatttaaggttcacagtgccgaaaattgagctggatcctgctgcattcgcggcattcgactgggaaccctga

SEQ ID NO: 42442 - DNA, 705 bp, Xanthomonas gardneri ATCC 19865
gtgaatgaagagaacgaaccgctagacgcgacggtctctgacatcgacacggccgaatccgcgcaactcccagaaacgactgacgtcgccttggacactgcatcttcttcggtgcgcgctactttgcttgaactgatgaagtatggactgctggaagcggtcagcaagcccaacctttatcggaccgcacttctacagcgcgcggaagtgtccgacatcctgcgctggatggatttgcgcctgcgcgtggacgagattcgcggcttggcgttcctgcttgtggtcgcgcccgaggagggagaggacgaatgggcccatcccttggtccgcaggcaacgcctgacccttgagcaatcgttgcttgtagcaattttgcgccaacagttcgtggcgcatgaaatcgaagcgggcattggtgccgcaggcgcgcgcatggcgctcgaagacctggttccccacctccaagcatatctgggcgacttgggcagcgacgcacaagagcgcaaacgcctcttgaccttgctcgaacagctaaagggccatggcctcgtgtcggatgtggaccagcatgagcgcgtgaccatccgaccaatcattgtgcacttggccaatcccgagaacctgacgcagttgattcacgccctacgcgcagtcgccgacggacaggctgaatccgcctgctctgtaactgagatagatccatga

SEQ ID NO: 42443 - DNA, 564 bp, Xanthomonas gardneri ATCC 19865
atgagcacgctagccgcgccgtccctcggaagcttggtgcttacgcacctagacatctacgactggggcgccttcggcggccgtcacagcgtacccatagacgtagccggcaccgccatcatcggccccacgggcagtggcaagacaaccttggtcgatgcgctgatgaccctcctggtcgccgttccgcgctacaacctagcctcaaccggcgggcatgacagcgatcgagacttagtgtcttatgtgcgtggtgtctcgggcgccggcatcggcggtgacaccaccgataacattagccgccccggctccgtggtgacggccgtttccgcgcgtttcagcgatggggatgcagtggtacgcatcggaggggtattttggtttgacggcagtagctcggcgacgaccgacctcaagcgccgttggatcttctgtctgggtgattccacctcgcttgatgactggctcgaagcgcaccgagaaaatggcgcgcgcgccctgaaagaactggagcgcgtccacgctggtttcaaactctacgagagcaaacaaacattttcctga

SEQ ID NO: 42444 - DNA, 1470 bp, Xanthomonas gardneri ATCC 19865
atgaaagtccgcgcccgtatcgcgcgctaccgcagcctgcgcgaagacccgctgtggaaactgttggccgccgaccatgcgccggaagtgatcggtctgctacaggccttgctgctggatggagagcgtctgctgccggcagcggtgctgcacgagcggctgcagcgcctgctcgacgacatcaacgccgagcagctggcgcgcgatttgccacgcaccgcacaggcgtatgtcgcccactggctggcgcagggctggctggaacgtcgcttgcccgagggcgcgcagcaggaagagtacgagctgtctacgcaggccgcgcaggcgatccgctttgtcgacggcctggagcatagtcgcggcgcagccaccgaaagccggctggcgctggtgatgcaacagcttgcccaactcgcggcattgaccgagaccaacccggatgcgcggttgtcggcactgcgcgacgagcgcgatcgcatcgatgcggaaatcgcgcgcgtgtcggccggcaaggtcgcctcgctggacggcaagcgcgcgcttgagcgcacccggcaggtgatcgcgctggccgacgaattgaccgaagacttccgccgcgtacgcgacgacttcgaacaactcaaccggcaatttcgcgaacgcatcatcgacgacgaaggcgagcgcggcgaggtcctgacccggctgttcgaaggcgtggatgtcatcggcgacagcgaagccgggcgcagctttcaggcgttctgggcgctgctaaacgacgccgaacagagcgcacaactggatgcggcgctggagacggtgctggcacgcgcgttcgcacgcaagctcgatcgccgcgaacgcagcttcctgcgcgggctcaccggcaccatgctcgaacgcggtggccaggtgcacgatgtgatgcagcatttcgcgcgcagcctgcgcggtttcgtgcagagccgtggctatctggaacagcgccgactcaaccgcttgctcaaacaggcgcaggccgaagcgctgaacctgcgcgaacatatcccggcccagcgcctgatcggccgcagtctgatgctgaccaccagccggctgcgttcgctggcgcaatggcgcctgcacgacccgcgccagcaacaggtcgatggcagcatccaacgcaacgaggcggcggccatctcgctggacagcgtgggcgatctggtcgcgcaatcggagatcgatttccgcagcctgcggcgcgatctgttcgagctgctggacacccagccgcagctgtccatcgcccaggtgctgacccagcgccaggccacccagggcctgggcagcgtcatcggctatctgtcgctgggcacgcgtcacggcgtcgtcagcggcgatcaattcgaagtagcgcaatggcgcggcagcgacggccagtggcgtcgcgcgcgcattccgctgatctggttcacccaggagaaacgccatgaactggcatga

SEQ ID NO: 42445 - DNA, 705 bp, Xanthomonas gardneri ATCC 19865
atgaactggcatgagcacgatcccgacgccgagtccgaactcgcccacgacgctgccgagggtcagacgcctgccgtcgccagcaccggcctgttcgccggcgacactgggcaattgccggtggaggcgcgtcgcgcgctgtgtcagttgcttagtggccccagcgtggacgcgcagcggcatagccgcctgtggccggccctgctgcgcagtgaagccggcattcgcagcgccttggccgaggtgtttctggagctggtgctcgatcgcgaagccggcatcgccttcacccgccaggccgagactggcgagctggaagcgccggtactgctgcgctcttcgccgctgaccttcatcgactcggtgctgctgctgcacctgcgccagcaactggccgaagccgatgcgcgcggtgtccgtgcagtggtggaagaagcggccttgggcgaggcgctggccgtctacgaaaaaaacctgtccaccgatcgcgccggcttcctgcgccgggtggccacggcggtgcagaagatgaaggacaaccatgtcctgacccgtctgcgcggcgaagacgcacgctatgaaatctcgccagcgctcaaactgctgttctcggccgaagatgtcgccgccctggggcaggtctatcgccagttgcgcgatggcccggccggcggcgaggacgaggccgatcccgcgcacgcctag

SEQ ID NO: 42446 - DNA, 3393 bp, Xanthomonas gardneri ATCC 19865
atgacctcctctgccgcgccttccagcctgttcgccaacgatttgcccgacgcgcgcctgcagcagttccgtatgcgccgcctgcaggtgcacaactggggcacgttctccggattgaccgaggtgccgatcgccgaacgcggttttttgttcgtcggccgctccggctcgggcaaatccacgctgctcgatgcgatgtcggccttgctcaccccgcccagcatcgtcgacttcaacgccgccgcacgcgaggccgaacgtagtggccgcgaccgcaacctggtgtcgtacgtgcgcggcgcctgggccgaccagcaggacagcgcctcgggcgaaatcgccacgcaatatctgcgcaaaggcgccacctggaccgcactggtgctggaataccgcaacggcgaggaccgcgtggtcagcctggtgcggctgttctggatcgccggcaacagcgcggccaccggcgacgtgcgcaagcactacatggtggccgagcgtgccttcgatgtggcgcaggacctggcgggcttcgatctggatctgcgcaagctcaagcagcgcctgcacgatgtgcatcacttcgacagctttgccggctacgccgagcgttttcgccaccagttgggcatcggcaacgagatggcgttgcgcctgctgcacaagacccaatcggcgaagaatctgggcgatctcaacgccttcctgcgcggcttcatgctggaagaacccaagaccttcgatgcggccgaacgcctggtcggcgacttcgccgaactcgacggcgcccatcatgcggtggtgacggcgcggcgccaggtggaaaccttgctgcctgcgcgcgcgcatcacgccgagctgatgcaactgcgccgccagcgcagcgagctggaagaactcaagctcggcatcgacgcctaccgcgagcagcgccggctcgccttgctggacgcgcgcctgcaggaactggacgtgcaagaccgcggccttgccggcgaagaaggccagcgccgcgcagcactggataaccacacgcgccatctggacgatctggaagcgcagcggcgcgcgcaaggcggcgagcgcatcgatgcgctggagcgcgaacagggccagctgcaggccgagcgcgaccgccgcgcggccaagcgggcccaggcagagcaagcctgccgtgcactggagcaggccctggccgacagcgcgcacggctttgccgaacaggtcgcgcaggcgcgcgcggcgctggaagatggccagcgcgccgccgccgagctcgatgaagcgatcagcgagcgcatcgcaggcaagcacgacgacagcaaacgctttgccgaagtgcgtgccgagatcgaggcgttgacgcgcaacccctccaatattcctgcgccgatgcagagcctgcgcgcgcgcatgagcgccgacaccggcgtgccggaggcggcgctgccgttcgtcggcgaactgatccaggtgcgcgaggaagcatccacctggcgcggcgccatcgagcgcgtgctgcatggctttgcgcaatcgctgctggtggacgagcggcattacgccgaggtcgccgactgggtcaaccgcacccagctcggcacgcgtctggtctattaccgcgtgcgtcacaacgagcaggcactgagcggccgcgaacccggcagcgcctcgctgctgcacaagctggagctgcgcgatcatccgtttgccggctggttgcggcgcgagctgggcaagcgcttcgattacgactgcgtggactcagccaaggccctgcgccatgccgaacgcgcgatcacccgcgaaggccaggtcaagcatccgggcgaacgttacgaaaaggacgaccgccacgcggtgggcgaccgccgccgctggctgctgggcttcaacaaccgcgacaagctggccttgttcgagcgcgaaggccaggagctggcgcaacgcatcgccgcctgcgatgccgaggtggccgacctgcgtgcgcgccgcgaacgcgatgggcagcgacgcctggcccgcaacaccctggccaatctgggctgggacgaaatcgatgtggccgccgcgctgcagcgcctgagccagatcgccgagaccttgcaacagctgcgcgaaggcgacgccaacctgcgcgcgctgggcgaggcgatcgaccgtacacgtgccgacatcgcccaggccacgcgtacctacgagggcgtgcgcaccgagcggatcacgctgggcgccgaacgtacccgtctggaaaaacagcatctggaatgcgccgatgcgcatgcgcgcctggtcacgccgttgcagcagcagggcctggccgagcgcttgctcagcctgggcgagttgagcctggataacctgcaggaccgcttccgcacgctagagcgtggcctggacgcgcagcttggcgtcagcaaggacgaactgacccgcctgcagcaggccttgatcggatgtttccgccgctacttccagcaatggccggaagacagcggcgatctgagtccgacgttggaaggcgctgacgattttctcgcccgcctgcagcggctggaacgcgatggactgccgcagcacgaggcgcgctttttcgaactgctgcaaagccagagcaagaacaacctgctcgccttgcaacgccacactgccgaagcgcgcaagtccatcgcccagcgtctggatgaggtcaatgccagcctggaacaggtgccgtttaatcacggcaccttgctgaccatcgaattgagcgaccgtcgcctgccggaagtgatcgagtttcatcaacgcctgcgcgatgtgctcggccatcaccagaccgaacagcgcgaggtggccgaacaacaatttgcggtgctgcgcgaactggtgcgcaagctgggctcggccgaaggcgaggacaagcgctggcgcgagctggtgctggacgtgcgcctgcatgtggagttcgtcggcgtcgaactggacgcagccacgcggcaacaggtcgagatttaccgcagcggcgcgggcaaatcgggcggtcagcgtcagaaactggcaaccacctgtctggccgctgccttgcgctaccagctcggcggcgaagacggcgaactgccgcgctattgcgccgtggtgctggacgaagccttcgacaaggccgacaacgaattcactgcgctggcgatgaatatcttcgaaaatttcggcttccagatggtggtggccacgccgttgaaatcggtgatgacgctggagccgttcatcggtggcgcgtgctttgtcgagatcagcgggcgacacgattcgggcgtgttgctgatcgaatacgacgaacaatcgcgccggctcaagctgcccgagcgcacccgcagtgcggcggccaacaccactgcggtggccgagcaggagtga

SEQ ID NO: 42447 - DNA, 1182 bp, Xanthomonas gardneri ATCC 19865
atggcgcgcgccgattgcatgctgttgccagctgccgcactgcaggcattgcgcgggcaatggcaacgccagcgtggcgactggttgatcggcgcatcggcgcccaggcccatcgccctgcagccacccacccaggcgcaggccagcgcccgcttcgatgccttcggcgactggctgcgcagctggcagcgcgtcgacttgccggggcgggtggagtaccgcgatgtgctgtggtcgcagctggggccgcaacggctgccgcagacctgggtggtcgagacaccggccgatgcggcggcagcactgcaggagcacgaccgttggcaacgcgccagcgcgcgctgcgccagcttgcaggcgcactggccggaggctgcgggattggcggcgcgcttgcggcgccagttcgatctgctcgccgacagcacgcaggccgatatcgaccggctggttgccgtggtcgactggctgcatcgtcaccgcgacagcggcctgttcctgcgccagcttcccattgccggcatcgacagcaaatgggtgcacacgcgtcgcggcatcatcgccgactggctgggcgggctgcgtggcatcgccgagccgcgcagcttcgacagcctcgccggcctgcgcagcgcaccggatcgggtgcgcttgcgactgctggatccggcgctgcgccgtcagctcggcggcctggacgatctgagcgtgccgatcgaacagctggccgcgctgcggttgccgatcgaacgcgtgctgattgtcgagaatctcgacaccggcctggcctgcgaagcgttgccgggcacggcgctgctgatggcgcgcgggtatgccgtcgactacgtgcgcaacatcgagtggctgcgcacgcttccgttgttctattggggcgacatcgatacgcacgggctggcgatcctgcaccgactgcgcacgcatgcgccgcagaccgtggcgctgctgatggaccaggccacgctgctcgccacgccgcgtgccatgtgggggcacgaaccccgacaacatcgcgcccaccggctcgccgcgctgacgccggacgagcagctgttttatgcgcgattgcgcagtggacacttcggcgccgcaccgcggctcgaacaggagcgcatcgcctggagtcaggcatggccgcagatccaggcggcgttgcgcggctag

SEQ ID NO: 42448 - DNA, 1458 bp, Capnocytophaga sp. oral taxon 338 str. F0234
atggaaagccctacccaacaactaatagatatacttatgacctctcccagtgtggagttgctcaagtctaagaatagggtgcctatgcttacttttttcatagagacctttacggaagatcataaggtactggctcaagaggtgctttttcagcagttatcagactttattgaaacccaacacttggaagaggaggaaagtgaggttacctttgaggtgctttttgaagaaaaggcaaagaattatgtacgcaattggctcagtaaaggctttttgactaattatcaggatgagcagggggaggtgtattatgaactttcctcccattcggttaaggtaattgattggctttcgtctctgaagaaggaggagtatatagggacagaatccaagttcagtagtatctttcatcagctcaaggaattggtggaatttaccaatgaggacaggcaggagcgtcttctgttgctggagcggcgcagagatgcactacaggagcagatagataagctcaagcgaggggaagaggtgcaggtatatgaggaatatcagatagttccccgctttaaccagctcactcagcaggctaaggaactgctatcggacttcaaggaggtggaggataatttcaaggaaattaccaaggaaatctatcagaagcattcgggagagcagaccaaggatgccatattggaatttacctttgatgccttagaccagctcaagaatagcccacaaggaaaaagtttttatgccttctttgcgtttttggtcagccgacagttgcaagaggaatgggaattcctaaccaagaaactttatgaaactctacaggaaaaggatattcccataagagattatttcctaaagggaatgagaggacacttatacctcttgagcaggcgcgtagataaggctaatgacaaaatggccgagaagctcagccgtatcattcgagaaaatgataccatagataaccaagctaccaaacagactataagagagattaaggactatctcataagtctgagcagaagacagttgaaacccgacgtgtcctttgaaatagagagagatgtttatattcgaatcccttttgacaggcgacttacctaccaaaagaaagaacaaggaacttacaaagagcgctttgaaaatgcagatactaccctttctgatgtgacacaactcggtaagctattttcagataagattatagataaagagatcctgagagaaaatatctgctctgtactacagcagcgaggacaagtttctttgacagagcttatcaatgcacaaggaggactaaagaaaggcttgacggagcttatagcctattttagtgtagccaccgaatacaaacatgtgattaatgagggaaaaatgcaggatattatctttgatatccctaaccaaaaacggatccaattccctgaaataattatctcattatga

SEQ ID NO: 42449 - DNA, 579 bp, Capnocytophaga sp. oral taxon 338 str. F0234
atgaaaaagttagaagaagtaagagaaaactacagccaagcaattgtcaaattgctcaaaggaactgttgataaggaatcagaggtatgggaggatattcttttttatcagacagaaatacaagattatatacagaccataggtttggaattggttgtaagaaaagaggaaggatttgcttttgtaaaacaattggaggacgaacagggtaataccttaggcttagtcagaagactctctatggggtttgagaactctgtagtactggtggtactcaggcaactattagaggattttgataacaatcctactgattttcaatcttttgaaaaaattatctcccattccgagatcaaggaagaggtgagtctttttcttcaagagggctataacaaggtaaagttctcaaaggatatagacaagtgtatcaaggatatagaggattggggcttccttaaaagagtcaattctaaggaagacacacgttaccagatacatagaatcataaagcaaaagattaccttggatatactggaggagtttaaacaaaaattatcgggctatgtgggaactatttag

SEQ ID NO: 42450 - DNA, 3399 bp, Capnocytophaga sp. oral taxon 338 str. F0234
atgtgggaactatttagcaccaattcagatacagcaggttttcggctgcaatatatggaggtactcaactgggggactttccacaaggaaattgtaaggatagccccccaagggaacaattccttgctcacgggcgctaatgcatctgggaaaagtactttcatagatgcgctcctgacccttctggtgcccatgcacaacaagcgattctataaccaatcttcgggggtagaaaggcgaggagatcgtaccgaagagtcctatgtattaggctactatggaaatatactcaaggaaggttcttcctccacaacaacccaaatgcttagggagaagcagaatacttactctatcatattagcttctttctcaagtactacccagcagacagtaacactgtttcaactgcgttggttcagtggaacagagcttaaaaaaaattatggcatagcccatcttcaattggaaattgctaaagactttcctaagtttgatagcggaggagactggaaaaagctgttggatgctaagtataactatgacaaatccaagcgtaagcaagtggagtttttctctggacctaaggactatcagagtgctatgtgctctctctttggtatgcgttcggagaatgctttttccttatttaaccaaatggtaggggtgaaggtcttggacgatttggacgacttcatctctacccatatgctggaggagcgaaatacagaagagacatacaaagaactcagaacgagcttctttaccctgacagaggctaatgataatatagaaaaagccaaactacaagtggaatggctcacccctatctgtcaggatatagaagccttacaacaagccacccagcagggcaaggagctagtacagctacaatccgagagtgtgtatgggttcgccaaaaagtatgtaagtctcgccacagacgagatagctgaacaaacagctcttttggaagaagtaaggcagcgcaatgctacactgcaaaaagaagcagaagccctaagtgttaggtacgcagatttagaacaagatatttgcaatgatgcagtgggtaagcagatagaaatgctcaagaaagaaaagcgagaaaacctatcggccaaggaggaacgtatgagtaatgctgagcaatataacaagattgtagcttctttggggctaatgacagatcctgatgaggagacttttaagacaaacagaacagaagctcagcttttattcaagggagtccatacagaggagctgttacaagaggataatatccgaaaactgaccaacgaaaatgaggaaatagcccagcagatggacgctttgagagaaaatatagacatgttgcgcaaaaataagaataatatttcgggtcgagaggcaactatacgagacgaaatcctcttagcagtaggggctactaaggaggaaatcccttttattggcgagcttataagggtaaaagaagcagaaagtgcttgggagtatgtcatagagaaagttctgcaccaaactgctctgcacttagtggtgcctcctaaattctattctaaggtcaatgcgtatgtcaatacacacaacctcaaaggacgtatccgctactataagtatgagcagcctgctcctaaaatattccaaatgccacaaaaggaacagcgactgctgataaataagatagagataaagcctaagcatccttattccctatgggtcgaatatcttatagagaaccagcataactttgtctgtgtggaggaattgagcgaatttgaacaatttgttgaaatggcactcacacccaaagggttggtaaagtatcgcaagggcaagcatgaaaaggacgacagagaggctatggcaaagcgtagtaattatgtcttgggttgggacaataaggagaagctcagcgaactctccaaggaacttgtgcgcctacaggagacaaaaaagaagaatgacactactctgaagacgttacaactcaagagagaggagctcaggagcaggcaatttattattagtaacttaaacgataaattcaccaagtttgacactatcaactggcaggtctatgccctgaaaattcaagaattagagacggctatagaccaattggagcagacgaacaatcgcatcaaagcacttggagaacaacttaggaaggtcaaagaagagcaagctgctcttaaagcaacgatcaaggaagaggagaaaaaagagttcgtcatagaacaggcaataactaatattacagagaagaagcaacaacatcaggatattttggaaacaaacccagaggtggatacagcgttgtttgtggacaaatattctcatttgttggagttgtcttatgctaatatagagacatataggcaagcctttgcctcagaactcgccaagcaaatagagcagaataagcaattgattaataagaaagaaatggagatcaccagagcgactgctaagttcaggaacccaccagccgcaattatagagaaattcaaggattgggcagccgatgtgtatccattgcctgaaaaaacagaccccgtacttttgacagagtaccagcattatttggacaaacttaagaaggataacctacctaagtatgaaaaaaagttccgagactacctacatgagacgaccattcacaaaatgggaagttttgctactttctttgacagttgggcagaagagatacgagaaaatattcgtcagctcaatgaatcactcaaagaaataaacttcaatacccagcccgatacttatatacagctggtacatttccaaagagaaagcaaagatgttgccgaatttaaggatttactcaggcgtgcaagggtcaatatcaatgagttttctaaccaagaagatggccgtagattgcactttgaacaacatatagcccccttcatcaagcggttagaaaatgaaacttggcgcaagagggtactggatgtacgccagtggtttagctataaagctgaggaatcttttagagagacgggcactaaggccaaaacttacgagcgtatggggcagctctcaggtggggagaaggcacagctcacttatacaattttgggttctgccttggcctatcagtttggtatgctcaaggacggaatgcagggtaattctttccgctttatcgctatagatgaggcctttaaagcacaggacgaggagcgtgcatactacctcatcaccctctgtcgccagctacacctgcaattgctggtggtaactcctagtgataatattcatatagtggagaatgatattgcttttgtacattttgtctctcgtgccaagaataagacctcacacttgatcaatatgcctatagaacaattcaaggctgaacgggaaaaatactttcaatcatga

SEQ ID NO: 42451 - DNA, 1161 bp, Capnocytophaga sp. oral taxon 338 str. F0234
atgataatccctgaggaaatacgtaaaaaagccacccaaaagtatctgccttatctctctgatatagcggctgatattccttttacacctattgagatacggggggataagacctataccaagaatgatttttcggattttgctcaccaaatagaaagccttaacagtcaggccaaatcacacaaaggctttggctataccgtggattataagagaacacgtaccaagtacttaggtgagcaggatatacctgtgagtatctactttgggacggaagaggatttccttcgattcctttccaaagaaaaggaagttgccaaattcagagaaaatatagcccttattacctcaatttttcctcaactaaccccatggatacagaagaatccaaagaaagtagtgcaatatgagacagaatggacggatattctgaaggtctgtagctattttaaagaaaatcctcatcctaattgctatattagagaactacccatagcggtacacaccaagtttgtagagcaacacaagggcatacttcaggaattgctcaatatactgctggctgatactcttgaggcgggagctacccactttgaacaacgctttcacctcaaggacaaagagccattggtacgttttcgtatcttggatcaggatatagctgatgcctattttcaaggaatagatgatatggccattcctatttctcacttcaatcgtttggatatccctgtagagcgtatttggattgtagagaacaaaacatcgctctataccacccttgcttttccagctatggagaggagtatcgctatttttgggagtggctatggggtggctgcacttaaggaagccagctggcttgccactaaaaagctctactattggggggatatagatgctcaaggctttgaaattctctcccaatttcgtacttatttcccttcagtagagagttttcttatggacgaggctacatttgagcatttctatgaggcatacgagggcactccttcgcctattacggtggaactgaggcttacccctgaggaaaaagctctttatgaaagggttaaaaccgaaaatctccgtttggaacaggagaaaatcccacaagattggttactacaaactttggtacttataactacctatttgtaa

SEQ ID NO: 42452 - DNA, 1509 bp, Nocardioidaceae bacterium Broad-1
atgagtgacactcgcgtcgaggcggcgtacgccggggctctggccgccttcaggaacccgatgctcgacctcctgcacggccggttcgcgccgttcgtggtggcggtgctctcggtgaccttcacctccgagcgggccgcggtcccggtggtggacgcgcacgccgagatcggcgacatgctcgaccggctccgggccaccggccacgccgagggcgagggcggcgaggtcatgctcccggtcggcacggcgcgcgacctgtgccgccagtgggtgcgggccgggtggctgctgcgccagatcgagggcgaggacgaggtctaccggctctccgcccacgcggtgggcgccctggagatcgccggcagggcgagcggctcgcgcgcccgggtctcggagtcgcgggtccggacgctgctggaggcggtcgagcggctcgcccaggacgccgaccccgacgtgctgacgcgggtggcccggctgaccgaggagatcgccgagcgccgcgccgagatcgcccgcctggaccgcaccggcgtggtcgacaccgtggatgacgacaccctgctcgagcaggccgagaacatcctccatctgacccgcgagctcccggccgacttcgcgcgcgtggtcgagtcgatccgggcgatgcagcgcgacgtggtgaccgacctgcgccaggacgtacgcccggccggcgaggtgctgcgtgagtacctgcagcgcggcaaggacgtgatggcctcgacgcccgagggcaaggcgttcgccggtgcgctgcggatgatcggcgacccgcgccgtctcgacgacctggccaccaacctgcgtacggtgctgcggcatcggttcacgaaggagatggggccgaccgagcgggccgagctcgccgcggtcggacggcggatcgagaccggtgtcgccgaggtgctggccgcccagcagaccgcctcccacgtgatcaccacccaggtgcgtacgcacgaccccgcccgcgaccggcaggtcgacgacctgctgcgcgatgtcatggtcggcttccaggcctggatgccgacctcgcggcccgccgaggccatcgagccgctgcgccggctgccgctcgccgacctgggccacctgcgccagtcggtcagcgagctgcgcccgcccgagccgccggcgccgttggccgaatggggcgacgtggagagcgccgtcgaggacaccaaggcgtggggcgggccgggataccgggcgatcgaggcccacctggacgcctatgtggcggccgccgaggggccggtcgacctggccgaggtcttcgcggcagcgccggaggagatcaggcgaccggtcgacctgctcgggcttctcgagatcgcccaccgtcgcgggatggccgagacgggggagatctccaccatcgaggcggtccgggccgacggggtgcggcgcaggttcgcgttcggcggggtgaggctcggcccgatgacggcggaagacggcgaaggggatgacgatgagtga

SEQ ID NO: 42453 - DNA, 741 bp, Nocardioidaceae bacterium Broad-1
gtgacggacgtggcctacggcagcgagccggagggcttcatcgagccggtctcgatggaggacgacccgaccgagctcttcgtcggcgaccgcggtgtcctggacgccgacgtacgccgggtgctggtccagctcctgcggcggcggttcatcaccgcggagcggagcccgcgccagtggcgtacgctgctcgaccaccaggcggttatcgagtcgcggctccacgacctgttcgtccggctcgtggtcgaccacgaccgcgggatcgcctacaagcgccaggtgcgctcggaggagctcgacgtgccggtgctcctcaaggacgacgcctactcgcgagccgagacgctcgtgctcgtccatctgcgcaccgtcttccagcgcgagcggggtgcggggcagagctcagcgcgcgtggacgccgacgagctggagcagaccgtgctcacctacttcgacatcgccagcggcgacgcggccccgcgccgcgagatccgccgggccgtcgagcggctcgcccgcgaggggctcctggaggaggagtccgaggatcgctaccggatcacgccgctggtcgagatcgtgctgagcgtcgagaagctgaccgagctcaaggcgtggctcaaggacccgacgggtacgacccgggtcgaggtcgccggcgaggccgaggagcctgacgacgctgacgatctggatgacccgaagagcggcgacgaggcggaggagaccgagcggtga

SEQ ID NO: 42454 - DNA, 3363 bp, Nocardioidaceae bacterium Broad-1
gtgaacatgatcgacagcctcttcggcctcatcccggagcgctcgaccgggcggcagtgggtcgcgagcgagctccagctggtcaactggggtggctacgacggcgcccaccgggtgcgtttctcgccgaccgcgacgctgctgaccggaggctccgggtcgggcaagtcgaccctgatggacgcctacatcgccctgatcatgccgcacacgacgccgttcaacggcgcctccaacggcggcgtcgtgggtcggccgcggggtcaggaccagcgcaacatcctctcctacgcgcgcggcaagatcgacgaggcgaagaccgccgagggcaccaagatccgggtgctgcgcggcgacggccgcgacacctggtcggcgatcgcgatgacctgggccgaccagaccggcgcccgcttcaccgcggtccgtgcctggtacgtccccgcctccgccaagaacctcgacgacgtgaccaagctccgtgccgtggccgaggcgggcttcgacgtacgcgatctggagccggtcgcggctcaccggttcacccgcaccgcggtctccgaggtgggcctgaccccgatcgacaccgaccgagacttcaccgcccggatccactcgtcgctcgggatcggtgctgccggcgacggcgagaaggcggtcaacctcctcggccggatccaggcgggccagcagatcaccacggtcgacgacctctacaagaagatggtgctcgaggagcccgagaccatcgccaccgccgacggcgtcgtcgcccacttcgacgagctctccgcgacccgcgaccggatggtcaccgcgcagcagcaggtgcgtgcgctgacgccgatccgggagctccgtgtcgccatggaggatgccgcctcccggctggaggtcatcgacgggatcggtgccttcggcgacgagacgacccccgccggactgtggcgggcgggcaagcgggtcgacctgctcagcgagctcgagtccgacctcagctcccgcaggaatgccgcggagaaggcggtggccgagaagcaggcgctgatcgacgccgccgagtccgagcgtgacggcctggcggtcacggtcgcggcctccggcggccgccgcctggaggaggccacccgcgagatcaagtccgccgagagccgcgccgaccaggtacgccgcgcccgcgaggcgctcgaggccgagctcacgatcctcggcacctcggtgaccacccaggccgagttcgagaccctccaggcgaccgcccgggatgccctggtcgacgacgacgcccgcaccaccgccctcaacgcgtacgccgccgcgcggtccgccgaggccgaggcgatcaagctggtcggccggctcgagggcgagctcgcagatgccgagaagacgaagaacaacatccccgagccgctgcgcgcggcccgtgcggtgctggccgaagcggccggactgagcccggccgagatgccgttcgtgggcgagctggtcgaggtgcgcaccgagcacgaggcttggcgcgaggcgttcaacctggcgctcggcggcttcgcgaccaccatgctcgtcgacgcggcgcacgtcggcgcgttccgggcggcgatcgactcggtgcggcagcgcacccggatccgctacgaggcggtccccaccgggacgaaggacaccacgatcctcgacgagggcaccctgccggggcgcctcgactaccgccgcggcgtgttcaccggctggctcaagaagcgactggccgaacggcacggctacgtctgcgtgcagacccccgcgctgctcggccagcaccggatggcactgaccgtgaccggccaggtctcacaggggtcgcgcggtgctcacggtggccagggcggcggcaacgtgctcggcttcaccaacacccggcgcgtcgccgaggtcaccgaggtgctcgagaccgcccgtcgcgatgccgagaaggcgcggacggcggtcggagaggccgagcgggccatcaaggagctcgatctgcggcgtacgtccttcaaggcggtctccgccctgacctgggaccaggtcgacgtcaccggggccgaggccgagcgcgaccggtgggccgcggtgatcgaggaggtcaccgccgacaacccggagatcgccacgctccagaagcggctgaaggaggcgcgggccaaggtcgacacgctgcgcgagggcatcggcgccgccaagagcgcgttcaaggagctcgacgcgcgctggagcgacgtggtcgagcaggtcgaccgcgccaaggacgcgctggaggaggcggctgcctccggcaccgagatcgccccggcccaggccgactacctcgagcagctcttcaaggcggccggcggtgaagcggccggccggcgcgaggacgcactcgccgagctcgacgcggtcttcgcccgcgcgggcgagagcctcgacgccgaccgtgtcggcgcgcaggagacgatcggtgccgcccgcgtgcagctccagcagaccttcgagtccttcctcgagcgctggcccaaccccaacctccacaccgacccggacgcctcctacgccgacttcgaccgcctcctcgacgagctgcagaccagcggcctgcacgagctcgaggtcgagtggcgcgactcgctgctcaacctgtcgggcaacgacctgaccaacctcgactcgaccctgtcgcgggccgtgcgcgagatccgcgaccggatcgacccgatcaaccagatcctcgccgagctgccgttcaacgacgactaccatcggctgcggatcgacacccaggagggccagtcggccgtccgtggccgcttccgcaaggagctccgcgcggtgcgcgacctgatcgagagggcctcgaccaacgagacccgggagcaggcctacacccggatgtcgcgactcatcgaccggatgcgccgcaccgccccagacttcgccgacctgatcgacgtacgcaaccacgtccgcgtgagcgccgagaaggtcaccgccgacaccggtgagcacgtcgccctctacgaccacatcggcgagaagtccgggggcgagtcgcaggagctggtcgccttcatcgtcggcgccgcgctgcgctaccagctcggcgacgccggcgccgagcgaccgcgctacgcaccggtcttcctcgacgaggcgctgatcaaggccgacgcccgcttcaccggccgcgcgatcggcgcctggcggggtctgggcttccagctcatcatcggcgcgccgaacgacaagcacagcgccatcgagccgcacgtcgacgtgcagtacaccgtgctcaaggacgccgagggccactcgttcccgaagctcgaggtcggcctcgaggagatcccggccggctga

SEQ ID NO: 42455 - DNA, 1491 bp, Gordonia neofelifaecis NRRL B-59395
gtgcaattcgacgagatcgtcgccgtacggaagagcaatgcggcgtggcgcctgctgcgggcggacaacgcgccgctgctgctgtcgttcctcgggcgggtcttcgtcgacgacaacgtccgcgagatctccgagtccgcgctggtcaacctgctcgacgacgagctgtactcactgaacaagcgactcggcgagggcacgtatccacgctcgccgaaggcatatctggacgagtggtcggccccggacaccggatggctgcgcaagtactacgtcatcgagagcgacgaaccgcactatgacgccacccccgcggtggagcgcgccgtcgcctgggtgcggtccctgcgcgaccgcgggttcgtcggcaccgagtcccgtctcaagaccgtcctggaactgctgcggcagatcgtctacggcacgaccaccgactccgaacgacgactggccgatctgcaccggagacgagctgagatcgacgccgagatcgaggccgccgaacgcggcgagttccaggtcctcgacgagaccagccgccgcgaccgttaccagcagttcgccgacatcgcccgcgcgctcctgtccgacttccgcgaggtcgagtcgaacttccgcaccctcgaccgggagatgcgcgaacgcatcgccacctggcgcggtaccaagggcgagctcctcgacgagatcgtcgggagccgcaacatcatcagcgactccgatcagggtcgcagcttccaggccttctacgacctcctgctctccgccgaccggctcgacgagctcgacgacctcgtccgacacgcgcagtcgctcgacgacgtcgccgactccgacctccggctcaccaacatccaccacgactggctcgacgccggcacccgcgcgcagggcaccgtgcggagactgtcggagcagctccgtcgcttcctcgacgaccaggcgtggctcgagaaccgccgcgtgatggacctgctgcggagcatcgaatcgaccgcctaccaggtgcgcgaccgacgggtcgacgacttcgcacatgagatcgactcgccgaccccgagcgtccacctcccgctcgagcgcccgctctaccgcccgacgacatcggtcgaggtcgccagcgacggcatcgaggagggcgaggcccagggcgcatccgaggcgctgttcgagcagatccacgtcgaccccgcgcccctcatcgacagtgtgcggcacgtcttgcgcagacgcgaccagatcactctcgcggaagtggtggccgagcggccgatcgagcagggtctggccgagctgatcacctatctgtcgctgaccgacgagagcttcaccaaggtcttcgacgaacaggcccacgagtcggtgagctgggtcgacgacgccggcgcgcagcgcaccgcccgggttccacgggtcatctacacccgacccggctcgccgcaaaccacgaccgccgccccgacccccgccaccaccgacgaggagaactga

SEQ ID NO: 42456 - DNA, 600 bp, Gordonia neofelifaecis NRRL B-59395
atgagccgcccggtgccccgcgacgagctgaacctgccgctcgcggtcacgtcgctgatgcgaggcgtcgtctaccgcgacaccgccgagaccacctggcgtcacgtgctcggcctgaccgcacaggtcagcgactacgtcgcgacgctcggtctggtggtggtcatcgacgaggccgagggctacgcgttccttcggtccaagagcgacgacgaactcgccgacctcggcatcccgcgcctcgtcgcccggcatcaactgccgctgcacacctcgttgctgctggcgctgctacgcaagaagctcgccgagcacgacaccaccgacgcgggcaaccggctggtcctcaccagcgagcagctccgcgagatgatcgggccgttcttccccgcctcgaccaacgaggcacgcaccgccgaccaggccgacgccgccgtccgccgcgtgaccgacctcggcttcctccgtcgcatgcccgggcaggacggcgagtacgaggtgcgccgcgtcatcaaggcgtacgtcgacgcgcaatggctgtcggacctggacgtgcacctggccgaatacgcggagatctcccgggaggaacgacgatga

SEQ ID NO: 42457 - DNA, 3420 bp, Gordonia neofelifaecis NRRL B-59395
atgaccggactgttcgcacccaccgagttggagaacgagggctcggcgcgctcgggcttccggctccagcgcttccaggtcctcaactggggaacgttcgaccagcgcgtctggacactcgtgctcgacggcgagaacgggctgctcaccggcgacatcggctccggcaaatcgaccctcgtcgacgccctgaccacgctgctgctgcccgcccaccgcgtcgcctacaacaaggccgcgggcggtgagtcccgcgagcgcgacctgcgctcgtacgtgctcggctactacaagtccgagcgcaacgaggtcaccggcgcgtcgcggccggtggcgctgcgcggcatgtcgaactactcggtgatcctcggcgtcttcgccaatgagggctacgacgagacggtgaccctcgcgcaggtcttctcgatgcggcacgacagcggtcagcccgagcggttcttcaccgtcaccgaccgggccctcgacatcgccaccgatttcgccgacttcggctccgacctccgcgccctgcgcaaacggctgcgcgacggcgagacccgcatccacgagcactttccggagtacggccgggactaccgccgctcgctcgcgatccggtccgagcaggcgatggaactgttccaccagacggtctcgatgaaagccgtcggcaacctcaacgacttcgtgcgcgaccacatgctcgagcccttcgactccaccgggtgggtcgacacgatggtctctcatttcgaggatctgaccgccgcgcacgacgccgtcgtcctggcccgcgcccagctcagcgagctggagccgctgctggccgaccacgaccgctaccgcagccacaccgacatggccgccgagctcaaggatcggcgcgccgctctgcgctactacttcgcgcagcagcgctacgacctcctcgagtcggagctggagactcacaacagcgatctcgccgccacccgcaccgcgctggcgaccgtcgaccgcgatctcgccgacctgcggatcagccagcgcgaactggaactccgacaggccggactcggcggcaccgacatcgccacactcgaacatcagatcgccgagtccggccgccagcgcgaagagcgggccgctgccttcgatcgctacgcgcggatgatcgacgacgcgggtctggctccggtcgccgaccgcgggcagttcgagcagcgacgcaccgaggtctccgacgccgtcgccgccctggacgccgaggccgccgaggtcgagaacgcgatgaccgaggtccggttcagcaagcgcgaactcgacggcgaggggcgacgcgtcgcgggcgagatcgccagcctccgcggccgcgccagcaacatccccgagcgcaacctccgcatccgcgaactgatctgcgaaggcgtcggactaccccacgacgagctgccgttcgtcggcgagctgatcggcgtccgcgaggacgagagccgctgggagggtgccgccgagcgcgtcctccgcggcttcggactgtcgctgctcgtcgcggccgacctgtacgacgacgtctcgtcatggatcgacgccaaccatctcggcgggcgcgtcgtctacttcaaggtctccgatcacgtctcgtcgaagggcgtgcagacgccgccgtcgaacgccttggcgcacaagatcgacatcaaggagggccgcttcgaggcctggctcgaacgccgcctgttcgagcgcgcacggcacatctgcgccgagacgctcggcgagttccgcgccgccgagcacgccgtcaccgtcaacggtcaggtgcgctccggcggcgggcggcacgagaaggacgactcccagcgcgtcgacgaccgtcgcaacttcgtgctcggctggagcaacgaacagaagatcggcgccctcttcaccaccggccagcgcgtgcaggaggaactgaatcgggtcgacgccgagatcgacgagctcgaggaccgtcgtcgcgcgctgatggcccggcgcaacgccctgaccgggctcgacgcgtacccgagcttcgacgcgatcgactggatgagctctgcctcgcggatcgccgagctgaccgagcgcaagaccgagttggagcagtcgtcgacggagctggccgaggtcaccgagctgatcgcggccacccgcgagcagctgggcgccctcgatgcgacgcgagacggtttgcgcgacaaggtgtcccgcttggagatggtgcgaacccagggtgagcaggcgcgcaccgccgcgcgagagatcgtcaccgaggccgagttcgccgacgcggagccgcatttcgccgcgatcacgacggcggtggacgactaccgcgcgaaggtgagcgatggcgaggcgcaggccctgacggtcgccgagtgcagcgagttggagtcgtcgatgaccgagcgactcaccgacgagtccgagcagcacaccggacgggctggcacctacgagacccgcacggtgaaccggatgtcggagttcaatcgcaatcatcccgtcctggccaccgagttcgatgcggacatcgcctccgccgacgagtaccgcgagctgcatcgtcgtctcgccgaggacgacctgccgcgcttcgagaccgagttcaagacgtatctgaacaccaatgcgatccgcgacatcgcgatcttcgccgcgaagctgaacaaagaggtccaccagatccagtcgaagatcgacacgatcaacgaatcgctcgccgggatcgagtacaacccgggccggtacatccggctcgacgtgaatccgacggcggcgcaggacatccgcgagttccgtgcccacctccggcagtgcagcgacggctcgttcgaggccgacaccgacgaccattacgccgaggacaagttcctgctggtgaaggagctggtcgagcgcttccgcggccgcgagggcttcaccgacctggaccgcaagtggaccgagcaggtcaccgatgttcgcaactgggtcaccttcgccgcctccgagcggtacatcgacggcgacgccgagtacgagaactacaccgactccgacggcaagtccggcggacagaaggagaaactcgcctacacgatcctcgccgcgtcgctggcctaccagttcgacctcaagtggggtgcgacgatgtcgcgcgacttccggttcgtcgtcatcgacgaggccttcggccgcggttcggacgactccgcccgttacgccctctccctcttcgcccgtctgggtctgcagctgctgatcgtcaccccgctgacgaagatctacacgatcgaaccgttcgtctccgccgtgggctacgtcgagaaccgcggcggcagctactcgcagctccagtgcctcacgatcgaggagtaccgagagaagcgcgccctgcgcgacatggtgcaggaggtcggctcccccgctggttga

SEQ ID NO: 42458 - DNA, 1392 bp, Marinomonas mediterranea MMB-1
atgctttttactcatttaccgggcgaaatctttcaagcgctttctgggtccaataaagggcttatcgaggccgtcttatttgatttgtccgatgtattttatgatcacgcagaagatccaattaaagaaaaatctgccatcatcgaatcaattgaggacacactacataagctcgatacgttagcgtggcatgatgagcataaggaagggtttgagtcgccaaaaacaatccatgactatgcgctaagaatctatcaccgtttggtgaatacgggatggctaatcgaggagcaagaactctatcgagtcagtgtattaatgtctcctcaggtctcaatgttacttagatctcttgtcgaaataagtcgccatggtaaacgaaactatggcgctaccgtgttgagtatattgagcaaccttgaatcggtagttaaacatccggttgaacgtggcgtaaccttaagtcaaaccgcagaagcttctagagagttttcggcccatcttaaccaaattttgcttggtattcgttcgctacaacgagaactatttacgcgccgaaacccaaaagagatcgtttctggtttctttgagttatttgtcgaaggcattttgattgcggactataaaacgattaagacaagtaacaacccgtttcgctttcgtcgtcagattttagaaattgctaacggtttccttgcagacacaacgctgacttctaaggttgcacagtgctacatggatcagcagcttatttcgatggaagcggcgttaagtctagtcgaaaaagactgtcgagatatcatccaaactttttctagtattgagcaacgattagaacgaatagatgaatatcgctatcgactagagaaaagagcagccgataccgctcgttatatggacagttcacgcccgggtatggccaataaaatatcgggcattattaccgacgttgctaagttcgaaacactaccagtattaaagagcgtggtaggaagtaaaatagtgggcgttgaatccgccgctcaaccaataaaacgtaaagacccaccaccgcctagagtaataacgacacgagaagtatccgaatctgcattagagttccgtgaccgtcagcgtcgcttccatgaagctcgacaagttactgttgcgaagttagaagggtacctcgatcgacagctaatcgaaaatgattcaaaacacatattggacttcaccatcgaatcggttgaagactttgtttgtttcgatcacattcgctatgttggtgcattaggtgtatccgctaaaaaagtcgaaaaatcatacgaagttatattcaccgatcaatatgttgatgtacacgagtttgttgaatgtcgtgaattcaacgtggtacgtaggagcagagcttaa

SEQ ID NO: 42459 - DNA, 747 bp, Marinomonas mediterranea MMB-1
atgcttagagagttaaaaaaagtcgttgaagagtctgccaaagacccacaagaatttcagcaaaccgcaaactatttagtcgctaatcaatttgtcagtgcgtacaagcacggacagcgcaagcacttcttgttagtcgaaatgtaccaagactacttttcaaagttattcgacgcgcttgggatgaagctctacatcaacgaaaatgagcgactagccggcatcttaccagttcaacgggaagcctttgttcgtttaaaaacagacgagacattgttgttgctcgtgttgcgacagatttacgaagagaaaatcgagaatttcgaggtagataacggctttgttacaacaaacactcacactattcttgagcgttttgttcaacttgtaaaacgtgaaatcccaacagaaacgcgttttaaagagattttgacgctctttagtcgtcatggcgtcattattcgtggcaaaacctacgatgaagacagcaaaaatatgatgataaacatcacgccggttgtccgacttattgtcaccgaagcgtatttgcgtcagcttgaatcctttaatggtagcgatcctgacgatgatgaccttgacgcaggttcgtccagtgaagttaacgtgtcagatgacgcgacatcgactgagcaaaacacaacaccggatagcggcgtgatatccgagcaagacgccacagagaacaacgtggaacatcaagtaatagaagaagacgagaaccaatag

SEQ ID NO: 42460 - DNA, 3441 bp, Marinomonas mediterranea MMB-1
atgaaaaagttaaatcgaattgttttagtcaattggtatttgctcggagcagaagagatcgatattcgcggaaatactgcgattatcggaccaactggctcggggaaatcgtcgttacttgatgcgatccagacggtgcttactggagcaagcaagcgacatctaaattacaacgccagtgctaacgatggtaaagcatccggtcgtagcatacgctcctatattctggggatgatcgactcaggtcagggcaatccaaaagttgtcggtacggaaccacgacaggatgccatatgttaccttggtcttgtttttgaagattcgaacacaggtaaagaaagcacgattggcttgtgtttgagcgcctcgcttgcctcaccagaagaagacatactcggacgtttcatcctcccaaactatgggatacgtcgtgacgacttcgtggaaatgctaggggcgaaaagctacaaagcgaagccttggctagaagtccgtgaagccatgaaaaaggcctgtctcgatccttacattaagtcaggaagcgcttccgctactcaatatattaaccgttacctagaagagctgagcccaagtccagatcacattattaccctggacagctttcttaagaactttaagaatgcattaaaatttgtccctattgcatcacctactcggtttgttcaagacttcgtattaaccgaagcaccattgcaagttggggcttatcaaaagtcgcttgcggaatataaacagctagagtcaaaaactcaggaagtagcgaaacgcattgatgacttaaaggctattcaagttgagtgtgataaaaagcaccaacaagaacaaacagccgtaaactatcaatgggttgccacagaagctcgattcgatgaattaggttctaagcaggatgatattcaagatcagtatgaaattcatcgtgatcgtgaagaggaaattcaggacgagcttggaacacgttcaacgttgttaaagcagctacaaggccaactagttcgcctagaacagcagtacgagcattctgatgtcggacttaagttacaacagctagaacagagtaaaaagctgatcgagttgcaagggcaacaagacatcaaagtgctgttacaagctcgacaagctattatgctgctcggtggtatggctccttttaacgatgtcttaagcgacacaatgaaagccattctggaacaagctggcaaccagttagatgtcattgacgatcaaggaaaagttcaaggtgatttaaaagggctggtcaaattttttgaagggctaaaccaaacgcttgacgatgaaaaaagtcatgtgtttcagcaacgctctcagttaaaccgaaccatcctaaacctgaaagatgattgcaagcaattagaagctgatgtgtcgtcgcttaagggcggttcgagtccgctgtcacaaaacacgaaacgcttgatcggcttactaaaacaggctcatatcgatgccacaccattaagccatcttgcagaagttactgaccacaaatggcaagatgcgattgaaggttacttaggcagtcaacgcgaagctttgattgtggatcctgacgacgcggaagaagcgattcgtattttccgagctcatcgacgtcagttgatgggctgtcgagtaattgatacgacgcaaacacgattatggttgaatcgtggcgacagagggtcggttctccagtttattcgttgtaataatgatcatgcgcaggcgtatttgaatcgacgcttaggtggcattaagccagttgaaacagagcgacaactgctccgagaagacagcgccatgacctacgacggcatgttgaaactgtccggcaccatttcaaccattcggtttgtacctcacatgatggtgggtattaatactgatggaatgcgacagtcaagagagaaacagcttggtgaattgactcaagagttgatggattatctgaaatccgatcaaaggcttgaacaagctgattcaattctaggtcgcgttatggcctcatcacaatttgatgttgaaggcttatctgaagcgaataaagccaatacgcattctcagcatgagctaaacgatattaacgagcagatcgaatcgttgcaggcgcatgatgatactgaattgcaggaaaaaattgagtcactcaaagaacgtattgcagccaccgaactcgaacagaaaaagctcgatcgtgaacgccaacaaatttcggagcagtatggcgcattaaccactcagaagaatcagttgagcgccgcattaagttcattggatgaagacagaacgaagttaacggctaattctatgtttaatgctgagtatgctagcgaacgctacgagctacttgaatcgagtatggtaaacggtgctgcgatctataaagaagccatttctcgcgctgacaaggcatccgaaaaagcccgaagttttgatcagaaagtgcgtaaagaggtggctgaccattatgcacgttatcatcaagcaaacctcgatgatgatgttcaattggattatcttgagtccaaatttgaagagtttgagcattacgtcaactatcaaatcgacgttctaagtgaaactgagcttgctaaatacgctaagcgtgcagagttagctcgacgtgaggctgaagaaaccttccgaagtgattacgtttctaagcttaaggattcgctggatcaagttgctcaaatcattcgtgagcttaaccatagtcttaagcgacgtccatttaaccaagaagtttaccagtttaagtattaccctaacggcgatatgaaggacattcttgatttagtggaacgatttagtgcgcaagatcaagccaatgtaggcgggctttttgacccagagttcactggcgatccagatcatgcaagagcattgaatgccattcaggaacttatctctgatgaagagaagcaaaaagatttggcggactatcggaagttttataacttcgaagtcgacattcttgatatgaatggcaatatgaagacgaccttgagtcaacgtattcaaacagggtctggtggtgagcaccaaattccattctacttggcgattgcggcggcgctttctacaacgtatcgcctacatgaaacaatggaaggcgatattgtgggtggcttctctctcgctatgttcgatgaagcatttaacaaaattgacatggctaagacagctacctgtatgggctttatgcgagacatcggcctacaagttattgccgccgcacccgacgataagcgagcggtcatggctgcaaacatggacacgattatcagtgtttggcgtgaaggaggtgcggtatccttagatgtcgcgtatcctaaaatgaaaggtcaggcattgctaaatagcacagaagacctacaacaggttaaagagcaggaagaggttacagactcactatga

SEQ ID NO: 42461 - DNA, 1464 bp, Oxalobacteraceae bacterium IMCC9480
atgcccctcgattacgccacccttgatttactgcgtttatcccatccggcctggcgtttgctgcgatcggatcacgcgccactcattgccagctttctggagcgcgtcttcgtcacgccgaacctgcgcgtcatcgcgcaatccgacctggccgaagcgctcgacgatgagctgttcggcttgcgccagcgctacggggccgatacctatccgaaacccgcgctcgactatctcaatgactgggccaataccgacaagggctggctgcgcaagttttaccagcacggctccgacgagccgcattttgatctgacgccgtcgaccgaaaaagccatcgcctggctcggtacgctggcagcgcgcagcttcgtgggcaccgaatcacgcttgctgacgctgttcgacctgctcaagcaaatcaacagcggcagcgacgccgacccgcagacccggctggccgcactgcaacagcagcgcgacgccatcgatgccgacatcgcgcgcgtgctggccggcgatatcgcgctgctcgacgacacggcactgaaggatcgcttccagcaattcatggcgctggcgcgtgaactgctgaccgattttcgtgaagtcgagcataactttcgcggactcgaccgacgtgtgcgtgagcgcatcgcgctgtgggatggcgccaaaggggcgctgctcgaacagatcatgggcgagcgcgatgcgattgccgattcggaccagggcaagagctttcgcgccttctgggatttcctgatgtcgagcagccggcaggaagaactgtcgacgctgctcgaccgcgtgctggcgctggcgcccgtggccgagctgaagccggatgcgcgtatccggcgcgtccactatgactggctcgaagccggcgaacacacgcagcgcacggtggcgcaactgtcgcagcaactgcgccgctttctggacgatcaggcctggctggaaaaccgccgcatcatggatatcctgcgcggcatcgaagtgcgcgcactggcgctgcgcgacacgccgccggccggcgtcatcatgcagatcgacgacatcgctgccgacctcgaattgccgatggagcggccgctgttttcgccgtcgatcaaaccggtgatcacggatagtgcgctggaatccggtgccgatgacacctcggaggcgaccatgcagaccttgtatgcgcaagtcgtgatcgacaaaccacaactggtgcggcaagtccgccgtgcactgcaggaccgggcgcaagtgacgctgcgcgaagtctgcgtactgcatccgctgcagcacggcctggccgaactggtggcttatctgcaactggccagcgacaccttcaccagcatcgtcgacgaggatgccagcgagcctatcgtctggacccgcaccggcgacgacggccagccagtgcacaagcaggcgatcctgccgcgcgtgatttttttgaggtaa

SEQ ID NO: 42462 - DNA, 630 bp, Oxalobacteraceae bacterium IMCC9480
atgatgactgacgaaacccaacgggatgagcaacacggtcccgacagcgccgacttgtccgcgctgataatcgtcctgctcaagggtgtgctataccaggatggcgatgccggcctctggaatggcttgctgaacttgcaggcacgggtgcgcgattacgtgctggtgctgggccttgaactggtcctcgacgaagccgaaggctatgccttcctgcgctcgcgcaccatcgccgaagacgacgacgcaccgaagttgccgcgactggtggcacgccggccgctgtcgtttccggtcagcctgttgctggcactgctgcgcaaaaaaatggccgagttcgatgccagcggcggcgatacccggctcatcctggagcgcgaggccatcgtcgatctgatccgcctgttcctgccggagagcagcaacgaagtgcgcctgatcgaccaggtcgacacccacatcaacaaaatcgtcgagctcggttttctgcgtaaactcaaggccggtccgcccgcgtttgaagtgcgccgcatcctgaaagccttcgttgatgcgcaatggctggccgaattcgatacccggctggcggcctaccagagcacgctcaacggagtcacggcgcatgaataa

SEQ ID NO: 42463 - DNA, 3384 bp, Oxalobacteraceae bacterium IMCC9480
atgaataagccagacgcacaacagacgctcggcatggacttcatcgccgacgacacgctgtcgggcttccgcctgcagcgcctcgaagtgttcaactggggcaccttcgatggccgggtctggtcgctcgatccggccggcaagaacgcgctgctgaccggcgatatcggctccggcaagtcgacgctggtcgatgcggtcacgacgctgctggtcccggcgaacaagatcgcctacaacaaggctgccggcgccgacaacaaggagcgctcgctgcggtcctacgtgctgggtcattacaagtccgagcgcaacgatggcagcggcagtgccaaaccggttgcgctgcgcgaccacaataactactcggtgattcttggcgtgttccataacgccggctacgaccagaccatcacgctggcgcaagtgttctggatgaaggacgcgcaaggccagccggcgcgcttttttgtcggtgccgaaaaagccctgacgatcgccaccgacttcgcccaattcggtgccgacatcggtgcgctgcgcaagaaattgcgtgcggccggcgcggaaattttcgatacctttccgccgtacgccgcctggttccggcggcgcttcggtatcgaaaacgatcaggcgctggaactgttccatcagaccgtctcgatgaagtcggtcggcaatctgactgatttcgtgcgcaaccacatgctcgaaccgttcgatgtcgcgccgcgtatcgcggcgctgatcggccatttcgacgacttgcatcgcgcccatgaagcggtcctgaaagccaagcggcaagtcgccttgctggtgccactggtagccgattgcgcgcgccatggcgagctgatcgccacctccgacgagctgcgcgcctgccgcgaggcactgcgcagttacttcgccagcctcaagagcgagctgctcgacaaacgcctcgccagcctggtcgatgaatggacccggcaggatcatcaggtacgtcgcctgagccagttgcaggccgaacgtcgcagcgaagaaagcgacctgcgtcgcagcatcgccgacaacggtggcgaccggctcgagcgactggccaccgagatcacgcgcaagagcagcgagcgcgacgcacgcgagcgcaaggcgcgccgctatgccgaactcgcgcgggcggtcggcgaaaccccgtgcgacaacgaaaccgcgttcatcgcacaacagcaccgcctgtcggaactggtcgaggcggcccgcacgcaagacgccagcatggaaaatcgcctgaccgaacacggcgtcagcctgcgtcagggcaaactcgaacacgatgcgctggctgccgaaatcaccagcctgagagcgcgccgcagcaatatcccggccgagcaagtgctgatgcgcgcggcgctgtgcaaggcactggcgctgtccgaagacgacatgccgtttgcaggagaactgctgcaggtacatgacgacgaacgcgcctgggaaggtgctgccgagcgcttgttgcgcggcttcggcctgtcgctgctggtgccggagacgcactatgcgcgggtagcgcaatgggtcgagcaaacccatctgcgcgggcgactggtgtacttccatgtgcgcccgtcagcccgcaaggaaccggccggtttacatgccgactcgctggtacgcaagctggccatcaagcccgactcgccgttctacgactggctcgaacgtgaactggcgcagcgctttgacctgccttgctgcacgacgccggaacagttccggcgcgaagcccgcgccatcacgcagggcggccagatcaagaccggcggcggtcgccacgaaaaagacgaccgccatcgcatcgatgaccgcagccgctttgtcctcggctggaccaatgcagcgaagatcgcggcactggaaacacaagcccgcacgctggaagaaaagctgggcgaactcggcaacctgatctcgcgcatccaggtactgcgcaagtcgctgaccgaacgcctgacggcactgtcgcaactgcatgaatacaccgacttcgacgaactcgactggcccgcgctggcccgcgagatcgcgcagttagccgccgaaaaagaggccctcgaatcggcctcggatgtgcttaaaaaactggcagagcgcttgctggaggtcagcgccacgctggccgaagtcgagcttgaactggaagcccacaaggacaagcgctcgaaaatcgagcagaaaaaaaatgatgccgaattggcgctggcacacgtcacgcaagtgcgcgacgaaccggcgagcgcgacccatgcggcccgctttgaccagctcaacagcttgcgcagcgaagccctgggtgagcatcagttatcggtcgaatcctgcgacaaccgcgagcgcgaattgcgcgactggctgcaaggccgcatcgatgccgaagtgcgcaagctagaccggctgcgcgacagcatcatcaaggccatgagcgcctacaaggacgagttcaaactcgatacggccgaggtcgacgccagcatcgacgcggccttcgagtaccggaccatgctcgacaatctgcgggccgacgacttgccgcgtttcgaggcgcgcttcaaggatctgctcaacgaaaacacgatccgcgaaatcgccaacttcaattcgcagttggcgcgcgaacgtgaaaccatccgagagcgcatcagccgcatcaatgaatcgctgacccgcatcgactacaacccggcgcgctacatcgtactcgaagcgcaggtcacgccggacgccgatatccgcgacttcaagggcgagctgcgtgcctgcaccgaaggtgcgctgaccggctccgacgatgcccactattcggaagccaagttcttgcaggtcaagcagatcatcgagcgctttcgtggtcgcgacggcttgtccgaacaggaccggcgctggaccgccaaggtcaccgatgtacgcaactggttcgtctttgcgggcagcgaacgctggcgcgaggacgacaccgaacacgagcattactcggattcgggcggcaagtccggcggacaaaaagagaagctggcctataccgtgctggccgccagcctggcctatcagttcggcttgaagttcgatgaagtgcgctcgcgctcgttccgtttcgtggtcatcgatgaagccttcggacgcggctcggatgaatcggcgcaatacggcttgcgcctgtttgcccagctcaatttgcaattgctgatcgtcacgccgctgcaaaaaatccacatcatcgagcccttcgtctccagcgtcggctttgtccataacgaggagggtcgcgcctcgaaagtacgcaacctgtcgatcgaagaataccgcgccgaaaaaacccggctggccggatga

SEQ ID NO: 42464 - DNA, 1164 bp, Oxalobacteraceae bacterium IMCC9480
atgaactggaccagcccgtccgcactgatagcgcaattgcacaagctgtgggagcgcggtgagctgctggccggcatggtcagcggcgagtcgctgtttccccgccggctggttttgaaatcaccgtcctcgaccgagctgagcgaacactttgatgctgcccgcgcgtggatcgccgcgatcaatgcgctgccgcactgccggatcgagcagcgcgaattccggcaccgcgtcttcggtaacaatcgcgtgcccgatgcggtctggatcgacagtcttgacgacgcgctggcactgctcgacaaacgccgtgacgcgcgccgcttcgctgccctgctcgaccggacccgcctgcgccagccggcgctgctgccatggctggcgggacggccactgcaagcgctggcgctgcacgacgactgggtgcgcctgctggatctggtcgactggatgcaggcgcatccgcgtcccggtctgtatctgcgccaggtcgatatcgccggtgtccacagcaaattcatcgaagcacatcgcgccgtactgagcgccatgttcgagctcgccctgccagcgcaggcgatcgatctgtccgccaccggggtcgggggttttgcgcagcgcttcggtttccgtgacaagccgcagcgcgtgcgcttccggctgcaggacccggccggactcgataccgacatgacgctcgatgccgccagctttgcgcgcctcgatccggccgtcacgcaagtcttcatcactgaaaacgaaatcaacttcctggcctttccgctgccggcggacagcctcgtcgtgttcggtgccggttacggtttcgacatgctgcgcgacgtcggctggctgacgcgccgccggctgatttactggggcgatatcgatacccatggctttgccatcctggaccagctacgcagccagttcccgcaggtcgcgtcgctgatgatggaccacgccaccttgctggcatttaccgcgcaatggggacaggaagaccaagcgacgctgcgcgaactgccgcgcctgcatgccgacgagcgcgcgttgtatgacctgttgcgcgacaaccggctggggaaaaacgtgcgactggagcaggaacggatcggtttcgactgggtccggtcggcgctggcggcgctctccggcaagtaa

SEQ ID NO: 42465 - DNA, 1461 bp, Photorhabdus luminescens subsp. laumondii TTO1
ttgaatttccaagggttacaggcaaagtaccgccgtctatttcaggaaagcgctgcctggaaactgttgagagctgataatgctcctgtaattttggcatttttgggggagttattttccgaggatagtgaagtcccttttagtcgtgcccgggtgtcacttgatgcagagctggtacgctgtcgtgaacttggcctttgggaaactgaaacaggagcgggtacttatctcaataaatggattcgggaaggctggttgcgtgagatggatgacacattaactaaaacggatgccagtgaaattgcactccgctttagccaagggcttgatgaacgcaattcaggaaccactgcgtctcatcttcgaattgtgcaggaagcggtcagggactttgcaatagcgattagcccaaatgccgatgagcgtgtcgcgtttttggaagatagaaaatccgagattcagagagagattgatgctctgagggctggcgttgtgaccgaattaaccaaggctgagcagcgggaaagaattcgtgaaatttaccaactggcttctgttttaacgggtgattttcgccgtgttgaagatgaaattcgtcagttggatcaggaaattcgtattcaaattattgagggggactctaccagaggagatatccttcttgctgttttagaaaaagaagcattactggctaaaacggatgccggtagtgcgtttgaaagcttttttgatttgttatgtgatcaaaatagaacgatggagctacgagatcagcttcgaagtattttaagtcgtccggtcgcagaacacttaagtacccaacaacgccaattcttaagtcagctcatgagagaactgagccgcgagagtgacagagtttttcaaatcaggcgaagaacggaagagagtttgcgtgcttacatagagagtggcacggctcaagaaaatcgtgctgttgatagattgcttggtcaattggaacgactcgccattgaattgaagaacttaggttatgacttgcaaacggcaacaacgctgtcactgcccgttggcgcggcaagtattagctctcctgaaagcatgctgcttaaatcacctgatgaaaagctggatacctcagacgctgaagaacagctcaattctcgcgaaccgagtatgcaaatgctggattgccttgatgttgttcaaattcgattaatcgctgagagggcgctagaaacgttaaaagagtttggtccaatgacgattgcgtctattgcaaattatcagccgattaattcagggttggaggagttagttgcctatttaagagtggccaaatctgtcggggcggcattattggaagaaaaggaatcagttgaaatcagtgacaaacggggagctcgcttgcgggcgtctatacccactttcttgctgagtgcggacctgtttccagacagtttggatgaattggttctttag

SEQ ID NO: 42466 - DNA, 894 bp, Photorhabdus luminescens subsp. laumondii TTO1
atggtaggtaaaaagttgaataaagataatggtgccctcgctacccttggtaagtctgattccaatcctcaggaagaacagaagacagggttcttcgatcagttgataaaacaccatactcaatcagagtatgacccgcttacagatacagccggcgttgaatctgatgttgctttttcgattgtcaatcaaagcccatcctgtgaggctgatgatgtattagtcagtaagcacgctgaaaactcaaacagtgatatgccgcctgatgcgcgccgggtgctggttagcttgctgcgtcaaggtgttattttgtcttcgcagaaagctaaattgtttgaattactttgtcgataccaatctgctgtacgcaaacatctgtcagaagtctatttgaggttagttttagatgaaaaagcaggtgtcgcctttatcgctggctttcagaatgaggaagatactgaatcattgggtatagatgatgaagaggttgtctctctgattagccgaaggacgctctctttatacgataccttgttgctgttagtgctgcgtaaacactaccaggaccgggaaacttcgggagagcaaagggttatcattgatattgaacgtatagaatctcatctgacaccgtttttaccgctgacaaacagcacgaaatctgaccgaagaaaactcaagggcgctcttgataaaatggtgacgaaaaaaatattgagttcggtccggggaagcgaggatcgcttcgagattacgccggtgatccgctatgtagtcagcgctgaatttctcgaaagcatgcttaatgaatacctgaaaatggcgggagagaagggtattgagctaaataaaaatggcagcgacgctgttgattatcaagatgaagaggaatag

SEQ ID NO: 42467 - DNA, 3402 bp, Photorhabdus luminescens subsp. laumondii TTO1
atgaaaatgactgatcaaactctttcggctaattcattatttcacgttggtcaaatcagattagctgaactctcagtgtataactgggggtcatttaatggcttgcataccgcgttgatcgatcctatgggaacgctggtcactggagataatggtgccggaaaatcgacatttattgatggccttatggctttgctgcttcctgccggaaaggcaacttttaatgtggctgcggcgcagggtgatcgttctgaccggactttactttcctatatgcggggaagttttggatctgcccatgacggagcggggacgagagtcagaagtaagcgtgaatttggcgtggtgactgggcttagggctttgtatcagggtgatgatgggtcaaaaattacgcttgcggcgcttttctggattactaaatcgacgaatgtgcttgcggatgtgacacgcgtttatgttgttgccaaaagagatctgactcttaaggaaatgcttaatgcttttgggaacggtaatgcccgggcattcaagcaatggcttcgtgatgatccgacgattacgtgctgtgatgataatttttctgattatcaggagttgtaccgaaagctcctgtatatggacaataagaatgcgcctgcactgttatcgcgggcgttaggtctgaaaaaaattgatgatttaaccgggttgattcgtgaattagtactggaaccgagtacggtcaaggatgatgctaaaaaggtcgtggaagagtttgctgatctggtggcaattcatagtcaattagtggatgcaagagcacaaaaggtgcacttatccaggttacctgaactcaactcaattatcgaaaaaacaaccaaagaatttgcggagctaatggctgagaaaaatagtctcccggtctactttggtgagatttttgcacaattgtggagtgaaaaaattactgatattgaggctgaactggaagcgctacttctaaaaattagccaagttgaagggcagaaagtggatgcgaataagctggttgagcgaaggcacgaggagtaccttcaatttggtggggataaaatagagtcgctaagaaaggaagttgatcatacccaaactcagttgaatcgggtggttagaaattcatctcaatatcaaactcatgccaacgaactggctctcccttctgtattagaggaggcggtatttctcaaaaatcaatccaccgcatcaactcggcttgccagtattcagcaagaagaaggagagtatcaggacaggtttgccaccatcagtgctaaattcagtgagctacaagccaatatccatgatatctctcaagaaattcgggaaatcgaggcaagacccgattccaatattgatgtgaaatatcagcaattgcgagatgaactggttaattctttagaattaagtaaagagcaatgtgtatttatcggtgagcttatcgatgtcgaagatcgtgaaaagagctggcagggcgcgatagagagggcgttaggcgggttacgaacaacacttgctgtgccacatcattgttattcaatggtgactcgttggttaaacgctcggcatacgggtttacatgtccgtgttcaagttgtgaataattctacaactcaaggccaatcggtggtgtttaagtctgatggttatctaaggaaactggtttggcgcactcacccttatcgagagtggctcaagcaccatttgcaacgatttgacctgcaatgtgtttcaagcacggaagaattggatcaaaccccgttttcgatgacacaacaggggttaatgcacatggataaagggcgctttgagaaaaaagatcagtaccgaatagatgacagaagacgctggtgtctgggtttttcaaacaaatcacgtttagccattctgaataacgataaaaaagagttaactctgcaattggcggaaaccgagaaaaaggtgagtcaggcccgtcaagatttgaattctgtttctgatcgtaaaattctttgggagaagatccaaggttaccgctgggatgatattaatgctccttactggcacgaaaagctttctgatttgcaggttgaccttaagatgttggaacagtcaggtggtgatcttgataaggccagagagcgttgggagtcggctaaagagcagctagttcaaattcaatcggtattaaatcagctcaactctgattctggtggcgttaaaaatacgctgaaaaatgcaaaagaagaatggagcaaagcgcaggcaaaagcgtcgaaaggattacctgattcagccagacaattacttgcgattcgggttggcgtgcttaatacaaacgatttaggccggatgtctgaattggtgttgaaagttgaagaagatttagaacgtctgttagatattagccgaaacagtaaagacaaagcagaaagattagccattagcattatggtctcattcagatctaacgataaatggcaagtcttcacggttgactggcaaagtaatattggtggcttacctgattatcttaatcatttacgacaactggaagaggaagggcttcccaaccttgtggagcagtttattgaacgtttgaataagcatgcaacgcagtcactagcgcggattaaaactaagcttgaatctgaacgggaagatatccttgagcggattgatattattaaccgggtcctcaagcgtacagagtttcgatcagggacacatttaaagctaggttcaaagagagagaaatttccgcatgttaatgagtttgaacagcatttgcgtaaggtgctgagtcaggtaaccagtgatgaccatgaagcacggttccgtcaattggctaaagtagttgaaatacttggcaaagcgagtgcccctggctcctcaaatacattggaaagtttaaggctgcttgatcctcgttatcagatgtcattttatgccgaagagttggatagtaataccggtgagattcgggatgtcttggagtcatctagtggaaagtccggtggcgagaaagagtcgtttgcggcgactattgtcgcggcaagtttggcctatgttttgacgccggatggctatgatcgaccggtttactgtactgttttcttggatgaagcattctcaaatacggctgaaacagtaagtcggcgggtgctccgagtatttagggagctccatattcacgttaatttgattacgccttataagaacttgaatctggcaagagaatctgctcgttcactgctcattgcggaaagagaccaggaaaaccatgacagccatttatgtgaagtgacttgggaagagattgaccggagaatgggcgaagagaaggagaaaaagttgcctgatgaggcggctgatttgggtattgagtttgagaaactgacatga

SEQ ID NO: 42468 - DNA, 1197 bp, Photorhabdus luminescens subsp. laumondii TTO1
atgaaaagagggcagtatgaggtgcgttgggggttattgccatcacaagttaagagcatcattaggcaacgtgagtgggataacctttcctcactaaaatcccggttactgggcatcaaggcattccctattcgcgttggcttgaaaccgcccaaagggaattctgccatattagatatagctcattttcaacggtttattgatgagtggaaatcatttccccatcaagatcttgtagagtggtcttccaaaaatttcagggagctatctgaacagcgcattccaacttttgttgtcattgaatcgatgcaatgtctgattcaatttttagggaatgatgccctttcccgaagtaaggtgtgggaaagaaatatgaagccatttttgcgggttgataaagatctctatcctgcattggttaagtgcatagatattgtggaaaaactctcgttgagggatgcggaattattagcaaaattgttgccacaattaaagcaaggcttaggggaagggcaatatctaagagcactgccactcattggaattgatactaagtttcttgagaaccaccaaatcctgatcgaagagctggccgatatcattcacaagggagctgtttcggcatcaggtggtcttatcgcttggttgggatgttcaataaatcctaaaggctggttaactatcaggccgctttgccgtgctgcaactgttgcgcttgggggaatgccgatactacaaatacctagcgaattacttagaaggcatgaacttccggcatcgaatatattaatagttgaaaacttacagtctggtttagcattacccgaaatgtctgacacgatagcggtgatcggcggggggaaaaacattgcttggatggatgcagcttggttgaaaggtaagcgtgtagggtattggggagatattgatacttggggtttatctattctcagtgatgccagaaacaagtttatggatattgagcctctgatgatggatgttaaaactgttaaagctcatgaagatagaatggttcctgaaccaaatccagttgaatctaatcctacattgctaaatgaggatgaagcaaagttgtttaatgatctcatttctggccggttccaatcttcacgtttagagcaggagcgcctttcatctgattacattagaaacaagcttacgaattggctgtcctaa

SEQ ID NO: 42469 - DNA, 1449 bp, Arthrobacter sp. FB24
gtgtcccgatccgccccgtcctccgcggacgcgatcagcgcccggctccgggacctcgaactcctcaccaagggacctgcctgggcgctcacccggtccgcgccgtgggtcatcgccgtcctgcaggcttccttcacccgaacccgtccgcagcttccgctggaagagttccatgccgacgtcgatgccttccttgagcagctccgccgccaggaccccggactgggcggaatggccaacgggaagtccttcggcgacgaatggacccgtaagaacttcctgacccgccgtaaccagtcgggtcagatcgtctacgaagtcaccgagcctgcggcccgcgtcctcgccttcctggacagcctctccagcgaacgctccacgctgaacggttcccggctggggacgctgctgggcgacgtcgagaaacttgccaatgagaccaacccggaccagagcgcccggctggagtcgctcgaagacgagatcgaggagcggcagcagctcatcgaggacatcagctccggggacttcgacggcttgctggacgatgacgaagcggtggaggccgcaggaaacatcctggacctcgccgccagcctgccggcggactacaagaagatgcgtgaccggatcgaagaactggtgggcgagctccgcaaccagatcatcgaggagtccctcagcaagggcgccaccatggcacaggtgctggaggcggacaagcggctcaggcagagtcctgaaggcaggacgttccggtcatttacggcattcctcgaggacccgcagcagcagctgcgattccggtccgcgatcggggaggtgctcagccgccagttcgcggacgacctcagccatgaggaccgcgagacgctgaagaacctggtggctgagctccggacgcagcacagccagatccagcggatctacggcaagctgagcgaaagcctcaacacctacgtccagagcgacgatttccgccagtccgtgcggctgcggaaggtgctccgggaggctgaacaggccatccgttcgctgccctacgaacgtgaacgccccggcctggtgcccggacctgtgctctttaacgcgggtttcgaatccttgtcgatggtcaagctcttcgaccccgacgagttcgccgccccgcccaaacttgccgaccccatagccttcagcgactcggaccgcgtgcgctcgccgcgcaccgggaaggccaagccggcggccatccgcgccgcggtcgccggagcggccaccctgccggaggcatgggagcagcttccgccggaggaacgccacatcaactccatccgcgcgctgctgtcccaggccctgcacgacggcgccggcttcgaccgcgcaggctgggacgccatcgacttcgaacaaatagacggaaccacccgcagggcattcctgccggtggtcaccctcaagaaggattga

SEQ ID NO: 42470 - DNA, 936 bp, Arthrobacter sp. FB24
atgactgacgagatgacgacgacggcggacgccggcgtcgacggtgagaccccggacgtgcgaccggcgcccgaacacatccacggcgcccctttcgcggtaacgcccaaggacacctttgtcgacggtgcggcgctgttcccgggcgacaccggcgtgctgccgatgaaggtccgccaggccctggtgaagctgctgaagggcccgtacatcgacggcggccgggatgagaaactctggactacgcttctggacaaccagctgatcctgcgcagccggctgtccgagctgttcctgacgctgcagctcgaccacgaacggaaggtggcagtgctgcgtccggtggatcccgaggccatcggcggcagcacccgctccagcatcctgcgccagcagcgtgcgctcagccgggtggaaaccatcgtgctgctgcgcctgcggctcctgctggaccgccacgtcacggcccagacggatcccacgatcacgaaggaagaaatcgccgagctggtggcccactaccagccgtccggccagcaggacgcgctgcgggattccgacgtcgtgaaccgcgccatcaccaagctcctggcccgccaactcctcatcaccaccggcctcgaggacgtctacaccatctccaacgcactccccctggccctccccttcgaaaacatcggcgacatccccgcgcacatagaagcgctcgtggcggcaacagcagaccccgcaggtacagaaccccttttggaactggaccgggagaaccccgttcgctcggatgacggcacggaagacgacgattcggtgactgacagcagcgacgacgccggggacatgcggcagcatgcgtctaagcgaggaacgagcgagcatgcagagcatgtgtccggtggcgccgcgacaggcgaccacgaggaagggaacgccaagtga

SEQ ID NO: 42471 - DNA, 3465 bp, Arthrobacter sp. FB24
gtgagcatcgcaaccatgctgccgatgggcgagctcaccaaccccggccagatgcgtctcgcgctggtgcaggtggtcaactggggcacgttccatggcgcccacacgatgcacgtggaccgtaacggcaccctgctgacgggcaactccggagtgggcaagtccacgctgtttgacgcgatgctgcgtgtgttcgatgcgcggccgcgctccaacgaggccgcggcgcagcgctccggcgctgtggaggacaagcggacaacgttcacgtacatgcgcggcaaggtgggcgacaaggctgtgggtgagggctctgccagtgccttccagcgccccggcgccacgtggtccgccgtcgccctaacgttcgacaacgcggccggcacgaaggtgacggtgtcggcgctcttcgacctgcccaagaacggcacggagtcgagtgtcggccggtattacctgatcgacaacaagccgctggaccttgcggcgatcgagggcatcgccgagaagcgcttcaccaaggctgcgctggacacgatcttcccggacgcgcaggtcttcgacgtgcacaaggcgtttgccgagcggttccggcgcctgctgggcatcaattcggaccaggccctgccgttgctccgggtgatccaggccggcaagggcctcggcggcagcgtcaacaccttcttccgggaccaggtgcttgatgctcccgccacgctgtccgcagcggatgacgtcgtcgaggaattcagcaacctgatgtccatccggcagcggctggaggacgtgcggcagcagcgcgaccagctggctccggttccgggcctcaacaaggaatacgcgcagtccctcctggatgcgaaccgcctgcgggaactcgccggtgaagaattcgatgcctacaagcagcagctcgcggtgacggtccacgaaaagaccctggtccgttacaaggacctcgcccgggccaaggctaaggaccttgccgcggagcgcgcggtccgggacggcctggcgaaggacctgcgccagctcgaggcggactataacaaccagggcggcaacgcgatctcggcgatcgagcagtcgctggagaatgcccgggtgggactcaagctccgccagcaggtggaggaagccgcgcggcaggcgttggccgatgccgggctggagctcgcgtggtcggccgaaggctgggaacaggcgcacacccacgcagccgaccgctcggcggaactgcagggtgactccgaggcgctcaaagagctgcgcttcgaggcattcgacggccacgccacgaagaaacgtgagcttgcggcggcccagcaggaactcgtctcgctgaagacgcgcaagtccctgctcccgccgtcgagcatcgaaaaccggaccgccatcgcggcggcaaccggcgtgccggaggagcagatgccgttcggcggcgaactgatcgacgtcgccgaaggggaggaacaatggcggcccgccgctgaacgcgcgctgcgcaacctggccaccacgctgctggttcccggcgagcacttcgccgccgtcacccgctacctgaacaacaactccgtccgcggcgcgctccgtgccgtggacgtgtctaagccgctcgctggcggcgcgctggccgttgaaaacgcggccgacggcgatctgctgaccaagcttgacatcctcaccaccgggccggcggccgacgccgggcagtggatccgcgagcggatcgcggtcgacttcgcctacccatgcgtcgaggacccggacgaactcgctgcgctggacaaaggcctgagcctgggcggcgtggtcaagcgcaaccgccacacggtggagaaggacgaccgctttgccagcaggcaggactacgtcctgggcttcgacaacgcctcgaagctcgagctggtggctgcacaggtggaggacctgcagcaggaactggcgaaggccgccgaactcgcgcaaagccgcgaggagtcgcaccagggaatgacccgccagctggaggccctacgccggatcgccgaggacaaccggccctgggagcaggtttccgcggctgtcgcggaggacgagctcgggaagatcgagcagcggctcaaggatgccctcgccgcccaggccgacctggagccgttgcgcgccaacatcgaggcggcccggcagaagcaccagtccagcaccgaggccgcagcggtcctgcaaagcgaatacaaggcgctggaccaccagctcaccgcggcggattcgctgctggaagccgcgcgcacccgtctgcgccaggcaccgccgtcggacgccaccgtcgccgcgctggaacaatactgtgccgacttcggcggcgtggacgacgtcgcggaaatgcatgagctggacaacctggcccaccaggtccggacccggctcctcgcagaactgcacgctgcagagtcccgcggccaggccacctcggagcgcctcacccgtatcttcgaaggattcgtccgcgaatggggcacggcgatctccgcggaccacggcacctcgatcggcgccgccggggagttcgaagcccggtaccatgcgatcgtcagcgacggcctgcccgcgcaggaagccgagttccggcagttcttcaaccagcgcacgcacgaatcgttcagcaccctgctgcacctgctggacgaggaacgccggtccattaccagccgcatcctgcccctgaacggcatcctgtccgaggtcaacttccacgagggcagcttcctggaactcgatatcaaacagaccctgccgcccaccgcgaagcagttcaaggacgccatccagaatgcgctcaggacgcgtcacacgcggccctcgcgcgctgcgggagcgacagctgccggcgccgaaacggacgacgacgccgagctcaccaaccgctacaagtcgctggaaacgctcgtgaagcgactggggtcgcagacgccggaggaccggcgctggcgggccgaggtgctggatgtgcgcgggcacctgttcatccagtgcaaggagcaccgcgaagtacttggtccgcgcggcggcaagcggacggacgtgttcatgcacgcggatacgggttccatgtccggcggcgagcggcagcgcttcacggcgttcatcatggccgcggcgctgagctatcagctgggcatcgcggagcagggcttcaccacctacggcaccgtgatgatggacgaggcatttgtccttgcctcggaggaattcgccggtgcgggcatcaaggcgctgcatgaattcggcttccagctgctcctggccgctccggagaatgtgattgacctgtccaagcacctgggctccgtcacggaaatcctgcgggacaagcgcaccaaccgctccggagtcctcacagctcccgtgatcgggccgcgggcgggcgctgaaggccagtggaggtccgaggcgaacccggtggatatcgtcctgcgctaa

SEQ ID NO: 42472 - DNA, 1488 bp, Corynebacterium glutamicum ATCC 13032; identical to SEQ ID NO: 41679

SEQ ID NO: 42473 - DNA, 639 bp, Corynebacterium glutamicum ATCC 13032; identical to SEQ ID NO: 41680

SEQ ID NO: 42474 - DNA, 3336 bp, Corynebacterium glutamicum ATCC 13032; identical to SEQ ID NO: 41681

SEQ ID NO: 42475 - DNA, 1107 bp, Corynebacterium glutamicum ATCC 13032
atgccattgtttatcgacgacgccctccaccgcagcaaaaaatacttccacgcgcacttaagcgagctgctcctcggcgaatttgcaggcctcagcctgcccctgcacccaccgacggcagctaaagccgccgccgatattgatgccacgagggaatttatccgccaatgggaggggcgtgatgatgtggaatatgccattcgaaactggtctcctgtgggcttaggtaaaactgaagtacccgttaggctgacgttgaacacgactgaggaattagttgtgtttgcgcaggtagaggatgaatggtcttcacttcacgagaggttttcacagctgtctggttttacagcggaggtggtggcgaaacatgtgtcgctgtggcgttcgctgtctaacgatgatctctctaaggcagtgttagttgtggattggtttttgaaacaccctaactctggcctgctgaaacgcgccgtcgcagttgaaggcgtgcataccaaatggctcgaaaaccaccgcgtactcattgaaacgttagtggccgacaaacgtggtgaacctggtcgtgccgatcttggacttggtgacgccgaagctcgcgtccggctccgcttccattccgtagatgctcccgctgggctcacagacattgaagtaccgctttccaacctgtgtgaattacaagaaccgcaagtaattctgatggtggaaaacctcgattcatttctcgctttacccacttggccgggcgtaacaattgcttggggtgcgggctaccgtgcagtagacattgttcgaggaccctacttttctaatggtcggttgctgtactggggtgaccttgacctggacggtttcaaaattctcgacggcgtccgcagccatgttcctcacaccgaatccgtgctgatgaactctgaaaccgtctcccgctggcgctaccttggcgttgccgaccgagaattcaaggcagagagctttgacaaccttcatgattttgaatctgacgcacttgacctactcattacagacggtgagctccgcattgaacaagaacgcatccgcctcgatgttgctgttgaagaaatcgagaaagtaattcgtgggtga

SEQ ID NO: 42476 - DNA, 1632 bp, Bifidobacterium longum subsp. longum JCM 1217
gtggccgatgtgatgcgggagctggaacggctgcgaccggtgtatgagacgggcgtcctgcggttgctgttgcgccagaacgcgatgctgtacgtgtcgctgctgcgttccacgttcgacccgctcaccggcgagctgccgcgcgagaccgtggaggagcggttcgcgcaaagtctgaacgctctggccgacgccggcgaatatgcgccgcgcgaggaccagaccttcgccgaggccgctcatcagatcctcgccgacctgacccgtgaaggcgaaggcgactacgcctggctcgccaactcgcatgatgcggcctcacaccgattcctctaccgtttgacggcccgcgcccaccgcgccatcgaggcgctgagcaggctcgaagacgaatcacgcgccctgtccggcgcgcaggccaacagcatcatcatggaaatcgagcacgcgcgcatgcagctgaccgccgaccccggcgagcgcatcaaactcctcaaccgtgaaatcaaggaacgcaagcacgagatcaaacgcatccaacagggcaagcagcatgccacgctgagcgaagcccaggtggaggacgtgatcgccgtgatccacaacacgctgcgcggcgtgcccatcgacctgcgcgaactcgtgctcgacgagcgggacaacggcgacgccttgcgccggcgcatgcaggccggcgacatcagcgtggacgagaacctgacccgctaccacgatgaataccgccgctcgttcagcgaatcagacagcggccgccgcttcgaggacgccttccaggtgatcatcaccgacgagggccgccagcaaatcgacgaagccctgcgcgccatcgccaaaaccccgtatctggccggcgaatccggcgtgctgctcggccagatacgcgacgaactggcccgcatctacgacggcatcgaagccgtgcgccgccagatgcgcgtctccgacgaggcgatcagccggctcgtgcgccagcaaaccgacactcgctaccgcacgatgctcacccgcttgaaccgactgtacgcgcgcctcaacgcggatgcgaaaacccatatgggagacgcctcgcgcccgtacgacacggccacctcggacgcgctgttcgcgccattgccgatgcgcccggccaaatccatgacccgcgccaccgcacccggcctgagcgacctcgccgccgaagccccgcagtcgactccggtggccgatctgcgggacatggtcaacagcggcggcccccgactcctgcgcatggtcagcctcatccggcgcaacccggtgaccgttgacaggtccgatgacaggcccggcgcaaccctcgtggacatcgccgccagcttcaaccggctgcccgaaagcgaacgccgcgaaagcgagatcgtcggcttcctgggcgggctgggagccgtaagcggcaacgccatcgccgacgagccgtccactgacggcgtcggcgtcggggtcgacagcgacatcgccaccgagccggccccggcgcagcgcggcgataccgcgacctggcattgcgtatcgatcgacggcgagccccggaactggatcactagaccggtgctggccgacatggacgagctgagcatcattgtggaggaaggatga

SEQ ID NO: 42477 - DNA, 675 bp, Bifidobacterium longum subsp. longum JCM 1217; identical to SEQ ID NO: 42399

SEQ ID NO: 42478 - DNA, 3549 bp, Bifidobacterium longum subsp. longum JCM 1217
atgatgcaggcgacagacgtgcagatgatcgcggaccggtggatgctggaatcccgccgactcatcaactggggctcctatgagggctaccacgaattccgcccctccacggaccacaagctgccggtgaccctgctcgccggcgccagcgaatccggcaaatccacgctggtcgacgcgcagatctccctgctgtacccaaccggcacgccgttcaacaaggcctcgaactccggccgctccgaacgcagcgactacacctacctgcgcggcatggtcggcgtgggcagcaccgaaaccggcgacgagccgctctacctgcgcggccgcgacgagaacggcgcaccgcaacccgtgtggggcgccatcgtggacacctatcgcaaccagaccaccggccaggtgctctcctgcgccaaattcctctacctgatgcccggcgacggccgcggcgacgtgcgccgacagtacgtggtctggggcaagcccgtggaccccaggcgcatggaccaataccgtgacgccccgttcacgccggcccagctcaaagccacctaccccgactgcctcacattccccagcgccgaagcgttccacacacacatctggagcgcaatgggcctgagcgaggccgcctgccgactgctgcacaagatccagtccgccgacgcgccctcccggctcgacgacatcttcaaacaaggcgtgctcggcgtgcccgaagccctggacctggcccgcaccacggtcgaggactacgaacgttacgacgagaacttccacgccatggacgagaagacccgccgcatggacacgctgcgcggcatccaacaggcctacggcgaatacgccgccgcacgcggcaaggcccgcgccttcgaaccggtcaagccggccgtcgacggcacggtgccggccgtgctgcgcgactgggcattggcccgcatgcgcggcgaagtcgccgtccaactgcccgccgatcgcgccgaacaacagaacagcgaggcggaagccaagctgctgcgccgccgaaccgaagacctgcgcacccgtctcgacatgatccgaggccagatgcagggtctggacggcggcgacctgacccgactcgaactcgaactcgaccaggcccgccgcaccctcgaagacgtgcaagccaaccgaacacgaatcgaacaaacgttcgcatccatcggcgagacgctgcccggcgacgaacaggcctggaacgaacgccgcatcaacgccgtgaacttcaaacgcgaatacaacaaacgagacggcgaatgcgaggaagccctcaccgccgccatcaacgcgcgggccggcgcacgcggcgacctcgaacgactgcaacgcgacttcgaccggcaacgctcccagcgcacccgcatctcccagcagatggacgaaacccgcgccatgctctgtcgcgccaccggactcacccccgccgaactgccgtacgtggccgaactcatggacgtgaacgaacacgaggaagactggcgtctcgccatgaacgtcgcctacgcgcccatcgcccagaccatcctcgtcgacaagcgccacgaacagggcttcgccgccaaagtcagcaccatcgacccgcgcaccatgccccgacgcacctggcagttcgtggacaccgcacgccactacgacgacaccggcgcgcacgcgaacatactcaccggagaacaggacggcgactggctgtccggcaaactgcgctaccgcgacgactcgcccttcgccgactggctgcgctcgcagacccaggacgaacgattcgacgccctatgcgtcaccgccatcgacgacaccgaccgcaccaaccgtcaggtgcaggccgacggtcagatcaaatccggcgcacgcggccagcacggcaccaaagaccgcgcccaggtcatcggattcgtcaacgaaacctacctcaacgcgctcgcagcgcaggtcgacgccgcccgcaacgcgctcagccaagccgacaccgactacacggccgccaaaacacagtccgataacctccaccgcgaactcgaactggccaaccagctcgcctacacgtcctgggagcgcatcgacatcgccggcgcgcaacggaccatcacggacacgcaggacgccatcgcatccatcaaaaacgatcccaagctcgccgaactcgccaaacagcgcgacgaactgaacgccgaactcgaccgtgtggaacgccagcgcatcgaatccgaccaggccgcggcccgcgccggcagcgccgtcgaagcggcgctcatctggctgcgcgaccatgccgacaccggcacgacggacgccgccggtgccaccgccgacaatgacgatgacgccgcgtccggcccgctgccggacgaagtcacggcggcgctcgccgaatcctacgacaaccgattcgccggactggcggacgccgccatgcgcgcgcacatgatcatcggcgcgggcgcggcaggaacgcaggctccgggggagagcttccccgaacgcaccatcgccggcatcggcaaggacatggcctcccgcatcaacctgctgaacggccaggccgatgccgcacgcaccggcgtcgaatcgaaaatgagcacctacatcgcgctctacgcggccgacgatgattcgctgaccgccagcgtggaggactaccggtactatctcgacgaactcgccagcctcacccagctggccgcggttgccgccaccgacgccgaataccggcgctgcctcgaacagctgctcaggagcttcctgaccatcaaacgcgccatcgacacggatgccagcgacatccacgaccagcttgaccgcatcaacgccatgctcaaaggccagcagttcggtcccaagcacggcagcctgtccctgcacgcggacgtgcgccgtcccgagcgcaccttctgggcgcagttcatccgcgtcatcggcaccctgaacgattggaaatccgccgacgtcaacgattccgacgcctcgcgcaaggctttcgcggcctgcgcgccgatggtcgggctgctgcgcgccgaactcgcgcaggtcaaggacgcgaacggcgtgaaaagctacggcgcccgcaacctcgacccgcgttgccgctcgtccttctacgccatcgtgcatcatgccgacggcccggatgaacgcatcacctccaccggcggccgttcgggcggcgccttgcaggagcttacctcattcgtatacggcgcggcgctcatctacctgctcggcggcggcctgaccagcgagccctcgtacaccacgctgttcctcgacgaggcgctcatcaaggccgacggccgttacacgcagcgcgccctcacggtgctgccgcgcctcggattccaggtcatcgtctccgccccggaaagcaagaccggcgaaatcctcgaggtctccaccaaggcctacgtgacctacaaggaccccgacaccggcctcacctccctgcgcgaggccgtgctgcatcagaatgacatggacgatgaatcatcgtcggatatattgaaggatgacggggttgccgaatga

SEQ ID NO: 42479 - DNA, 1185 bp, Bifidobacterium longum subsp. longum JCM 1217
atggccggcatgaaagacatcgctgcgatcaccacatgcgtgaagaaacatatgcgttcacatatgtacgacatcgaaccggcatggccatttcccgtgccggtgggattgccggaccaagcatttttggaaaccaatgcgattgcggtgcatgacaacaacaatgagatacggcaatgggcaagcaagaatggttgcgaaatcataaccaagcatcgcaccataggcacctctgtcgagctgatctccaaagtcgtcgttcctgacgaatcaatagccatgcgtgtggttggtcgtacgctggcggcggaatgtcgcgaagcgcgccgccgcatagcatgtctggttgctgcttgtgacgttgctccggaaacaatcgaatcggccgctcgcatgacaggccatgaacagcctgacgacttcgatctgcttgtcagcgcagttcgatatttcaggcatcatgacgtgaccggtatgacgccgcgacagattccactgacaggattcagcggcaaatggctgaatgagtcaaaaaccaatcgtcgtaaggccatttgccgactgctcggtgtcgaaacgttgggtctgtcaaaacggccgaccgaactgcggttccgttatctcgatccggtccgcgacgatgctgagctcgaacgcatcatatggtgtccgtgggaaggcgaagcgttatccggcattaaatatgctgtcatcgttgagaacaaagacacgtatcagactatgccgccgattgcgcagggcatctgcatatggggttctggtcgcgctgtaagcgatgctgtacctgcggttcctgcactgcgtgacatgcgtatcgtgtattggggtgatatggatgcggatggactggaaatactttcgacattacgtgaatcaggtatcgaatgcgactccatcctgatggattgcgatgcatacgatcggtaccacagatttggtaccgatcgtactgaacgcagcgcgaagattgctatgcgggagcctaagccgacgcccggccttcaatcggcggagcgacgtctttatgaacgactgtgtgctgacaaaaccatcgcttatcggcgcatcgaacaggaacgcattcccatgcgtgatgcagttgacgaattacgcaagcttggcatccccgtggagtccattgaaaatcaggatttgccgatttag

SEQ ID NO: 42480 - DNA, 1632 bp, Bifidobacterium longum subsp. infantis 157F
gtggccgatgtgatgcgggagctggaacggctgcgaccggtgtatgagacgggcgtcctgcggttgctgttgcgccagaacgcgatgctgtacgtgtcgctgctgcgttccacgttcgacccgctcaccggcgagctgccgcgcgagaccgtggaggagcggttcgcgcaaagtctgaacgctctggccgacgccggcgaatatgcgccgcgcgaggaccagaccttcgccgaggccgctcatcagatcctcgccgacctgacccgtgaaggcgaaggcgactacgcctggctcgccaactcgcatgatgcggcctcacaccgattcctctaccgtttgacggcccgcgcccaccgcgccatcgaggcgctgagcaggctcgaagacgaatcacgcgccctgtccggcgcgcaggccaacagcatcatcatggaaatcgagcacgcgcgcatgcagctgaccgccgaccccggcgagcgcatcaaactcctcaaccgtgaaatcaaggaacgcaagcacgagatcaaacgcatccaacagggcaagcagcatgccacgctgagcgaagcccaggtggaggacgtgatcgccgtgatccacaacacgctgcgcggcgtgcccatcgacctgcgcgaactcgtgctcgacgagcgggacaacggcgacgccttgcgccggcgcatgcaggccggcgacatcagcgtggacgagaacctgacccgctaccacgatgaataccgccgctcgttccgcgaatcagacagcggccgccgcttcgaggacgccttccaggtgatcatcaccgacgagggtcgccagcaaatcgacgaagccctgcgcgccatcgccaaaaccccgtatctggccggcgaatccggcgtgctgctcggccagatccgcgacgaactggcccgcatctacgacggcatcgaagccgtgcgccgccagatgcgcgtctccgacgaggcgatcagccggctcgtgcgccagcaaaccgacactcgctaccgtacgatgctcacccgcttgaaccgactgtacgcgcgcctcaacgcggatgcgaaaacccatatgggagacgcctcgcgcccgtacgacacggccacctcggacgcgctgttcgcgccattgccgatgcgcccggccaaatccatgacccgcgccaccgcacccggcctgagcgacctcgccgccgaagccccgcagtcgactccggtggccgatctgcgggacatggtcaacagcggcggcccccgactcctgcgcatggtcagcctcatccggcgcaacccggtgaccgttgacaggtccgatgacaggcccggcgcaaccctcgtggacatcgccgccagcttcaaccggctgcccgaaagcgaacgccgcgaaagcgagatcgtcggcttcctgggcgggctgggagccgtaagcggcaacgccatcgccgacgagccgtccactgacggcgtcggcgtcggggtcgacagcgacatcgccaccgagccggccccggcgcagcgcggcgataccgcgacctggcattgcgtatcgatcgacggcgagccccggaactggatcactagaccggtgctggccgacatggacgagctgagcatcattgtggaggaaggatga

SEQ ID NO: 42481 - DNA, 684 bp, Bifidobacterium longum subsp. infantis 157F
atgaccgtggccgaggaacacgaggaacacgaggaacacgaggagcatatggacaacgccaacccgtacgccctgttcgaaggcgacaccggcgacatgccggccgaggcacgcatggccgccatcgccctcaaacgtgaccgctatatcagcgggcccacctacgacaccgtgctcgacaaccgcgacgccgtcgtacgctccctgaacaacgacctgctcgacttggtgatcaacgaacgctaccgcatcatgtacgccacgcccgtggccggcgacgacgtgaccctgcgctcgctcaaaacccgtgtcagcctcaaacgcgaggaggccgcgctgctcgccttcctgcgcatccgcgtcctcgaatacgagaacgtgcacgccgaccccgccgactggctcgtcagctttgaggagatccgcgccgcgctcgccaccggcgccggctatctggccgcccgcaacgacgaggaaggcgtggcaaagcagatcggcgccatcgtctccgcgatgatcacctacgggtatttggtgcgcctggacgacgaagccatgtaccagatcacgccgctcgtgcccgtggtgctcgaccgcgaactggccgacacctggctcgacgtcgcggaacacggcgacggcgacacggaagatgacgatgacgacgagaagggagccgaatga

SEQ ID NO: 42482 - DNA, 3549 bp, Bifidobacterium longum subsp. infantis 157F
atgatgcaggcgacagacgtgcagatgatcgcggaccggtggatgctggaatcccgccgactcatcaactggggctcctatgagggctaccacgaattccgcccctccacggaccacaagctgccggtgaccctgctcgccggcgccagcgaatccggcaaatccacgctggtcgacgcgcagatctccctgctgtacccaaccggcacgccgttcaacaaggcctcgaactccggccgctccgaacgcagcgactacacctacctgcgcggcatggtcggcgtgggcagcaccgaaaccggcgacgagccgctctacctgcgcggccgcgacgagaacggcgcaccgcaacccgtgtggggcgccatcgtggacacctatcgcaaccagaccaccggccaggtgctctcctgcgccaaattcctctacctgatgcccggcgacggccgcggcgacgtgcgccgacagtacgtggtctggggcaagcccgtggaccccaggcgcatggaccaataccgtgacgccccgttcacgccggcccagctcaaagccacctaccccgactgcctcacattccccagcgccgaagcgttccacacacacatctggagcgcaatgggcctgagcgaggccgcctgccgactgctgcacaagatccagtccgccgacgcgccctcccggctcgacgacatcttcaaacaaggcgtgctcggcgtgcccgaagccctggacctggcccgcaccacggtcgaggactacgaacgttacgacgagaacttccacgccatggacgagaagacccgccgcatggacacgctgcgcggcatccaacaggcctacggcgaatacgccgccgcacgcggcaaggcccgcgccttcgaaccggtcaagccggccgtcgacggcacggtgccggccgtgctgcgcgactgggcattggcccgcatgcgcggcgaagtcgccgtccaactgcccgccgaccgcgccgaacaacagaacagcgaggcggaagccaagctgctgcgccgccgaaccgaagacctgcgcacccgcctcgacatgatccgaggccagatgcagggtctggacggcggcgacctgacccgactcgaactcgaactcgaccaggcccgccgcaccctcgaagacgtgcaagccaaccgaacacgaatcaaacaaacgttcgcatccatcggcgagacgctgcccggcgacgaacaggcctggaacgaacgccgcatcaacgccgtgaacttcaaacgcgaatacaacaaacgagacggcgaatgcgaggaagccctcaccgccgccatcaacgcgcgggccggcgcacgcggcgacctcgaacgactgcaacgcgacttcgaccggcaacgctcccagcgcacccgcatctcccagcagatggacgaaacccgcgccatgctctgccgcgccaccggactcacccccgccgaactgccgtacgtggccgaactcatggacgtgaacgaacacgaggaagactggcgtctcgccatgaacgtcgcctacgcgcccatcgcccagaccatcctcgtcgacaagcgccacgaacagggcttcgccgccaaagtcagcaccatcgacccgcgcaccatgccccgacgcacctggcagttcgtggacaccgcacgccactacgacgacaccggcgcgcacgcgaacatactcaccggagaacaggacggcgactggctgtccggcaaactgcgctaccgcgacgactcgcccttcgccgactggctgcgctcgcagacccaggacgaacgattcgacgccctatgcgtcaccgccatcgacgacaccgaccgcaccaaccgtcaggtgcaggccgacggtcagatcaaatccggcgcacgcggccagcacggcaccaaagaccgcgcccaggtcatcggattcgtcaacgaaacctacctcaacgcgctcgcagcgcaggtcgacgccgcccgcaacgcgctcagccaagccgacaccgactacacggccgccaaaacacagtccgataacctccaccgcgaactcgaactggccaaccagctcgcctacacgtcctgggagcgcatcgacatcgccggcgcgcaacggaccatcacggacacgcaggacgccatcgcatccatcaaaaacgatcccaaactcgccgaactcaccaaacagcgcgacgaactgaacgccgaactcgaccgtgtggaacgccagcgcatcgaatccgaccaggccgcggcccgcgccggcagcgccgtcgaagcggcgctcatctggctgcgcgaccatgccgacaccggcacgacggacgccgccggtgccaccgccgacaatgacgatgacgccgcgtccggcccgctgccggacgaagtcacggcggcgctcgccgaatcctacgacaaccgattcgccggactggcggacgccgccatgcgcgcgcacatgatcatcggcgcgggcgcggcaggaacgcaggcaccgggggagagcttccccgaacgcaccatcgccggcatcggcaaggacatggcctcccgcatcaacctgctgaacggccaggccgacgccgcacgcaccggcgtcgaatcgaaaatgagcacctacatcgcgctctacgcggccgacgacgactcgctgaccgccagcgtggaggactaccggtactatctcgacgaactcgccagcctcacccagctggccgcggtcgccgccaccgacgccgaataccggcgctgcctcgaacagctgctcaggagcttcctgaccatcaaacgcgccatcgacacggatgccagcgacatccacgaccagcttgaccgcatcaacgccatgctcaaaggccaacagttcggtcccaagcacggcagcctgtccctgcacgcggacgtgcgccgtcccgagcgcaccttctggacgcagctcatccgcgtcatcggcaccctgaacgattggaaatccgccgacgtcaacgattccgacgcctcgcgcaaggccttcgcggcctgcgcgccgatggtcgggctgctgcgcgccgaactcgcgcaggtcaaggacgcgaacggcgtgaaaagctacggcgcccgcaacctcgacccgcgctgccgctcgtccttctacgccatcgtgcatcatgccgacggcccggacgaacgcatcacctccaccggcggccgttcgggcggcgccttgcaggagctcacctcattcgtatacggcgcggcgctcatctacctgctcggcggcggcctgaccagcgagccctcgtacaccacgctgttcctcgacgaggcgctcatcaaggccgacggccgttacacgcagcgcgccctcacggtgctgccgcgcctcggattccaggtcatcgtctccgccccggaaagcaagaccggcgaaatcctcgaggtctccaccaaggcctacgtgacctacaaggaccctgacaccggcctcacctccctgcgcgaggccgtgctgcatcagaatgacatggacgatgaatcatcgtcggatatattgaaggatgacggggttgccgaatga

SEQ ID NO: 42483 - DNA, 1185 bp, Bifidobacterium longum subsp. infantis 157F
gtggccggcatgaaagacatcgctgcgatcaccacatgcgtgaagaaacatatgcgttcacatatgtacgacatcgaaccggcatggccatttcccgtgccggtgggattgccggaccaagcatttttggaaaccaatgcgattgcggtgcatgacaacaacaatgagatacggcaatgggcaagcaagaatggttgcgaaatcataaccaagcatcgcaccataggcacctctgtcgagctgatctccaaagtcgtcgttcctgacgaatcaatagccatgcgtgtggttggtcgtacgctggcggcggaatgtcgcgaagcgcgccgccgcatagcatgtctggttgctgcttgtgacgttgctccggaaacaatcgaatcggccgctcgcatgacaggccatgaacagcctgacgacttcgatctgcttgtcagcgcagttcgatatttcaggcatcatgacgtgaccggtatgacgccgcgacagattccactgacaggattcagcggcaaatggctgaatgagtcaaaaaccaatcgtcgtaaggccatttgccgactgctcggtgtcgaaacgttgggtctgtcaaaacggccgaccgaactgcggttccgttatctcgatccggtccgcgacgatgctgagctcgaacgcatcatatggtgtccgtgggaaggcgaagcgttatccggcattaaatatgctgtcatcgttgagaacaaagacacgtatcagactatgccgccgattgcgcagggcatctgcatatggggttctggtcgcgctgtaagcgatgctgtacctgcggttcctgcactgcgtgacatgcgtatcgtgtattggggtgatatggatgcggatggactggaaatactttcgacattacgtgaatcaggtatcgaatgcgactccatcctgatggattgcgatgcatacgatcggtaccacagatttggtaccgatcgtactgaacgcagcgcgaagattgctatgcgggagcctaagccgacgcccggccttcaatcggcggagcgacgtctttatgaacgactgtgtgctgacaaaacaatcgcttatcggcgtatcgaacaggaacgcattcccatgcgtgatgcagttgacgaattacgcaagcttggcatccccgtggagtccattgaaaatcaggatttgccgatttag

SEQ ID NO: 42484 - DNA, 1461 bp, Glutamicibacter arilaitensis Re117
atgcagccctcgcaccgcgcgaatagtttgtggcttcagtcccagcagttcaaaagctcggcagcgtatcggcttctgaccgcacaaccatgggcgttggcattcattcgtgcagaattcaccgcagatcgttcccgagtcgcattggaactgttccatgcctcgttggattctttcttaaagcaagcacgtaaaagcgatgaccagattccgtcctcatactcggcgcaggacttcgccgagacatgggtaaaacaaggaatcctggcgcgcccgctgatcgatggccggttcatctatgaaccgagcgcgcaaactttgcgcaccctgcgtttcctcgccgatttttccaccgatgattcgcacctgaactcatcgcgcctgaacactttactctcttcgctagagtccctcgcgcacgagacagacccggaccccgaagcgcgtattcgcgccctcgaatcccaaatcgcattgcgccaggcccaaatcgatcagctccgcagcggggatgatcctgctgtgctttcacgcaccacagccttatcggcgacccgctccgtactggatctggcgtccagcttgccggcggatttccgccgcatgcgcgatggcgtccaagatatgctccactctttgcgagaaggcattctggacgcttccaccgccaaaggcgtagctgtgggccaagttcttgaagcagatcgtcaattgcgttccaccgccgaaggtgaaaccttcagcggatttactgaattcctgaattctcccgacgcgcagcagcgtttccgtgccgcattggccgaagttctcgaacgcgacttcgtagatgatctggagactccagaacgccaaatcctcacgaatctgttgcgtgaactgcggcgccaggcagctgaagtccatgcttcgtatggcaagctctccgaatcattacacgcattcgtacagtccgaggattacaagcaagcagagctgctgcggcaagcagtgcgtgaagctgaactggcgatcagcaagtccgctagcctcaagccacgaagcggattaacccctatggagcttttcgccccgcagtttgtcacccttaccggtctgggcatttacgacccctcagagcacgtggctcccccacccctggcgcaagccccggaattcagcgaagcggatatcgtacgtaatccgtccactccccaggcagatctgccgttgctgcgtgaatccatcactcggaacctgaattgctccggctccggtgcgattaggttggatgccgtctttgaaactctggatgccgagcaccggcatttgaataccattcgcgctctggtggaaatcgggcgcaccaacggcgaatcgttgaacgaaagcgaactgctgaacatcgatttccaacaactcgatggttccatgcgaaccgccatactgcccgcattaagctttacgaaggagccgctatga

SEQ ID NO: 42485 - DNA, 687 bp, Glutamicibacter arilaitensis Re117
atgaccaagagcgattcatatgccgcaccgatcaccgaaccactgtttgacggcgacaccggaacattcacgttgccgcttcgccagctactggtcaggttgctgcgcggcccctaccttgatggttctgtggatgccgctgcatggcagctattgctggatcagcaacagagcatcagcgattacttcgctgaaattttcttggcattgagccttgatatggaccgcaaaatcgccatgctcaccccggtgcagatcgaacaggtccatacctctcctatcgctccgcggcgcccgctgaagcgtgatgaaacactgctggctttgcggctgcgtctgctgctcgaacagcattcgggcagtggaagtgacgccgtgatctcgcgtgcaggtatgcacgaggtcttggcagaacaccgccaagctaccgaccgcgatgacaagcgcttcgccgagtcctgcgatgctgcgattacccgtctgcaagccttgcgtttgctcactgggaccgagctggaaaatgagttccgcatttccccagccctggcgatggcattgccgatcaccaatatccaagacattccgcgctatattgcggcaatcgatgctaatgacccggccttcaatctgtcaggtgatgacgctgaaggcctagcagagcagacccccgagttggtgcaggagtaa

SEQ ID NO: 42486 - DNA, 3327 bp, Glutamicibacter arilaitensis Re117
atgagcattgaaatgactctcccactgggtggagccctgaacccaggccagcatcgcttgagccgagtgcagattgtaaattggggtacctttcacggattgcatgatctggccgtagaccgtgctggcactttggtcacaggtcatcccggcgtaggcaaatccactctttttgatgccatgggccacctcttcttcgcgaccccgcgcctgaatgagtcagccaatgatgcggcaacgcgtgaggaccgccgcacgacgttctcctatatgcgcgggcgcaagttcaagaccagcgccggaaccgtataccagcgtccgggcgcgacctggagcgcaatcgtgctcagctacgacgacggcatgggcaatactgtgaccgcaggtgcggtcttcgatctgcccgatgctggtctggaaggacaggtttccaagcactatctgctgtgcgagggaaagatcgatatctcggagcttgaaaaccacggaccacgtcgtttcaccgtgacttcgttgtccaaagcgctggcccccagtgaagcattcgatacccataaggcgtttatcgaacgcttacgccgccggctaggggtggaaagcgacaaggctttcgcgctgctgcgcaccttgcaaaatggcaagggcctggccaagggagtcaaccaattcttccgctacgaggttttggaagaaccagcgacattgaaagccgctgctgcggctgtggaagacttcgcccacctgcgtggcatctaccggcagttggataccgcccgcgcgcagcgagacgtattggctcaagtgccgcagcaggatcaggcctaccgttcgctagctgaacagatcaactcggtgcagcagttgctggaaagcgaagtccacacccttgaagctcaggtgcgccagctcgttttgcgtaatgatctggactcccacgaatctaacctcgccaagttcaaagctgacgaggcctcactgcgccagcgcaaagacgaactcgatgatcagctccagtccctggaagcggctcatgactccgccggttctgcatcgttgatgctgctggaacgcgaagccgatgtggcgcgcaagtccttgagcgaaaaggaaaatatcatccgcaccctgcagcagcaggcgacggatgctggattggcctttgacttctcggccaccggactcgatgaactgcgggccaacgcggcccgcaccctgcaacagctcagttcaatcactcatgacgcacagaccgttgagtatgaggcaatggcttcgctggtcaatttgcgcaagcgtgcagaaaccttggctgagcagatccgctcataccagcggcgtgcaagcaatatcgatgatcggtcaatcgctgcccgccgcgccatcgcatctgcctgcgcgttgaaagaagaccaacttccattcgctggtgagctcatggatgtatctgccgaagctggcatgtggcgtctggccgccgaaaaagctttgcactccttggcccgcactttgctggttcccggagaattcctcgctcaagtcacccatgccattgatcagctcgatggcttgggccgggtacggtggagcgacatttcccagaaaccacgcgatgccgaagcaggcccagcagatctggtgaccaaacttgattttgcacccggcgaagccggtagctggttgaaagcgaagatcaccgcagattacccgctggcctgtgtggaaaacgatgcggccatgcatgtgcatcccaaagccatcaccccggccggtaccatcaagaccggtgctggaagcttcgagcgcgatacccgcacgctgcctgcctcagagtaccttttgggcttcaccaatgagtccaagattgccgagctgcagtccaaggccacccggttggacgaaaagatcgtgcaggcccagcaagccgccgatgagcgcagtgctgccaagaataagatcgttgccaaagcccagctcttgcaggcgctcatttctgatgagcggacttttgcccagctcgatgcttccaaagcgttggaagctttgcgtcgcagcgaacagaagctcggcgatgcgttggcgctctccggagattcgtccagggtgcgccagcagattgaagcggccaaggctgaggctgaaacgctggtaggcgagcttgctttggttcgttcacgcatttcggatctggagctacaggtccagcgtgcccagcaagtcctgtccaacagcgatgatttggcgtccggctgggaagagaacattccaaatgcgttgcgccagcatcagcttcttggaccggttctgcagcaagttgtgtccggaaactgccctgcaagtgaagagatcagcgaagccttcgctgaggtcaagctccagttgggaagccaagtcaactcgctgcagtcgcagcgtcaggaaattggcggcacgctgagcgacactttccgtcgctttgcccgtgaattcggcacctctcatgcccagacgcacggcaccaccgctgaagctgctgggcactatgcacagctgcatgaccagattgtggctgacggccttccgcatcatgaggcgcagttccgtgaatacttcgcaaaccggtcttatgaacgcttcagcgatctcttgcagttgctggatgaagagcgccggatgatttccgaacgcatcaagccgttgaaccagattctgtccgaggtgacttttgagcatggatcagttctccgcttggaagcgactcaatcaattcctgttgaggcaggtaccttccgcaaggaattgaaggatgccctgcaggaggcttacaccaccaaggacgagtccacgttggccagttcgtaccaagctttggaatctctggtcaccgcgcttagcgacccggcgatggcctcttggcgatcgaccgtactcgatgtccgccagcatgtaatgattagctgcaatgagcacaaatccaatggcgaggtcgagactggtttggagccaggaacgctctccggcggtgaaggccagcgcttcacgtccttcatcatgggtgctgctttggcttaccagctgggctttgcttcggccgggttcacttcctacggcaccgtgatgattgatgaagcgttcatccaggccaactcagaatatgccgcagcaggcatacgtgcgttgcaggagttcggtttccatctggtgctcgctgccccagaagacaagatcgatctgagccgccatctgggatccatcaccgacatcatcaagcaccccggttcaaacatttcgggcttcgtgaccactggtcgctcccccgcgatggctacgacgattaccctgcgcagctag

SEQ ID NO: 42487 - DNA, 1449 bp, Glutamicibacter arilaitensis Re117
atgtctgcagtctacgccgctctcaccgctcagcggctcctaggcgaaagtcctgcgtgggcgctgctgcgcgccgacaatgccccggtggcattcgggattctcggcgccaggttttcccgccagcgccgccaggttcccgcaccggagctcatggaagcagttgatgcggatctcgacctgctgcgcgaccgcggattcgacctgccccaatctgcacagaattatgtgcgcacctggctggccggtggatacctggtgcgccggcccggcgaggcccgcgaagaactgtacgaactcagcgacggcgccctgacggcgctgcgtttcatcgaagacctggccaccccgcgcacctcggtgaccgaatcacggctggccaccatcgtgcagcgcgtgcgcgcattgaacgtggacaccgacccggatatttcccggcgggtggcggccttgacagccgaacgcgatgccatcgatgcccgcatccaggcgctcaccgcgggcgaactcaccgaggtcgatgagcagcgttcggtggatgcggccgcggacatcctgtctttggccagcgcactgcccgaagatttcgcccgggtgcgtgccgagctggagatgatcaaccgctcgctgcgcagccagctgatcgaggagcccgaatcccgcggcagcgtgctagatgacatcttccgcggcgtggacctgctctccgaatccgatgccgggcggtccttcgccgccttccacgccctgctgctggatccggaacggaccgtggcggtggatgacgacatcgaccagctgctcgcccggcccttcgcgcgcaagctgagggactcccagcggctgtccctgcgcgacctgctgcctgacatacagcgctccagcgcagacatcagcgacgtcatgaccgcactgggacgcagcctgcgccgcttcgtccaatccgaggaattggccgaggaacgcgcggtgcaccgccagctgcgcggcaccatggccgcggccgtccaggcggcgaaaacgctgcgcccgttcaccaagcttgatctggaactggagctgaccggactgcagatcgcctcgcccagcgcgataaaactgcacaaccccagcgaatcgcagaccgcgcagccgctgcacatccatgacaccgggaccgcggatctcgctgccctgcgcgaggcggtgcgcgcctcggaaatcgactttgccgaactgggcgagaacgtcaatgcggtgctcgcccagcagggcgccgcgaccattgccgaggttctggaaaagtttcccgccacccagggcatcgcctccgtagtgggattgctggtgctcgccgaaaaccacggcgtgcgtgccggcggcgaacccgaaccggtgcactgggccagcgacgggcagacccgccaggccaccgtcccccgtttcctcttccaggagaagatttcatga

SEQ ID NO: 42488 - DNA, 681 bp, Glutamicibacter arilaitensis Re117
atgaccgagaatcctgcaccgacggaccaggcagtggatgacagcgccaaccgggatgccagcctgtggtccggggacttgggcgaactggccgccggatcgcgccgcgtgctcgtgcaactggtcaaggggccctacctgtcggcagaacgccactcggaggcctggaaaatcctgctgaccgacaccgccgcgctgcgttcgcggttggccgacctgttcctggacctggtgctcgatgaatccctcggggtggcgttcgtgcgcaatgccccgcaggcagcgatcgaggcgccgcaggtggtgcgcaccatgccgctgacgttcatggatagcgccctgctattgttcctgcgccgcgagctgctgcgcggatcgggtgccacgcgcgtgttcatcggccgcgacgaggtctacgaccatctgaacagctaccgtgcatcggacaccaccgacgaggcagggttccgcaagcgcgtggattcagcgtggaccaagatgctcaagcattcgctgctggtgcgcaccgacaccgaggaccgggtggaaatctcgcccatcctgcgtctggtgttctccaccgagcagatccaggctgtgcaggaggaataccagcggctggcgggtaacacgcgggtcattgcgcagctggagcaggacgaggctgaggagactaaatga

SEQ ID NO: 42489 - DNA, 1149 bp, Glutamicibacter arilaitensis Re117
atgatcaccgtggccgaggcccgcgaacgcctgtccacgctgtaccggcgcaagctggcggcctggtcggtgcggccctttgacgccacctccccggtagcgctggggctgaagccgcccaccgataagaaagccgccgccgacatgtccgcggtggccgggtggctgaagcagtggagcgcggtggccgttgacgggctgcagatcgactgggagcagcggcgctggccgaacaccgggacgcaaagcatccccgtccggctgtccgcacagtcgcccgcggcgctggcccgtttcctgaaccgtggcaaggagtgggagctataccgtgcccgggcgttgcgcctgcagtcgctggcaccgcgggattccggggcacgggaggatttcgaccgtgccctggcccggatcatcggcaaggcagcagccctgccgcaccaggatttcgagcgggtcttccatgtcctcgcctggctgaccgcacacccggactcgggtctttatccgcgccagcttccggttcagggcattgactccaagtggctcgaacgccatgcagatattgtgcgcaccctgcacgttgccaccggaggcgatcccggcctggggctgctggccccggccaagctctaccgcgtcaggttcctggacccgcgcttggctcccgcgggaatgggagagctcatggcaagcccggatacgctcagccggctcgatctgtcggcccggaccgtgctcatcgtggaaaacttgcagaccctgctgtctctgcccgaactgcccggggtggttgcactgcacgggggtggttatgacgtgcgctggtgcgcgccgatcccctgggtggcggccgcaaacttgctgtattggggcgatctggatctggatgggctggcaatcctggcgtcattgcgcagcgtgcggcccgatgcccgctcggtgatgatggaccctagcacgcttcagcgcttcgcgcagctggcggtgccccatgccaagggactaacccgggcagcgccctccggtttgcagcccaaggaggtcgaggcctacaaattattgcgcgcccaaggcggactgcgctttgagcaggaacgcattccctgggaccacgcgctggctacgctgcgcaccgaactggggcgttga

SEQ ID NO: 42490 - DNA, 1476 bp, Microbacterium testaceum StLB037
gtgaccaccacccgcaccgaagccgcgtacctgcgctcggtgacggcgttcaagaatccgacgctcgaccttctgcacgggcggttcgcccccttcgtcgtcgccgtgctgtccatcgtcttcactcccgaccgtcccgccgtggccgtcgcggacgcgcacgtcgaggtcgccgaggcgatcgacgagctgcgcgcggcgggctacgacaccgacgacgatcgccggatccccgcgggctcggcgcgcgacatctgccgcggctgggtacgcgtgggctggttggggctgcagatcgaggacgacgtcgaggtctaccgcctctcggcacacgccgtcggcgccctggagatcgcgggtcgcgcgggcggcgggcgcgcccgtgtctcccggtcgcgcgtgcgcacgctgctcgacgccgtcgatcgtctggcccgggacgcggagagcgaccccgtccgccggcgcgaggccctgctcgaggagcgcgcggccctggatgccgagatcgcggccctcgacgacggcatcgtcgaacccctcgacgacgatcacctgctcgaggaggccgagaacgtcatccacctcgcccgcgagctccccgcggacttctcgcgggtggcggagtcgatcgccgcgatgcagcgcgacgtggtcgccgagctccgccgcgacgtgcgccccacgggcgaagtcctgcgcgagtacctcgagcggggccgccaggtgatgcaggcgacccccgaggggcgcgcgttccagggggcgcttcgcctgatcggcgatcccgagaacatcgacgacctcaccgaccagctccacgccgtgctcgcccagcccttctcgcggctgatgacccccgagcaacgcggagaactggatgccatcgcccgccgcgtcgaagcgggtgtgcaggaggtgctcaccgcccaacggcgcgcgtcgcacgtcatcaccgcgcaggtgcgcacgcacgacccgatccgcgaccgccaggtcgacgacctgctgcgcggggtcatggccggactccaccgctggagtcagacccgcgcgccggggcgcgtcgaaccggtgcggacgctgccgctcgccgacgtcgggcacctgcgccagtcgatcagcgacatcagacctgccggagcccccgagcccctggcatccggaaccgacgacgtcgagttcgtcgacgccgacacgcgcgcgtggggcgggccgcactacgccgagctcgaggcgtacgtggcgcgtctgggtgaggggttcgacctcgccgaggcgttctcgggagcggatgccgagacccgccgccccgtcgatctcgtgggtctgctcgagatcgtgcaccggagcggtctgaccgagacggacgaggtgtccgtcgtcgaggccgtgcgccccgacgggacgacgcggcggttcgcgttcggggcggtccgagcaggaaacgagagagaaagtacttccgatgactga

SEQ ID NO: 42491 - DNA, 699 bp, Microbacterium testaceum StLB037
atgactgacgtggacacgaccggacccgaaacctccgcgttcatctcccccgtcgcgatggagaacgaccccgacgcgctgttcgccggcgatcgcggcacgctcgacgccgacgtgcggcgggtgctcgtgcggatcctccagcgccggttcctgctcgccgagaactcccccgccgagtggaagctcctgctcgagcaccagcagatgatcgagtcgcgcctgaacgacctgttcgtgcggctcgtcgtcgatcacgcccgtggggtggcgtacaaggagcaggtgcgcagcgacgaggtcgacgtgccgatcctgttgaaggacgaggcgtactcccgcgccgagacgctcgtgctcgtctacctgcgcacggtcttccagcgcgagacgaccgcgggcacggcatccgcgcgcgtcgatgtcgaagaagtcgagcagaccgtgctgacgtacttcgccgagaccgacggcacgcgcgcgagccagcagcgcgccgtgcgcaccgcgatcgcgcggctggatcgcgagggcatcatcgaggaggagtccgaggggcgctaccgcatcggaccgctcatcgagatcgtgttgagcgccgagacgctccgagagctgcaggcctggctcgacgagcagaccgcgggttcctcggcatcctcctcccccgagacaccccagggagacctgctctcatga

SEQ ID NO: 42492 - DNA, 3354 bp, Microbacterium testaceum StLB037
atgaccatgctcgagaccctgttcggactcatccccgccgcctcgcgcggacagcagtgggtcgcggaagacctgcagctgatcaactggggcgggtacgacggcacgcaccgcgtgcgcttcgcgccgaccgcgaccctcctgtgcggcgggtcgggctcgggcaagtccacgctcatggacgcgtacgtggcgctgatgatgccgcacacgacccccttcaacggggcgtcgaacggggcggtcgtggggcgtccgcgcgggcaggagcagcgcaacatcctctcctacgggcgcggcaaactcgacgaatcgcgcaccgacgaaggcacgaaggtgcgcgtgctccgcggcgacggcgtcgacacgtggacggcgatcgcgatgacgtgggccgaccacgacggcgcccggttcacggcggtgcgcgcgtggtacatccccgcggcggcccgcacgctcgatgacgccgtcaaggtgcgcgcgaccgtgcacggggcgttcgatctgcgctcgctggagtcggcggcgcagaatcacctgtcggatgccgcggtgcgggcgacgggcctcgataccctcgcgaccgaccgggagttctcggcgcggctgcacgcggtgctcggcatcggcgcggcgggggccgggaccaaggcgatgagcctgctcgcgcgcatccaggccggacagcagatcaccacggtcgacgacctgtacaagcgcatggtgctcgaggagcccgagacgctcgcggtggccgatgcggtcgtgtcgcacttcgacgggctcgagtccacgcgcacgcgcatgatcgaggcgcggcagcaggtgcgggcgctgcagccgatccgcgcgatgaagacgcggatcgacgaggctgccgagcggctgcggctcatcgacgcgctcgggcgcttcggcgatccggaatcgcgcgcctcgctctggcgcgcgcagcggcgggtcgacctgctcggcgccgtggaggacgagctgcgcgagcgcacgcacgccaccgatgcgctcgtgcgcgaacggcaggctctcgcggatgccgccgaggccgagcgcgagggactcggcgacgtgctgcgcgcggccggcggcgaccggttggatgccgctcagcgcgaactccggggactcgagcggcgcctcgcggggatgcagcgcgaccgcgagcggttcgaggcggctctcgcggtgctgtcggtcgaggtctcctcggcgaaacagttcgacgccctggtcgccgacgctcgtcggacgctcgccgacacggatgccaagagcgcggtgcgcgacgcgttcgtcgccgcgagcagtcggcacaccgacctgcgccagcagctcgccgctctcgaggccgagcatcggcgcactcagacccgcgacgacaacatcccgccgcgtctgcatgaagcgcgcgaagcgctggccgaggccgcggggctgaccgctgccgagctgcccttcgtcgcggagctcgtcgacgtccgcaccgagttcgagccgtggcgcggggcattcaccctcgccctgggcggattcgcgacgacgttgctcgtcgatgccgcacacctttcggcgttccgctccgcgatcgacggcgtgcggctcagcgagcgccttcggttcgagggcgtgtcgacggggctgccggagcggacgggtctcgaccccgcgacgttgccggggcgcctggagtaccgccgctcccccttcaccggttggctgcaggaccggctcgagcagcagttcgcgttcgtgtgcgtggacagcgcccccgagctgacggggcatcgactcgccctgacgatctcgggccagacgagccagggcgcgcgcggggcgcacggcgggtcgacgcgccagagcatcctcgggttctccagtcgcgtccgcctgaccgagctcggcgagcagatcgtcaccgcgcggcgcgacctcgccacggcgaaggcggcggtcgacgaggccgcggcggccctcgacgcgttcgacgaacggcgcagcgcgtacgagaagatcgcggatctgtcgtgggaccaggtggacacggcatccgtccagcgcgagctcgatcgctggaacgagacgatcgtcgagatcaccgcggggaacccgcgtatcgcggagctgcaggagcagatcgacgggacgcgggcgcgtgccgcgcggctgcgcgaagagatcggcggggcgaagaccgagcagcaggcgttggcggcgcgatgggccgagatcaccgacgatgtggacagcgcgaacgagcgcctggagcgggccgaggacgccgagatggtgttgtcggcggacgaagccgcgtacctcgacgggcttttcgtcgcgccttccggggaggattcttcgccgtctcagcgtctcgcccgattcgacgcggctctcgagagcgcgtcccgcctcctgctcgaggagcagcgctccgcgcaggagacctggggcgatcagcgcgacagcctgcggcgcacgctcacggcgttcacggaccggtggccgagcccgaacctgctggccgacccggacgagtcgctcggcgatttcgagcggatccttgccgatctcgaagccagcggtctgcacgagctcgaggcggagtggcgtgattcgctgctgcggctgtcggggaacgatctcacgagcctcgactcggcgctcacgcgggcgcttcgcgagattcgcgagcgcatcgcgccgatcaacgacatcatgcaggatctgccgttctacgacgacgagcaccgcctgcagatcgtgccgcgcgagaaccagtcggaggtgcgtcggcggttccggcgcgagctccgggacgtgcgggcggcgatcgacgcggccgggtcggacgaggagcgcgaggccgtctacgggcggatggcgcggctgatcaatcgcatccggcccacggctcccgacttcgccgacctcgtcgacgtgcgcaatcacgtgcgggtgagcgccgagcgtttccgcgccgacaccggcgagcacgtcgccctgtacgaccacatcggcgagaagtcgggcggcgaatcccaggaactgatcgccttcatcgtcggcgcggccctgcggtatcagctcggggatgccggagccgaacggccccggtacgccccggtgttcctcgacgaggcgctcatcaaggccgacgcgcacttcaccaagcgcgcgatcggtgcgtggcgggggctcggtttccagctcgtcatcggcgcgccgaacgacaagtacagcgcgatcgagccgcacgtcgacgtcgagtacgacatcctcaaggacacgcgcgggcggtcgtgggcgaaggcgaaggtgggggtgacgccggaggcgtga

SEQ ID NO: 42493 - DNA, 1476 bp, Alicycliphilus denitrificans K601
atggcactggaccacctcaccctcacgacataccgcgatcggcatcctgcatggcgactgctggcctcgccacatgcgccattggtagcaagcttcctgtaccgggtgttcgttgcaccgaacgtgcggctgacgagcgaagcagatctggccgaaatgctggaagacgagctgtttgcgctgcgcgaacagctcggtgtcgaggtgtatccgaaaaccgcaaccgaatacctgaatgactggtgcgcactggacaagggctggctgcgcaagttctacaagcccggcaccgacgaggcccagttcgatctcacccccgccaccgaaaaagccatcgcctggctggtatcgctgaccgaacggcctttcgtcggcacggaatctcgcctgctgaccttgttcgcgctgctggagcagatcagcaccggaagccaggccgatccagccaggcgcctggaggaactgcgccgcaagcgcgacgagatcgacgccgagatcggccgcgtcttgtccggcgacgtgccgctcatggatgacacggccatcaaggatcgcttcctgcaattccaacagttggcgcgcgaactgctgagcgacttccgccaggtggaacacaacttccgccaactcgaccgcagcgtccgcgagaagatcgcgttgtgggacggcagcaagggggcgctgctcgacgaggtcatgggcgagcgcgacgccatcggggattccgaccaggggcgcagcttccgtgcattctgggatttcctgatgtccagccgtcgccaggaagaactgtccacacggctcgaccagatcctcgatctgcccgccgtggctgcgctcaagccggagccgcgcacccgccgggtgcaccacgattggctggaagcgggcgaacatacccaacgcatggtggcgcagttgtcgcaacaactgcgccgcttcctggatgacagggccttccaggaaaaccgtcgcatcctcgaactgttgcgcagcatcgagaccaaggcgcttgcattgcgcgacatgccaccgaccggcgaagtgatgctcctcgacgagatgggcgcggacatcgccttgccgcaggaacgccccctgtttgcgctccatgccaagccacgcctggcggaactgatacttgaatccggcgaggacgacgacatcgacaccacacgcctgttcgaccagcacgtcgtggacaagacccgcctgcgtgaggccctgcggcaggcattgcgccagcagtcgcagatcaacttgcgcgcgctgctggagacgcaaccgctgcaacagggattggccgaactggtcacctggctggaactggcccacgcgggcagccgcgggctggatggcctcagagccacggtggatgacgatgtgcaggagatcatcgaatgggccgtgcaggacgcgcctggctcaacggtacgacggcgggtgcgaatgccccgcgtgatttttacgcgttga

SEQ ID NO: 42494 - DNA, 675 bp, Alicycliphilus denitrificans K601
atgaacgatatgcaccaggatgatccagaaggcggcaccgagtcgcgcccgcccgttgtagcggaactctcgcaactgatggtgcatttgctcaaaggcgtgttgtaccgtcaggacgacgagcgcctatgggccagcctgttgagcctgcaagcgcgggtgcgggagcaggcggcggtgttgttgctggatctggtactggacgaagccgagcggtacgccttcttcaaaagccagccggagccggaggatgtggacgccacaccccgtccgccgcgcctgatcgcgcgacggccgctgtcctacccggtcagcctgatgctggccttgctgcgcaagcgcctggccgaagccgacgccggcggcggcgatacccggctggtgctgtcgcgcgaggagatcgccgaactgatgcgcgtgtttctgccggacggcaccaacgaggcgcgcctcgtcgaccaagtggattcgaccatcaccaaggtggtggaactgggctatctgcgcaagctcaagcccgttgccggcgcagctcagcaggcacctcgctacgaggtgcggcgcatcctcaaggcgttcgtcgatgcacagtggctggccgacttcgatgcgcgcctggagggctatcgcaccgcattgtcaggtgccgatcgcgacaaggaagctggccgatga

SEQ ID NO: 42495 - DNA, 3378 bp, Alicycliphilus denitrificans K601
atgagcgatttttcgccacaggagctcgatttcgtggccgacgacagccgcgtcggctttcgcctgcagcggctggaagttctgaactggggcacattcaaccggcgcgtctggcgctatgaactcgatgggcgtaacggcctgctcactggtgacatcggttcgggcaaatccaccctggtcgatgccgtcaccacgctgctggtgccagcgcaacgcatcgcctacaacaaggccgcaggcgccgagacgcgtgagcgatcactgcggtcctacgtgctgggccattacaagagcgagcgcaacgaaaccaccggcagcgcccgcccggtggcgctacgcgacaccaccagctacagcgtgatcctgggtgtattccgcaacgaaggctacggccaggcggtcacactggcgcaagtcttctggtttcgcgaaccacagggccagcccgcgcgcttgttcatgaccgtagagcgggaactgtccatcaccgagcacttttccggattcggcagcgacatcaacggcctgcgcaagaagctgcgcgcgatgggctgcgaactgaacgacagcttcccgccctacggcgcctggttccgccgccgcttcggcatcgaacacgagcaggcgctggaactgttccatcagacggtttccatgaaatcggtcggcaacctgaccgatttcgtgcgcagccacatgctcgaaccgttcgacgtggggggccgcatcgaggcactgctcggccatttcgatgacctcgaccgcgcccaccactcggtactcaaggccaagcgccagatcgagttgttgacgccactggtggacgatggccgtcgccacgccgagatcgccgccgagatccaggcgttgcgcgaagggcgcgatgcactacgcccgtacttcgccggcttgaaggcagcactgctggagaggcgcctggaattgttgacccaggatgcgacgcgctgggatgcccgcatcaagcaactgggagagcaacgagacaacgcccgaatcgagcaggggaagctcgaaggcgcactgcgcgagaacggcggcgaccgactgcaacaactctctgccgccattcagcagcaggaggcagagaaacagcaacggcaggagaaggcggacgcctacaccacgctattgacgcgcattggagaagcagcgccgggagacgaagctgctttcatctcacaacatgcctcgatcggccaacgtgcagaggatctgcgggcgcaggtggtcggattagagaacgatgagcgcgaattcgagttcgccttgcgcaagggacgtgaggagcacgaggttctgaccagcgagatcgacagccttgcgcgtcgaaaaagcaatatcgatgcggcccaggtacgcatccgcgacgcattgtgcgccgccttgtccattgccgaggaggacctgccctttgccggcgaactgatccaggtgcgcgaggacgaacgcgactgggagggcgcggccgaacgcctgctgcatggcttcggcctgtccctgctggtgccggataggcactacaaggacgtggccgattgggtcgaacgccagcacctgggcacgcggctggtgtacttccacgtgcgtgcgcgcaagtccacgcaggccgtcagcctgcacccccagtcgctggtgcgcaagctgctcatcaagcccgatacgccgcactacgactggctggaacgcgaactgcaccaccgcttcgacctggcctgctgcgacagcaccgagcagttccgccgtgagacccgcgccatcacccgcgccggacagatcaaggacccgagcggacgccacgaaaaggacgaccgccgccgcatcgacgatcgaagtcgctacgtgctgggctggagcaacgccgacaagctgcgcaccttgcgtgacgaacgtgagggcctggagcaacgactgggagacatcggtctgcgcattgccgacactcagcgattacgcgggcaatgccaggcgcaactggaggccttggccaagctcgaagtcttcacccgctacagcgagattgactggcaggcaccggcgcgcgagattgcccggctgaccgatgaacgcgaccgcctcaaggcggcctccgataccctgcgggaactggaaagccaactggcgcaggtcgttgagcgcctgaaggagatcgaaggcgatcttggcgaggcacaaggcaaacgcggcgaaacccgcagcaagcacgaaactgcccaggcacagtatgcgcaggctctcgatatccaagcgcaagccgcactcgacgatgtgctgctgcaatctcttgagggctggcgcgccgaaatcctgggcgaccaccagctctcggtggaatcttgcgacaaccgcgaacaggacgtgcgcaacggcttgcaggcgcgcatcgatgccgaagacaagcgtctctcgcgcctgaccgaacgcatcatcaacgccatgcgcggtttcaaggaggccttcaaggcagagaccgccgagatcgacatcagcctggccgcgctgcccgagttcgagcgcttgatgaagggtttgcagcacgacgacctgccgcgcttcgaagcgcgtttcaaggagttgctcaacgttaataccatcaatgagatcgccaatttcaacgcccagctcgcgcgcgagcgggaaacgatcaaggagcgggtcgatgtcatcaaccaatccttgcaggtgatcgactacaaccccgggcgctacatccggctgctggctcagcccagccccgatgcggagatccgcgacttcctgcaggatttacgtgcctgcaccgaaggcgcgctgagcggctcggaagacgaacagtattcggagactaagtttctgcaggtcaaggccatcatcgaccgcttccgggggcgcgaaggactggccgaaatcgaccggcgctggatgcagaaggtgaccgacgtgcgcaacggcttcctgttttccgccagcgagcgctggcgcgaggacgatgccgaacacgaacactattccgactccggcggcaaatccggcgggcagaaggagaagctggcctataccgtgctggccgccagcctggcctaccagttcggcctggaatggggggcggtgcgctcgcgctcgttccgttttgtcgtgatcgacgaagccttcgggcgcggctcggatgaatcggcccagtatgggctggaactgttccgccagctcaagctgcaactgctgatcattacgccgctgcagaagatccacatcatcgagccctacgtgtccagcgtcggcttcgtgcacaacgaaggaggccgcgagtcgcggctgcgcaacctgagcattgaagagtatcgtgcgcagaaggctgctgccacgggagccgccccatga

SEQ ID NO: 42496 - DNA, 1206 bp, Alicycliphilus denitrificans K601
atgacctggagccagcccaccgatctgcgcacgcaggtcgaacggctgtggcagcgcggcgaactgctgcgtaccgtggtcggcggtgacacactgaattggccattgcggctgtcgctgaagtcgccgtccgccgccgatctcagccaccgtttcgatgccgtgcgcggctgggtgcgggagatcagcgccatgccgcgcgtgcgcatcgaatggcgcgagtggacgcaccgggtgcagggccggcagcgcctgccggacacgctgtggatcgatacgttggacgatgcactggcgatgatcggcaagaccggcgatgccgtccggttccaggcgctctggcagcaaactgccgaagcgcaacccacactgctggcatggctgcacagatcaccgttgcagaccttggcgctggccgaacactggccacgcctgctggccgtggtggcctgggtgcaagcccatccgcgcccaggcgtctatcttcggcaagttgacgtgccgggcgtggacagcaagttcatcgaagcgcatcgcggcatactgggccaatggctggacctggccttgccgactgaagccattgagcctgctgcaaccggggtggccgggtttgcccgtcgctacggttttctggagaagcccgttcgcatccgcctgcgcttgctcgatccgcaactgccccagcttcccggctgcacgggactgaccgacatcaccctggatgaagatagcttcgccacgctcgccctgcctgcgcagcgtgtcttcatcaccgaaaacgaggtgaacttcctggcgttcccaccggtctccagtgccatcgtcgtgttcggtgccggctatggctggggggcgctcgcccgagccaactggctgtatcgcgcctctctgcactattggggagacatcgatacccatggctttgccattctggacagcctgcgcaagtatttccctctggccgcgtcgttcctcatggaccgctccacgttgatggcccacgcactccaatggggtgaggagcccctcgacaaacgccatacgttgcccttgtcccgactggtcgatgaagaggccgctctctacgacgacttgcgtaatgaccgaatccggccacagctgcggctggaacaggaacgcatcggctatcgctggctatgcgcggcgttggcgacaacagtccaggacgattctcggccgtag

SEQ ID NO: 42497 - DNA, 1398 bp, Lachnospiraceae bacterium 2_1_46FAA
gtgaatttaataaataaaattccaacggagttttataaactttttgcaagtaaatatagagcgtattatcaaaaatttctgttggcgatttatggagaaacgagtaaatcttactctcttttaggattaaccgaagaggaatgcaaatgcattatgaatgaaaatatagcggatatggtgctggaatggagtgaagaacaggcagatgaggaaggcgaatttcttacaagggcaaatatggcgtccgtatgtctgaaaaatttggaaaactggggctggcttcacagggattacgatgagaccttaaatcaatatgtcgtatcctttcctgaatacagccgtttatatgtggaactttttgaaaaactgttcagcgaggaaggaaacagggagagagaaagtgtacttgccgtatacagtcatttgtacacatacagttcggacatggagaagaacaatgatattttaaaaagtgcatggaatacgtcacgcacccttgtacagatgcttgcaaatatgcaggagggaataagggggtactttgatgaactttccaagcagaaaagtttcttaggcattcaggaagtgcttgtaaaagaaatcaataacagtgacagcagaaaatatgcgattttgactaccacagacagtttttaccgatataaagaggcggtaaaagaactgatagagaagaatttgggtgaaaatgaaaagagaaggcagtcttttatgaaaaaaagactgcagtttgagaaggacagtcctcagtatgcgaggaatgaaagagcgatagaactgtgcgaagaggcgatggatatcatttacagaattgaacgcgaatttgacacgattgagagaagatacaacaaactgattgagcagaaaacaatttttgccaaccgcgccgcagcaagaatacgatatcttctaatggaaggggtagcggaagaagacggaacggttgcttttgtaaatttactaaatcagagcagcaagagggaggaaattcttgcaaaactggcagcgggaatgggtatgaccgagaggtacagagaggttaccgataaaagtatgtacagacagaaaaacacggataaagaaaaatttactcctgcgacagtaaaagagattcctgttgaagatgagggattggaagaatttatattaaaacctctctatacgcagaaagaaatcagagatttccgcaggaaaaatgagaaagccggggaatttatcgtaacggaaaacacggttcagtcaatcgaagatttggaaaaactgttttttgtatggcaggaagtgaccgagcgtgcagagagcgatgcggacgtggcaatagaagaggaagtggagacaaaaggctttaaattttcaaaacttagaataaaggagaaataa

SEQ ID NO: 42498 - DNA, 639 bp, Lachnospiraceae bacterium 2_1_46FAA
atgtttaaatatatggaagaactgtcgctgacagagacggaaaacttaagaaaaacaatatcgaacctgtttaaacagacatgtattttacaggtaaaatacgatccggtaacattgacgccgagggacaacatttattatgaaatgtgtgtaaggcataaaaaatttatcgaagattatttgatggtacttgggtgcgaacttacacacgatccgcaggagcatattttccgtctgaccggagagggagtggagacggaaaggttcagccttacaacaacgattattattttaatgataaagatgatttatcgggacaagattctcggggaagggctggaagcgacggtaactacgttggaggaaatccgcgagtacgggaaaaatacaaatcttctaaataagaagttaaaagtggcagagtggcatgaggcactctatcttttgagtaaacatcagatgattgaacttccgggggcagtgcgcgatgtggaagatacaacaccgatttatctttacagtacgattaatttatattgcagttcattaaatatcaatgcgctgttggaagaatacagagaggaaattgttgagaatgaaacagtcgaagaaaatctttacgaaaatgttattgaataa

SEQ ID NO: 42499 - DNA, 3384 bp, Lachnospiraceae bacterium 2_1_46FAA
atgaaacagtcgaagaaaatctttacgaaaatgttattgaataactggggcgggatcagccataaagaattggtatttcatgaatatgtcaatctgttcagcggcaaaagcggttcgggaaaatctacggttatggacgcaattcaggttattctatacggaagtgtggcggcttcctttttaaataaagcggcggacgatgcgaaaaacagaagaagtgttttaagttatcttaggggcgagcagaaagatgggacggcaaaccgtgacggtatggatttttgttcccaaattgtcttggaagtggaagacagatcaacccatattgtgacatgtatcggagtcgcttttgaggtaggaaaaaaagacctagaattgaaacgctatagttttttcagccattcgggaagactcgccgaggacggatatatagcggaggacggaagcccgtacacccttgcccgattaaaaaaactaattgagagaagaaaagaatcagaagataatcggggaagaggcgatgtaaaccgcctgtatccgtcaaaagaatcgtatctgaatacactttacgatgtgattttaggatacattgagccgggacgctttatgacaatggaaaaaagtgccattgcacttcgcatgacaaacggaacggggcagtttattcgagattatatgtttccaaaaagtaaagaaggaacggtgtctgtgatcagtgaacaactgggagcgtatcgcgaaattaaagaacgggtggaagatttggaaaaccgtatacaactgcttgaaaatatcagggaacacaacctgaacctgattcagtttaagagcgatgccattcgcacacaggcaatattgaaagtaatcacaatagagagtctcaaagcacagttacagtcaaaaaaggaaactttagagtctgttattgatactgtagaaaagattggggaaacatgccggattttagaagaacaggagaataaatgttttgaagaaaaggtggaaattgaggcacagattcgggcgagtgattatggacagaaagaaaaagaattggaagaaatacgctatacgatagaaattttggcgggaagttccgctcagtggagagcagtgcttcacggactgagtgcatgggaagagaatgaagatataagcgcgtatctctcaaatccggcattacacacaataagagaggttacggaaggaaatgtaacggaagaaattcttacaaaactgaagaaatatttgaaggatacgctggaaaatattgaggaagagttacaggagttacagtacagcatacgaaaaacagaaaaagagttagccgagaaacaagaaattatcgaagatttaaaaaatgatagaaaaccatataaaaaggaattgaaaagggccagagcaagattgcagaatgcgttaagtgaccgctatggacgaacaatccatgtgggaatctttgcggatttgtttgatattaccgatgaaaaatggaaaaatgcaatcgagggaagattaggacgaataaaatacagtcttgttaccgcaccggagtatgcgttagaggcagcgacaattttccgaaaaatgcgggaaagagaatttgaagaagtcaatctcatcaatacagcggcaattaaaagagatgagccgaaagcaagggaaaatacattgtacgaggcagtaaaaacaagtgaaacttatgtggatttatgcctgaaacaatatttgggaagaatagtcaaatgtgaaacaatagagcaattacatgaagtcagagaaggtgttacaccggactgctactcttacagcaactatatgttccgtcacctgagagaaaaagactacggagattactcgtgtatcggaacaaaagtatccaagttgaaattgcaggagttggaagatgaagcgtacctcttaaaaaaacaattgaaggcggacaggcagatgaaggacagcctgaaaaaagcaagaacatttgagcagttgaacaataaaaatgcggaacaattgattcaaatgtctaaagcatcggaagatttggaaaactactataaaaaagaagagaaactgattcgggagttacaggaattaaatgcgggtacgcttttgccgcaactgaaagaaatgaaaaggcagttggaagaaaaaattgagacacttcgtgaagagttgcaaaagagaaacaaagaacatctggagcgtattaaaatacagggaaatgcggagacagaactgaaaacagtggagagcagactggaagacgaattacaggggtatgtcaaaaacgaagcacttgagcaggaagtattgcgggaactggaaacgaaaaatgaatatacttaccgcaggcagaaacagaaagaattagaaaaactggacaaggctattgaggaagaaacggaacaacgtttaacagccagagatgaatttaaccgtcagtattctgcatatggatttacaggaagagagcctcagaacgatgtgtacgacagagtgcttgaacagtgcaaaaaagactttgaaccaaaatataaagcggagtttgagcagcagtatcatcttgtataccatactttacgggaaaatgttatcgcgacaattcacggggaaattaaggcggcatttcgtcataaacgggagataaaccgaatgcttggaaaaattcgtttctccgacagtatttaccagatagatattcttcccgccgaaaatgaaaacagacaattttacgaaatgcttatggcaccggaattggacagcaaagtgtttgataatcatggatatgaagggcagttaagtttgggagaagatgaattttatcaaaaatatgagacacagattttaaggcttacggaaaaattcatgccgccgagagatgaggacagcggaaaacgtgcagtttacaaagaagaaatggagcgctatgccgattatagaaattatctcaatttcaatatgtatgagcaggttgaagatgaggacggaaacataagaaaaaatgcggttgatgatatggcgggaagagattccggcggagagggacaaaacccgaaatatgtggcgcttcttgcaggatttgcaatgctctatatgaaccagagcaacagagattcaaaaatccgccttgttcttttggacgaagcattttccaaaatggacaaggaaagaagtgaagtatgccttcattatgcaagagaactggaactacagttgattgtctgcgtgcctgatgagcgtctgcagtcacttatcagaaatgtggacagcgtatacggattccgcagacatcaaaatcaaatttccatgatgcacattgacaaaggcgattatctgaaaatgattgaaggtgaggaacatgaaaaaattgctgacgcttag

SEQ ID NO: 42500 - DNA, 1194 bp, Lachnospiraceae bacterium 2_1_46FAA
atgaaaaaattgctgacgcttagtcggtggataattgacaaaacaaatgtggattcctatcgcgccgggcggctgcagggggaaaaacacccctgcatagaccagtcgcttttaaatcaactgggaggtatggcgaacctgttgaaacaggcggaagaaatggagagagatgcgggcttaaacaaatatatccggttcgattggagagatatgggaaaagacatcaccaaaatgcactattccatagacattattcctcttctctgcaaaaaagagggaattgaagattctctggaaaagcagagaagatatatagaaaaaatagaaaatctgttatcggaagtttcgcgggcggagacaaattggctgtattcttactacaattctcttttggtcagattgaaacaggggaaaaatgtaaaagaaatggaagatgaaaccttattccgctgtcttcagggaatggcagctatacaaaatcctctttggaaacgcattttcagtgcaaatgtccttgaaaattccaagaaatttgaaaaggaatacgaaacaaaagtggttggaattttgcgaatgtattccgatttgccggataaggacgatatgacagacgaagaaattttaaaaagttatggaattctttcctatgcacaagtcttggagtggaaaggtacagttatttataggttagatacaggtaaaacagttgatacgagtgatttttattatggaacaattatcaactcacagacattggaacattctaagccgatagcaattccacatatacgaaaaattatgacgatagagaacaaggcgaattatgaaaatatggtatatgaaaaggatacgctatatatttactgtcatggttttttctcgccaaaagaagtgaaatttttgaacgaactcacaaaactgacagatgaaaatgtggaatttttgcattggggagatatggatttcggtggtattcgcattttcttattcaataaggaaaaaatttttcctaaattgaaaccatataagatgggtagggagtgttttcttgaggcaatcgggaaaaatgcggggattgatttggaggaaagaaaaagaagaagccttgaagagatgaaagcgggggaactggaagaattaaaggaatgtattttgaagtatggagtggagatagagcaggagatggtaatatag

SEQ ID NO: 42501 - DNA, 1452 bp, Lachnospiraceae bacterium 3_1_46FAA
atggaaaggatccccaaagatttttataaattattttcaagtaaatatacggattactatatgctgtttctcacggcaatctatgaggaaatgagtctgtcttattccgtgcttggattgacggaaaaagagtgcagggcagttatgaatgaaaagatcgcggcagcggctcttctgtgggatgaggaaaattatgatgaagagggagagtttcttacacgttctaatatggcgtccgtgtgtctgaaacattttcaggagtggggatggctgaaacaggactatgacgaggctttgaacagttacgttgtgacatttcctgaatatagtcagatgtatgtggagttgtttaggagtctgcttgatgaacaagagagcgaagagcgggaaagcgttatgacgatatacagccatctgtatacatatagttccgataaagaaaaaaataatgagattttaaaaagcgcccttcgtgtttccaaaaagcttgtgcagatgcttgtaaatatgcaggacggtatgagagggtattttgatgaactgtcccgtcagaaagattttcggggaatacaggacgtccttgtaaaggagatcaataacagtgacagccgaaaatatgcgatcttgacgacaacggacagtttttatcgatataaagaagctgttaaagaactgcttgacagaaatttacaggaaaatgatatgagcaggctgaaactgttgcgagaactggaagaggtccgtcaaaagaagatgaaagacgaagaaaacgcgggaaaagttaaagatccgaaaaaaacagatgaggcggagaaaataaaagaactgcggctggaacgggcggcggcaatgtgcgaggaagcggcagatacgctgatacgaatcgaaaggcagtttgatgcgatcgaaagaagatataataaactgatcgaacagaagacgatttttgcgtccagggcggctgcgagaatacggtacgttcttcaggaaggagcagaagaagaccgtacggttgcgcttgtagatctgttgaataaaagcaggagaaaagaagaaatatcggaaaaactggcggagcgtatccgccttagcagacctcacagagcgttgacggatgaaagtctgtacaaacggaaagaaaaagggagagaagcgtttgttccggctgctgtttcggaaggcggacaggcggaagaaaatttggagtcgtttgtcttaaaaccgctttatacaaggaaagagctgcaggagttcaaagaaagaaacagtgtcggaaacgtatttagaactacgcggcagacggttcggtcggctgaagatttggaaaaattgttttttatatggcaggaagcgacggaaaatgcgtttggcagtggggagatcaccgtaggagaggaagaagaaaccgaacagggaatgcgtttttcaacgctggaaataagagaggactaa

SEQ ID NO: 42502 - DNA, 639 bp, Lachnospiraceae bacterium 3_1_46FAA; identical to SEQ ID NO: 42117

SEQ ID NO: 42503 - DNA, 3366 bp, Lachnospiraceae bacterium 3_1_46FAA
atgaaacagccgaagaaaatttttacaagaatgctgatcaataactggggcggcatcagccataaaatgttggaattccacgagtatgtgaatcttttcagcggaaagagcggatcggggaaatcgacggttatggatgcgatacaggttgttctgtatgggagtgtgtctgctaattttctgaataaagcggcagatgattctaaaaacaagagaagcgttttaagctatcttagaggagcgcaaaaagacggaacggcaaacaggggagacgttgatttttgttcacagattgttcttgagattgaagataccgccactcatattgtgacttgtgtcggggcggcgttcgaggtggcaaaaggggatacggatctgaaaaaatatacttatttcagtcattcgggaagaattccaaaggatgaatatttggaaaataacgtaccttattcgatcgcacagattagaaaacttacggaagaaagaagcagaagcgccgataacagaggccggggtgaagtaaataaagtgtatccgtcgaaagaagcttatctttatacgctgtacggggaaatcttcggtcaggtagaacaaggtcgtatgatcacgatggaaaaaagcgccattgctctgaaaatgacgagtggaacaggtcagtttataagagattatatgtttccgaaaacgaaagaagatacggtggcgacgatcagtgaacagcttggcgcgtacagagagatcaaagaacgggtggaagatctggaaaaacggatcgaaatgctggataagatccaagtatatgacagagaactgacgaatgtgcgtgcggagaaagtacgaacggaaacagtgctcaaatgcattgatatcgaggaaaatataattcgactcaaaggacgggaaagtgagttggaatccgttgaaaaagaagcggacgaggcgaaaaaagaacagaagatacttcaggacgaactgcagacgatacgggatgaaagagcccgggtacaggcagaattaaataacagcgattatggaaagaaagaacaggaactaaaagatttagaatacagaattgctcttctggcggataattcggcacagtggcggcagatcgtgaaaggattgaaacgatgggaagaagaggatgttgtcactgattatgtgagcaacagagctcttcagcttattcaggaaatacgaggcggagcgcttacggaaaagttatgtaaagaactgaggacacatcttgacttggcccttgataatattacaaatgaattgtcggaacttcgtatttcgatccatgaaacggaaaaagacatcaaagaaaaacaagatgctgtcgaagatctccaaaacgacagaaaaccgtatccgttggaattgaaaaaggcgagacaggaactgcagcgtgcgttgagcgacaggtacggaaggaaaatcgaagttcatattttcgcggatttgtttgatattacggatgaaaaatggaaaaatgcgatcgaaggacggcttggcaggattaaaaaaagtatgattacagaaccggcatacgctcttgatgcagcgaaaatctttcgcaggatgcagcagtttgaagaagttgatctgatcaatagtgaggcggttcaaaaggattctccggaagcggacgaaaactcgctatataaagcggtacacgcagaaagcggatatgttgaccggtgcttgaaacgttatcttggaagaatacaaaaatgtgagacggtggaagagttaagtacggtaaaagacggagttacaccggactgttattcgtacagcggatatatgttccggcatctgcgcaggaaggattatacgaaaaatgcatgtatcggtacaaaagtatcgaaggcaaagctaagagagctgcaggaggaaattatagatcttcaaagttcgctgatcgcagatcgtcagacggaagagtcgttgaaagaagcccggcaatttgaacggttcggtcaggaaccggaacatttgatgcgtcttgcgggtgcggcagacgaactggccgatcattaccgccgccaagaccggctcaaagaagaaatcaaagaactgaaaaacggaactttggcagcagaactgcaggctaaaacgaaagaacttacaagccggattgaagaaaaagaacaggtggcaggaaggttaagagaaaaagaaatcgaaacagggaagaaaaagggcaaactggaagagaaaattaaagcgctgaaagaaagactcgattttttgatgaagggatatgttccgaatgatgagatatttgccgaagtgaggtcggctttggaaacgaagagcgaagcggcttataaaaaagagatgacagtgatggcggagaggctttttgagaaagaaacaaaacttcaggatgagcggataaaatcaagaaatgcatttaacaatacatatcccgcatatggattttcaggtgtagaacatgacaatgaagtttacgacaaagttttggagcgatgcagaaaagattttgagccgaaatataaagaagaatttgaaaaacaatacgagctcgtgtaccattctctgcgcgataacgtgatcgcaacgatacacggggaaatcaagtcggcatacagacatcggcgtcagatcaataaaatgctgtcgcagatccgtttttcggacagcatttatcagattgatatctctccggcaaaaaatgaaaacggacagttttatgagatgcttatggcagaagaactggacagcaaagtaatagatcatagtgggtttgacggtcagatgagtttgatggaagatgaatttttcagaaaatatgaaaggaagatcggacttcttaccgagaaattcatgccgtccagagaggaagacggggcagggcgtgaaaagcacaaaaatgaaatggaacgctttgctgactacagaaactatttggactttaatatgtatgaacaatctatcgatgaaaacgggatcgagaagaaaaattatgtggatgacatggcgggcgtcgattccggaggagagggacagaacccgaaatatgtggcgcttcttgcaggattcgcaatgctctatatgcagcagagtaatcgggattcaaagattcgccttgttcttcttgatgaggcattttcaaaaatggataaggagcgaagcgaagtctgcttaaaatacgcaagagaattggaacttcagttgattgtctgcgtgccggatgaaagacttcagtctctgatccgaaatgtggacagcgtatacggcttccgcaggtttagaaatcaggttacgatgatgcatattgacaaaggaaattatctcgatatgatcgcaggggaaagcagatcggaagaggtgtag

SEQ ID NO: 42504 - DNA, 1233 bp, Lachnospiraceae bacterium 3_1_46FAA
atgagcggcaatttgttggcaaagtggattattgggaaagcggaaaaaagtgaagcttatcgggcgggaacgctgacaggcatgaaacatccgaaaccggacagagaaatgatcaaggcagcaggtggcttgcctgagctgatcagacaggctgatgagttggagaaaagcggatatatccggacagaaaaaagcaatctgggcgcggatatgaaaaaaatctattattccatagatgtcattccaaagctgtgcgaaaaagaaggaattgaagatccaagaaagcagcagcttcgttatataaaacaaatagaacaactgcgcgctgaggtacaaggcagttttttggaaggttattatgatgagatcataagacggttggaacttggggagatcgtaaaatcacccgatatggaggacgttgattttttccgatgtttgaatgcagttgtgaatttgaaaaaatctctgtggatgcgcgtattcagtgctgctgtgcttaatgactctaagcgttttaaaaaagattatgagaaaaaagtggtgaaagtactggtcagatcacctttgtatgaagaggggatgactgacgatgagatattaagcgttcatggaatcctcagttatgcacaggtgatggaatggaaaggtccgcttctgtataaattaaagggcggacaggagtatatagaagataaggcgagggaaaaggaatatgaaatagatacatctcaaaatcaatacggaacagtgattaattcgcagacattggaacgtgcctttcccgtttctataaaaggagtccaaagaattgtaacgattgaaaataaggcaaattatgaagaaatgaaatacagagaggatacgctttatctgttctgtcatggattttattctccgaaagaacggatttttttgaaaagattaatggaagtggcggaaggagagatacagtattttcattggggagatatggatatgggaggcattcgtattttccggtttaataagaaaaatatttttccgaaattgaagccgtataaaatggatcgagaagcatttcaagaagcgcttgaaagaggagcgggcattcctctggaagagaaaaagaaagaaaaattggaaaagcttaatgcgggagaattagaagagcttaaaaagtgtattttggaaaaaggagtagaaatcgaacaggaaattttattggcggaaaatgcgatagcggaaaattga

SEQ ID NO: 42505 - DNA, 1386 bp, Butyrivibrio fibrisolvens 16/4
atgtggttccgaataatttttaattatctgggaagcggaagtaacaatagaatatacgcagaatgtttgttaattatttatggtgaatatgaaaatgaaatatcatatagattatcgcgtaaccaaatcagagatgcagttgcattctatctaaatgaaattcattcagatttaatacttgatgatggcgaaattgagaaaaattattctgaaatggcatcggctattataagaaaatttgcagatgctgatgtgggttggcttgaagaagacaatgatgaggcgacttttgaaaaacagataattatgactgaacaaggaatcatgcttgccgaatttttggaaagactgaaggttcctgaaaaagaagaattctccagttatatttttaatatttataacattcttagaagtcatgaacaatgggaggaaaatccatatgcgctttgtctattaagcgtttataagaatagtagaaatttatcaaaagctctgaagaaactagctacatttattagaaaaataattgaagaaatgatgaatgaaaattctttcgaaagccttacggagaatattatttcttattgcgatggagattttataaaggagtattctagattaacaaaaaggcaaaacattcatatttacagaagctcgattattaatagtatcaaagagtttgagaataatcaggaattgtttgaaaaaatactggaaggttgttcggttgaaaacaatatttcaaaagaagaggcccaagataaggtcttagatatgattcaaaagaccaaacatttccttgaaaatgagtatgatgcaattatggcagatattaagcataagattaatatttatctgcaaattgctgtcgggcgaggacgatttttaaggaataaaggtgcagatatcagaggcagtgttgaacagactattaaatatattgttgaagagatggatgaattaggtctaaaagatgatatgcccgaggattatatggatttattttctcttcagaaaaatgaatttattgatttgaattcaattcgctaccctgctaagcaaaaggccattaagaagaatattaaacaacagtatgaagttcttactgatgaagataaattaaaggctatggaagcacaaagaaaaagcgcatttaatccatattccaaagagcgcatgaagaatttcttagatgaacaaatggagaacaaagtagttgttagcgcagctgaattaccgctcatatcaaaggatgatatgctagttagtttatcagcggttgcgtattcaatggataacggatatacgataataacaaaagacggttatgttgaaagtaatgatttaatcatcaaggattttgaaataagaaggaatagtaaatga

SEQ ID NO: 42506 - DNA, 369 bp, Butyrivibrio fibrisolvens 16/4
atgatagaagaacattgggataattatacttcgtcagaaaaggagcagtttcaacgtgcggccagacgattactaaagaatacttttatagttagagataaagatgatgatagtcgaaaaatatatttttttatagctaagagaccggacccttttagcgagtactttaagtacattggctttgacattgttgtagatagagaaaatggcgtggttatgcttcaaaatgacaggagtgttagcgagactagaagaatacaggcaaatcgaattcagttaaaaaatttgaaagcattgtattatgctgcttatggacaatatatgttgatagaatttctaagggctctcttaagcgagatattattatag

SEQ ID NO: 42507 - DNA, 483 bp, Butyrivibrio fibrisolvens 16/4
atgaataacaatagaaagtctgctactagattgttacttattaattggtctaggtttcaatatgaaaatataagtttggacggctcaactctttttactggtgtaaatggaagtggaaaatctacagtacttgatgccatgacttatttacttacaggaaatacacagtttaatactgcagcaaaggataaggatcgaaatgtaaaagcctatgtaagaggagataccaagagtaacgaatcaaacagatttttaagagaaggtgatgttgtaagttatatagcaatggaatttttctctccagatgaaaatgcatatatggttatcggtgtagaaatagaatcttcaagtgaaaatgatgccagctcaagctggtttattttgcgtgatacaaaaattgaaaatattcaattttgcgagacaaaagaaggcattcgtagtgtctatcctaaaaatagattattggtgaaaaacaaaaattaa

SEQ ID NO: 42508 - DNA, 1431 bp, Faecalibacterium prausnitzii SL3/3
atgcagctgtttgaactggtcagcccacggctgttccgcccgctggcggggcccaaccgggcgttttatgcagagcttttgctgctgctctgggaggagtgccgccatacggcagattacagcatttcccgcgccgaggccgtctcccgtgccgaggattattttgccgcgctggcaaagccgctggcgctggacgccgacggtgcgggcgatgaggacgagcagcccacccgcgacccccacacgctggcggtgggctttctgctgcgtctgcgccgcaccggctggctggaggagcagcccggcagttatgagagcgagccgacccttgcctttatgccggaggtcaccccgctgctggacgcgctggaagagatattgaacccccgggtggtcacctacaccggcaagctgtacaaggcgtggcagctgctgggcagcatcgggcaggaaaaaagcccctacgagaacgtgctgcgggaggtggcggcagaccttgaaactttgaacaagtccctgcgcgccctcaacgcttctatcgggcattatatcgaccgcctgacccataaccgcaccccgcaggaggtgctggaactgttcgaccagtacgaagaaaaggtggtggcggcggcgtaccatcgctttaaaaccagcgataacctgttcaattatcgcgcctatctggaagaagagctggatgactgcgagcagaaccagctgccgcgcttagcgctggattacgcccgggtggagcgctgcgcccccggcgaggcggcgccccgggtgcgtgcccttatccagcagcagcgggatgcgctggaagagatgagcaccctgatgaaggaaatcgacgccagccacatccgctaccgcaagcgggcggtgcagcgggcacagtttttgctgctgagcgaccgctcggcgcagggcagcgtcaccgccctgctgcgccgctatgcggaggagatccgcagtccggagcagctgtttgaagtggacgacggcccggtggcggcgcggctgcacctgtacccggcggcagtgttcggcacaaagccgctgtatccccccgccgcgccccgcaccgaagcacctcttgccccggtgcgcaccgagccccttgaccccgaacggctgcggcaggagcagcagctgctgctggactacgcccgccttgccgtcaccgaggaaaacgtggcgctgctggcgcggcaggcactggccgcccgcgggcaggtgaacgcctccacccttgtggaggaatacccgaacgactttacaggcatcatcggcctgcacacctattcccagtcgccgcaccgggagtatgatatcaccctgaccggaaactgggtggagcgcggcggcttccggtttcaggattttgtcctgacccgccgcaaggaggtaaacacggatggcaaccattga

SEQ ID NO: 42509 - DNA, 609 bp, Faecalibacterium prausnitzii SL3/3
atggcaaccattgatctgctggaagagaccgcaaactatctgctcaaccactgctttgtgctgggctgcgtagaggaacagcgggcgaaatatctgtatattcaggatcacctcaacgaggtgcgggcggtgttcaaaccgctgggctacgcggtgcttttgtaccccgcgcccatgcaggcggcggcgctggtcaacgagcacgagggcagtcaggcacggctgctcaagtacgagagcattttgctgctggtgctgcggcttttgtacctgcaaaagcgggaaagccttgccgccagcgcagacgaggtgctggtgaccgtggaagaggtgcaggcagagctgcaaaagatgaacctgccccgcaagctggatcagcaaacgctggaaaagctcatgcgcaccctgcgccggtacaatctggcgcggccggtgggacggctgtccgggctggacagccgcatcgaggtgttccccacggtgctgctggcgctgccggacgctgaccttgcggatgccgccgccgagagcgcccgcacccgcaccgagcttggcctgtacgagcgcccggagggcgcagacatggaagcaggggagggtgaagcatga

SEQ ID NO: 42510 - DNA, 3300 bp, Faecalibacterium prausnitzii SL3/3
atgatcgaactcaaacgcctgaaactgatcaactggcacaactttgaaaataccaccttcgactgcgcccgcctgacttatatgatcggcgtgaacgccgtgggcaagaccaccattctggacgccatccgctactgcctgaccaccaaccgcaacttcaatgcgctgggcaataagaaaagcggacgcaccctgcaaggctctgtccatgccaagcagcgcggcgaaaacgcctaccgccgcccggggcataccgtggcgtatatcggggcggagttctgggacagcgtcaagcacaccagctttgtcatcgcggtgcgggtggaatccgaaggccccatgcaggagctgcaccccggcgaccagacatggtatatctcggaggacggcatcacgctggaacagctgccctttatcgacccgcgcaccggtgcgcccagcgccaaggaggacttcaagcccgccgaagggcggctttcctacacccgcagccccagcgaagcgcgggacaggatctgccgcgcactgggcatcgggcgcgcagccagcccgctgggtaaaaagttcaatgaggtgttccagatgggcaccagcatggacgagatcccgaatttccgggagtttctgtaccagtacatcctgccccagccggagctggacttggaagccttgcagggtgaccgcttggagctggaaaacctgcacgctgttctggcggaagcccagacccgcgccaacgcgctggacgagatcgtgcgctatggccgcgaagccaccgaaaaacagaccgaagcccttgtgaaccggggcgccgccctgctggcgcgggctgctgccgatgccggggaaaaagctgtctggcaggagcgggtggaggccggacgccgccagcaggaaacgctgcgcacccgctacgccgaggccaagaccgccgaagcggaagcccgccgcgcctacctgaccgcccacagcgccgccggtgccagcggcgagggccgcgcattggacgccctcagcgaggaattggcgcaccggcagaccgcactggatgccgccgcccgccgcgccgacaccgctgaaaaagccgccgaaaagaccggcaacctgctggctgtgctgcgccgcagcggctttgccgccgggcagaagctggcagacctgacccccgacaccctgcccgccctgaccgactggctgaccgcacaggaaaagccgctggaagaagcctattttgccgcccggcagcacaccgccgccttgcagcggcagcagaccgagaaacgcgccgagctggacgccgtatccggcggcaagtgggtgtacccccacggcgacgccgccacccgggtgcgggacgccgtgaatgccgagctgaaaagccgtggcatggagccggacgcccgcatcttctgcgagctgctgaacgtggaggacgaaagctggcaggactgcgtggaagcctgtctgggcgaccgccggttcgatatccttgtgccgcccgcccactacgccgccgcaaagagcgcctttgtggcgctgaaagagaaagtgggccccatcagcctgctggataccccgggtctgcgcaaggccaaccgccgcgccgataccgcccccgccgacagtctggcggcacaggtcaccagcgaaaacccgcttgccgcgcagtacgccgacaccatcctgcgccgcatcgtctgctgcgacacccccgacacgctggaaaactaccccgacagcgccacccgggaccttttgcgccaccaccccttccgcttggagcgtctgcgcaccccgcagcgctatatcggcttggaagcccgccgcgcccgcgccggggcactggcaggggagatgaacgcccttgccgaagaggtgcgcgccgccgcacaggcagagcagaacctgaaagccgcatacagccagtaccagacccttttgcgcggcacaacgctggaagagcttgccgctttgtgggacgcccgcgccgccctgaccgccgcccgcgcggcggtggacgcacaggccgcaaagctggccgagtgccgcgagaaccccctgttgcagcagctgtataaagaggaagaggtgcgcgaagccgcatgggaagccgcccgcactgccgtggagcagaccggcggcgatctgcgcgtatgcgaaaaacagatcgcttcctgtgaggcggagcagcaaaaggcggtggacaccgccgaaaagagcgcacaggccgcagaaagcttttttgccgcccatccgctggtggagccgctctcccgcagccgtcagcaggcgctgaccgggccggacaagtccccccgcgccgccgcgcaggctgccgaaaaggcacaggccaagctggacgatgccctgaccgtctacctgaacagcaccctggaaccggcgcagcgggaatacaaccggcgctatgtctgcgattatcccttggggcttgccgggctggaacagtaccgcgcccagcatgagagccttgtgcgcatcgacttggagcgctacgccgcccgcctggaacaggcgcagcgggactgcaaggaccgcttccgcaaagatatcctgttccgcatgaaggacgatatcttcaacgcccggcggcagttccgggagctgaacaaggtcatggagcaactgacctacggcgaggaagtctaccgttttgagctggaacccagccgcgacccgcagctggcggcgttctatcaggtcatcgtggacaagggcaaccagcagatgaccgagggcgactctctggataaccttgccgccactgccgaccccgcctacgagcgtcaggtggacgagttaatggaaaagatcatggcagacgtggacgagaacacccgcgcccggcaggagggacgcaccgctgccggtgccaccctttcggactatgtggactaccgcacctatctggactacgatatcaaggtgaccaatcaggtcaccgggcagcaggcgtatctttcccgcgtcagccgcgattcctccggcggcgagaatcaggcacccttctatgtggccatctgcgcaagccttctgcaaatctaccagaagagcgaaaacagcatccgtctggtgctgctggacgaggcgttcagtaaaatgaccagcgaccgcatccgccccatgatggaactgttccgccgcctgcaattgcaggtgctgctcatctccaccgtggaaaagagcaccgccatccagccctactgcgacattacctactccatcgtccgccacggcgacgccaacgccatcgcgccctttgtccgccttgcagcggaataa

SEQ ID NO: 42511 - DNA, 1401 bp, Faecalibacterium prausnitzii SL3/3
atgaagttttttgaagcggttccaagcgaacttttctcgccgctggcttcgcccaaccgtattttatatgcggatgcactggacgtactgtacgcagcataccaagaaaacctgaaaatacgggaagatgtcttgtattccatgctgcgcggcaggctggagcaggaactggcggatgctacgtttgaagatgaagacattgacgaagaggaactgagggatatctctggccgcgctcgttttttgatccgcaagctgtgtagtaaggggtggtttgagaaagaacgcggggacgactttgaagagtatatcacgattcctaattacagcagccgtttgctggaattattccaccaactctgcgatgatagcccggctcgtggatattcctatgtgttcggaactttctcagtcttaaagaccgccgacgacagcaacaatgcttacgataaaatgacggctctctatagtgcctacgataacacaacggcgctgattagcttgttgcaaatggtctatcataatgtgaagcattattttcagacgcagatcgatatgcaggatgtcaaccaggtgctggctgcacactttaacgacttcggacaaaaggttgtggaggcatatatccgtccgctgaaaatcaaagattcagtgccgaagtatcgtgtgcccattcagtctgtgcttaggcgctgggaagaggatgataccttgctgatggcgatggcaaatgaagcattgcgtgataagcggggcaagacattggaagactgccgtgccgatctgctgaggaaaattttctggatcgaagaacgctatgacaatttagagaaggactatcttgaggaaattgatacgcaggtccggcgctataccagggcagcaacacagaaaatcgagaacctgacgaaccgagatcaaagcgtgcgcggcaatttgaatgttttgctgacggcactgtccagaaaccgcagggcgtctgagctggtggaccagatacaaccggcatttcaattgtatgagcagtcttttttgtcagaaaaaagtctgtggtaccgtaagcgccccgaaaaacggacaaaaaccgcgtcggtgctgatacaagatgatcaggcaccgaatacggaagaacaggtcagagcggcacagttactgcaatcgaaatatggccgggcagcagtaaatgcttacgtgcagggatggctgggagacgctgacattcgttgctcggaggagctctcgcttgaagaggacaaggattatatcatgagtttactggcaatccttggaagcaaggatgcatctgccggttatgtggtccaggaactcgatggcattttttgcaaaaatgtctattcgatcccgcaaatgcagatccggaggaaggagaagaagccgtga

SEQ ID NO: 42512 - DNA, 3384 bp, Faecalibacterium prausnitzii SL3/3
atgaagaagctgaagaagatcctgctgatcaactggctctatttcagtaaggaactgattgaagtgggcgacatcaattttctgacaggcaagaacggcgccggaaagtcaacggtcatcgatgcactgcagatcgtactgctgggcgagaccaacgcccgcaactttaatcaggcggccaacgaaaaatcgcagcgcacactggaaggctatctgcgcgccgacatggatgataacagcccgtattcccgtcgtggtaaggacttttccacctatattgtctgcgaatttcaggatgagatggagggcagcagctttgtgacgggtgttacctttgactgccgcagcgatggaagttaccgtgatacattctttatttacacggggacactgccggaaaattgctttattgagcagggtgaggcaatggagacttctgcacttcgccgttttttgaagcagaactatgcacgggcagaattttacgatactcaaaaagagtatcgccgcaacatgcttgcaaagtggaacgtccacaacgagcaggtcttacggatgatgaagaaggctgtttcgttccggccaattgtggatatccaaaaatttattacggagaacatctgcgatattccggataaacccaatattgagctgatgcagcaaaacatccgggattataaacggcacgaattgctggcgcagcgtcagcaggaaaagctggatgcgctgcagcaaatcagcaggctgtatcaggagatgaaccaagccatagaccgctgccagatccagaagtttctggtacggtgggccgaaaaagaagctgcgcagacagagatcgaccagagggaattggaacgaactgtatgcaaggagaaccttgcaaatgtgaatgagcaactggaggagcttgagcggcagatcgaacagaaagaaacgcgccgcagtgagctggagctggcctgtaggcagagcaacgttttccaggaggaagagcgtctgctcaacacggaaaaggctctgagagatgagcagaaaaagctggaacagggtctgcaaaatcttgaagtggagattaagcgggaagcacggcatttgcagagattctgtggggagatacaagaactggaaccggaagaacttctcataccggtgcaggaagcggcgaacactgtgcagaaagcatatgctgtatttactggggacgagaagggattgtttgcccggcctgtggagttgtttgaaacggggcagcaggcagcggccgaattgtcggatgctgtccgcagtgcggctcataaaacagaggatcgtattgtagagctgaagaagcaagccgaccagaaaagtgcggtgcttgcaaatctgcgcaggaacatcaaagattatccccatgggcttctgctgttcaaagaccggctggaaaaggatctggcggataaaacggggcatgcggttcccgtttatattctggctgatgtgctggaaatggcagatgagcgctggcgtggagcggtagaaggctacctaaataaccagaaatattatctgctggtggaaccgggacgttatcaggatgcacttaacatttacgaccggctgaagcaggaagcagagtgccgtgcggttggtctggtagatatcggaaaactgcgggaaaaagaaacacttcgaccgctgcccggcagtctggcagaaaaggtggagacagaaaacaagctggcacgcagctatgtggactatcttctgggtcgggtgatatgctgcgacacggcagaacagttgcgctgctataagacggcaattacggcagagggaatgctgtatcagggctatgtggcccgcgcacttcggaagggctggatggaagacgccttcatcgggcggcgtgcggtgcagctccgcatcgaccatctggaaaaggaactggcctgtctgcaggaagagctgcggcattggcagccgctccagaagcagctgaccggcctgaaggagccgctttttacccaaagattcgtccgaatcgatgtggcacaaaagcaggaggactaccagcgcgtccagacgatcatcaaggaaatcgcagaagtcaaaaatcagctttcccagttgaatctgttctggttggatgagcagcgacgcatcattgaacagttgaaagaagagatccttgcattcaataaggaaaaagatgcgaaaaatgtgcaaaaagggaagttggaagaccgcatccatcagctggaatatgagatcttgccggaaaaataccaacggtatgaggccatcgaagatgttttgaacgaggagttcacgaaggaataccgagaaaccatcggcgttccccgctatcggcaggagcttgtccgcttgaaaaaggcagatgtcatccgcaagaactttggcgacagtttggcgcagagcacaaaggcgatggacggggctcagaagaaactgtttgcagcacgcagagaatatgcagaacggttcaaaccctgtgcattccagatcgaggtgatggataacaccgaatacgaggaagaacggcgtactctgcaggaaagcgagctgccccgatacaaagaaaagatccgggcggcacgggaaagcgcaatggagcaattccagaacgatttccttgccaaactgaaatccagcatcgaccaggtgcaagaacaggtgcacaatctgaacaaggccctgcgccaggcacaatttggcacagacaagtaccaattccgcgtagggccaaacccggattatctggattactataacatgatcacggcagatgaactgatggaaggcgaatccggtctatttgcactgccctttcagcaaaaatacggcccattgatcgaaaaactgttcagccagatcacaatggcagacgatacgcagctcaatgcccgcaaacagagcgaactgcaggagaatatcgtccgctatacagacttccggacgtatctgaagtttgatttggaaacgaccgatcagaacggttccaagcagctgctttctcaaacactgaatatgaagtccggtggcgaaacacaaacgccattctatattgcggtgctggcctcgtttgcccagctgtaccgcgtcaacgatgctacccgttttggtaatacggtgcgtctggtggtgttcgatgaagctttcaataaaatggatagtgaccggatcacggagagtgtactccttctccgaaagatggggctgcaggcgatcatctgtacgccgccggataaggtctcggacattatgcccattgcagaccgtacattattagtggacaaatccggataccggatgcatatcattccatttggaaaggagatgcagaatgaaggaagcacaggtgatcctgaatcgtctgctggataa

SEQ ID NO: 42513 - DNA, 1239 bp, Faecalibacterium prausnitzii SL3/3
atgaaggaagcacaggtgatcctgaatcgtctgctggataagtttgaaaacagtaagcatctttctgaacccaacacatccagacgtcgggtaatgctgcgcattgataaaagggagttgccggagtatcaatacgaagatgcggtggttcgggatgcttacaatattgcagcgcgggagctggagcagcaggctttggtgcgtctggaatgggcgagaaagcagagcgttctctcctgcattgtgctggatctggaacgggtcgcacagtgctatgaatgcgccgacagagtgcatccgcgaaaaaaggcagaagaggttgcaaacatcatcatgcagaagctggcagacaatcccgttccatggatcgcggcatggagggatgctgtatgtgctcaggtgcggaacagcatgaaagtgccgacgtattgcagggaaaacgacggtctgctgcaggagcttttgctcacgtttcaacggtatgcggagctgtccggcagtgtgacgatgcgtgcattcagcagccagtgttttcacgataccaagtattttgagcgaaatgtacgggagctgtttcttaccattgcacgaaagtacaatacccaactggcggcggcctgtacagaagcggaacttggtgagcgggatcagcttgcatttctgggaatctatgcccgcccggagctttacgaactctcgggcgattgcgcaatctgcttgaagaagggagaactacggctcagcgcaacagaaccttatggattggctttgcccagtacacttgtgtcagagattgtggacattgaactaaaaaacatctgctgcattacctttatcgaaaataaaacgaactatgatgaatatttgctggcggaaaaacagccggaagaacttgttgtttatcacggcggctttctgagcccgcggaagaaaaaactttttgaaaaactggctgctgcggcaggggaaactatgcaaattcgattctgggcggatattgatctgggcggtttttgtatgtttgaaaacctgcaaacggtgtttccacagcttgaacctatgcgtatggaagggcgctttgtggaacagtaccacaaaaatggcctgaagcggccggagcagtatctgaagaagctgaaggaagagcggaatgcgggaagacatacgctgtttgttgatgcaattgataagattttgcaatatggggtcacaatcgaacaagaaacatttctggagtag

SEQ ID NO: 42514 - DNA, 1413 bp, Ruminococcus torques L2-14
atgaaactggtcgaaaaagttccaaaggatctatataaaatatttggaagtaaatatatggaattctatatgcagtttctggtagcgctttatgaggagagcagtcagtcttattctcttctcgggcttacggaacgagagtgtcagatgatcatgaatgaacgactggcgaagatggcactggactggagtgaggcaagagtcgatgaggaaggagaactgatcaccagagccaacatggcatcagtcagtctgaagcattttgaagactggggatggcttagaagggattatgatgaaacgttgaacagttatgtcgtttcatttccggaatacagtcagctgtttgtagaattatttcagaaattatacagtgaaaatgacggtaaggaacgagagagtgtgcttacggtatacagtcatctctatacctacagtttagacaaagagaagaataatgagattttaaaaagtgcgcttcatacatcaagagcacttctgcagatgctcgcgaacatgcaggagggaatgcgaggttatttcgatgaactgtcaaagcagagaagtttccgaggaatccaggaagtacttgtgaaagagatcaataacagtgatagcaaaaaatatgcgatattgactacaacagacagcttttatcgatacaaagaagctgtaaaagagttgatcgaagaaaatctggaaaagacagaagcaagaaaatactcatttgaaacagaactcttaagtgaagaagaaaatacgagaaaatcttaccgtctgcgaagaatgatcgagatctgtgaagaggcgacagatatgctctataagatttcgagagagtttgatgcgattgagcgcagatataataagctgattgaacaaaagacagtatttgcaagccgtgccgcagcaagaatccggtacattatgatggaaggtgtaatggaagaagatcagacagtcgcactgattaatctgatcaatgaaagtggtaagtcggaagagattctggataagttgtcttcaaaacttaggttttcggagccatataagattatgacagagaagagtctgtatcaaagacgtgaaaatcagaaggaaaagttcactccacaggcggtaacacctgagaaatcacaggaagagaatatgacagaatttgtcctggaaccactgtatacgcagaaagaaatcagagatttccgaaagaaaaatgaacagaatggaaaattcacagtgacaaaagatactgtaaaatcaatagaagatttggagaagttatttatggtatggcagcatgcaacagaatctgcggacagtaaggcacagattgaagtggcgcaggagatggagaatgaggctggtttccgattttcaaaacttacgatagagggagtagaatcagatggttaa

SEQ ID NO: 42515 - DNA, 696 bp, Ruminococcus torques L2-14
atggttaattatatggaagaattgtcagtgacagaagctgataacctgaagaaaacaattgctgcattattcagacagacatgtattttacagatgaagtatgatcctgtaacacttgtcccaagagacaatctgcattatgagatctgtacaagacacagaaagtttattgaagactatctgtctgttttaaactgtgaattagtgcatgacccacaggaacacatttaccgtttacatggagatggaatcgcgatagaaaagataaatgccaccgttacaaaagtaatcttacttgttaaattaatttacagagataagattttaggagaaggtttgaaagctacagtgacgaatctggcggagattcgtgaatatggaaagaatacgaatctgattaattataagcttacgatgggtgagtggaaagaagctttatatgtgatgagtaagcatcagatcattgaagtgccaggagcaatccagaatgttgaggatgagactccgatttatatctacagcacgatcaatctatattgtggaagtatggatattactgcgttgatcaaagaatatcaggaagatcagtacgcggaggaagagattacagaagaagtttttgaacaggaaatccaggaagaagcagagggaggtgtggaagatgaaagagaaacagtcgaagaaaatatttactag

SEQ ID NO: 42516 - DNA, 3369 bp, Ruminococcus torques L2-14
atgaaagagaaacagtcgaagaaaatatttactagaatgttaatgaataactggggcggtatcagtcacaaagtgatggagttccatgaatatgtgaatcttttcagtgggaaaagtggatctggtaagtctactgttatggatgcgatccaggttgttttatatggaagtatatcttccacattcttgaataaagcggcagatgacgcgaagaacaggcgtagtgttctaagttatcttagaggagcgcagaaagacggttcctttaaccgagaagaccaggacttctgttctcagatcgttttggagattaaggatacaggaaagaatacacatacttgtattggtgtttcatttgaggttggaaaggcagatacagacatcaggaaatattgtttcttcagtcattccggaaagattccggaggatgaatatttgacagaagaaggtgtcccatatacaatcgcgaaacttaaaaaattggtagaagcaagaatagaatcggctgacaacagaggtcgcggagatgtgaaccgtgtatatccatcgaaagaagcgtatttgaaaacggtttatgatgcaatctttggttatgtagagccgggccgtatgatgacaatggagaaaagcgcgattgcacttcgtatgacgaacggaacgggacagtttatcaaagattatatgttcccaaagagcaaggaagacacagttgcaacaatcagtgatcagcttggcgcttaccgtgagatcaaggaacgcgtagaagatctggaacagagaattaaaatgcttgacgagatcagtcagcataatctagccttgcagaaagcaagagctgataagatctatgtggaacagatcttaaaatatattgaaatagaaaattgtaaggcacatttgcaatcgaaagaggatgatctgcaggatattctcaagaagattgaggaaaaagaagaaaagagaaaatcttatttggcagagaaagatgcttatacgaaagaacaggtagaagtcgaggcagaactcaaagccagcgattatggacagaaagagaaggagctaaaggagattgaaaatacgatccagctcctggcaacgaattcagaacaatggagagatatcgtaaaaggtctttcagcctgggaggaagacgatgaagtcagtgcttatgtgagcaatcaggcgctgcatagaattgatgatatccgagatggtgttgtgagtgaagattcgattgaaaagctaaagcaatatttaagtgatgcactcgacaacatcaatacagaattaggcgatgttcgcgaaagaattcgtgagaatcagaaagaacttcaagagaagcgggagatggtagaagacctcaaaaatgacagaaaaccatatcgtgcggaattgaagcgtgcaagacaggaattacagaatatacttagtactcagtatggaagaacgatccatgtaaatatctttgcggacttgtttgatattacggatgaagagtggaaaaatgcaatcgaaggacgtatgggacgtgtgaaacacagtctggtgacagcacctgaatatacgttagatgctgcgaaagcatttcgcaaaatgaagcagatgaaggggatcgaggatgtcgaactcatggatactgcggcaatcgtgagagacaagccgaatgcagatgagaatacattgtatgagtgcgtgcgcgcagaggaagcttatgtagatacttgtctgaagcgatacttaggccgcattaagaaatgtgagacggtggaagaacttcatgagacgagagatggtgtcacaaaggactgttattcctacagcaattacattttcagacatttaagaaagaatgattatgagaaatatgcctgcatcggaacgaaagtctcaaaggcgaaacttcttgagttggaagaagaagcagcgaagctgaaacaggaagtggaagaggactgccgtgttgagatggcactgcgtgcagcacagaaatttgagtgtctgaaccagagtacagaacagatcttacatctttcaaaagcagcggaacagcttcaggattattacgagaaacaggaaaaattacgtctggaagtagaagaattgaaacgaggcgaccggacagtcgaactgaagaagaaaaagcaggaattactggagttgcttaagaaaaatgcagagattcttgatagcattcaaagtgaagtagtacagtatgcgaagacacagggacaaatcgagagtaatatcaaatcattttcagaaaagataaacttcctgacagagggatttgttgtcaacgaacagcttcagaatgaagtaacagatgcgttaaaagtacagagcgaagcagcttataagagagacaagacaaaagaaaaggatgctttggaaacgttggaagagacggagagagaagaactgcaaagaagtagaaataagttcaataatgcttatccggcctatggttttacaggaatagaacatgaaaatgatgtgtatgacaaagtgctgaatcagtgtaggaaagattttgaaccgaagtacaaggaagaattcgataagcagtataatctggtttactatacattgcgtgaaaatgtgattgcttccattcatggtgaaatcaaggcagcttacagacataaaaaagagatcaaccgtctgcttgcgaagatcaagttctcagatagtatttaccagattgatatcataccggctcagaatgaaaacggacagttttatgagatgcttacagcacctgaactagacagtaaagtgttcgatgactacggatttgaaggtcagttaagtcttggtgaggatgagttctatcagaagtatgaagaagatatcaagcgtctgactgagaagttcatgcctccgaaggaggaagatgcaagatccttaagccagtatcgtcagcagatggaacagtatgtggattatcgtaattatctgactttcagtatgtatgaaaaggtggaagacgagaatggaaatatccgcaaaaatgcagtcgatgatatggcaggccgtgactccggaggagagggacagaacccgaaatatgtcgcactgcttgcaggctttgcgatgctctatatgcagcagacaaaccgtgattctaagatccgtctggtgcttcttgatgaagcattttccaagatggataaggagcgaagcgaagtatgtctgcattatgcgagagagctggagcttcagttgatcgtatgtgtaccggatgaacgtctgcagtcgttgattcgaaatgtggactgcgtctacggattcagaagacaccagaatcaggtatccatgatgcatattgataaaggcgattacctcgatatggttgagggaaatgaataa

SEQ ID NO: 42517 - DNA, 1485 bp, Gordonibacter pamelaeae 7-10-1-b
atgatcggaaggcgcgcgatggcggtggtttcgaacacgttggcgttcaaatccctgcaacaggacgatgcagcctggaagcttctgaacgcccaaaacgcggcggtcgtgatagccatcttggacgagcacttgggcggggaaacctccaagcgaacggtgacagatctggtcggcctcgtggacgcggacctcgaggagctgcgggagcgggtgcccggtatcagcatgacgcgctcggcgaacgagtactgcgaacagtggcgccgcgacggatacctgatgcgcaaaccaatgaccggcagtcgccaggaaacctacgagctttcaggtggagcactcgctgccatttccttcgccaaggggctgtccaaacctcatcgcacagcaacgaagtcgcggctgtccaccatcctcgaccgcatagccgatctctcgctagccaccgatcccgactacgagcgtcgccgctcagtgctgttgtccgagaaacaacgcattgacgaacagctcgcggctctcgatcaaggcgagctggaggtcatggatcccgcccaggcgctcgagcaggcgagggatatcctcaacatggcgcaggagataccgcgcgacttcgtgaacgtgagcgccgacttcgagcacattaacaagagcctgtacgcgcagatcatcggctatgaggacggttatcaggaaacgctggccgacgtgttcgccggcgtcgaccatatcgcgcaatcgccttcgggacagtcgttccgaggcttctacgatctgttgcggaacctggaagcttcagagaagctacaggacgacattgacctcatcctcgactgtgatttcgcccgcgagctggacccggaggagcgtcgcttcctcaggcattttttacaaacgctgctcgatcagggacgcgaggtcaacgagaccatgaccgggttagcgcgcggcttgcgcaggctcgtgcagagccagagcttccagcaggaccgcgtgctaaaacggctgctcgaccgggcgctcggcacggccggcacgctcaccgagctttatcgcggcacgcacgcgctccccctggaactggagctcaccaagacacccatcgcgccgatatcacgtctggaactgcgcagccccgccgccgcgaccgccccgcccatcgaagacgcagtggtcgaggaggcgcggccgataacgctcgccgagctgcacgagcaggtgcgcgaggaggagatagacttcgacgagctgacgggcaacgtgaacgcatgtctggaagcgcggggcgaaggagcgaccatcgccgaggtgctcgcggcccatcccgccacccagggcatcgccagcgtggcgggactcatgatgctcgccgccgaccaaggcatgcgcgccggcggagcggaaaccgtctgctggcggtcgaagagcgggcagatgcgtaaggcgcgcatcgaaaagttcctgttcaccaaggaggttcgctga

SEQ ID NO: 42518 - DNA, 711 bp, Gordonibacter pamelaeae 7-10-1-b
atgaccgacttcgcacccgacccctacggcatcgccgacgaggactctcccgacgtcgccttcaatctggcggccgaagcgcccctcgatgacaagcgcctgtggcccgaggatacgggcacgctccccttcgacgcccgctgcgctctcctacagcttgtgcgaggaccctacctccacgagaagcgggacgcaccgctgtggcgcgcgctcctcaaccaccgcgcggcgctggcctcgcgtttggccgatctgttcctagagctatgcgtcgaccaggaggcgggcgtcgcgttcgcacacaacgtctcgacggacgaacgcgaggtgccgaaagcggcgcgcagcaacgcaatgacgctgctcgacaccatcatggtgctcaccctgcgcaaagagctacagatgggcggggccaaccgcgtgttcatcggtcagggtgagctgttcgagcagctggcccagtaccgcaacctaaccaagcaggaccagtcgggctaccaggaccggctgaaggcatcgtggaaccgactggtcgactaccgcatcctcatcagaagcgacgcggaggaccgcttcgagatttcacccgtcctcaagctgatattcggaaccgaggaggccgaggcggtcaacgaggagttcgagcgcatgctcgaactcgcgcagcctctcgcggaaggaggcgataacaatgctgaagccgagtga

SEQ ID NO: 42519 - DNA, 3408 bp, Gordonibacter pamelaeae 7-10-1-b
atgctgaagccgagtgaccttcccgacgtgccttatcccggccagtggcggctcgcccgcgtcgacatggcgaactggggaacgttcagcggataccagagcctccccgtcgaccggcgcggcctgcttctgaccggcgcgtcgggctcgggaaagtccaccatcctcgacgcggtgtcaaccgtactcacgccaccgagccacctgcatctaaacgccgccgccaacagcggcaaccagcgcgacaaagaacgctccatcagcaactacgtgcgcggcgtgtggggtcggcgctccggtgcggccggcgaactggcccatgcctacctacgtccgaaacaggcaacatggagcggcgtcatgctgcgctacgaggacggcttcccctacggcgagctcgaaggatccgaacggcgacgccacgagccggtcaacctgctaggcatcttcttccagaagtcgaacaccgtgggccgcgaggggctcaagaagttctacgcggtggtgcgcggcgactgcgcactgcacgatttcgcggcgtacggcatgaacgaggccgatatgtcaaagttcaacaaggacttcaaggagacgggccgcgcctggagggatcatgccagtttcgaggcgcacctgtgcggagtgctgcgcatcagcagcccgaagacgctcatcctgctgcacaaaacgcaggcggccaaagacatcggctcgctcgacgacctgttccgcaagtacatgctcgacacaccccgcacgctcgagctagccgacgcggccgtcgagcagttccaagagctctcgcaagcgcacgagggtgtggtggatcagcgcaggcagatggagtgcctggagccgctgctcgtacacgacgagacgcacgcccaggcactggctgcagaggtcgaggcgcgcggtttgctggacgcgctcaacccgttcgccgacgagacagccgtcgagcttctggagcagcagctcgagaagagggcgcgccgagcggatgcgctcgtccaggacgttgcctcggccaaagccgagcagagcttcgccaagcaggcgcacgacagcgccatggcgctgctgagcaaacggggcggcgtcgcgctcgatacggcgcacatgcaggtggacgagcggaaccgccagctgctctacgtgcagaagaaccgcgattcactgaagcaggatctcgccacgtcggacggcgtcgcactgccggcaacgcgcgaggagttcgaggccctgaagcgccagctgtcggcgaaagcgcaggaagcccgctcgtggctggacggcaacgaggacgagaaggtgtcccgtttcggacgggtgggcgagctacgcgagcgccgtaccgatatctcggaggagcttcgacatctgcgcagacagcggagcaacatcccctcgaagctgcacgccatcaggacatcaatcgcccatcaactggggctctccctcgccgacctgccgttcgtcggcgaactcatcgacgtgaaccccaacgaggccgcatggcagccagccatcgagcggctgttgggtggacgggcccgcacgatgctcgttgaacggcggcacgcggaggccattaacgagttcctcgaaacccggcacctcggtgagcggttcgagtacgacgcggtgcccgaccgggtgtcggtccctggcgtggccctccacgagaagtcgctcgtgcggaaggtgaccgtggcgaacgtgccgaaccacgaatccttcgcgctgtgggtgaacaaacttctgcgcgagcgcttcaactacgtgtgcgtcgatacccccgccgatatggagcgacaccccaaggcgctcacgcgcggcgggcagacgaagtccggcgagcaccatgtgaaggatgaccggcgtaacatcgccgaccggagtcgctgggtgctgggcagcacgaacgaccagaagatcgagcggttcgagggcgacctggccgaatgcgaacgccttctcacggccgcccgcgcggaaacgaacgacatcacggcgaaggagctgcgtctgcaagcgatctgccgcctggacgagagcctacggtcgaagccctgggacgactacgacgaggcgcaggccaagggcgagtgcgaacgagccgaggcgttctaccgagaactcgagcaaagcgacgagttccgcgaggccgaggcgttgcgcgcgaaggcggaggcacgcctcgaggcggcgaacgaggccgtccagaaagcgctcgtcgcccaacaggcgaacgaggagaagctgaaggacatcgaggaccaaatccacgacctcgagcagcgcgccaaacgcgggcgggacgagggctcgccgctttctgcggagacaaaagggcagctcaccaagctgtttgaggaaaccgagcagggcttccgctcatcggtgtcctcggtgtaccaaacggcgaaccgtgtgcagcgcgccctggacgaacgcgccggcaaagccgtgcgcgcgcagcagaacgcgcggcggaaggccgagctggtgttgcagcagtacaagatgaagtggcccgcccaagccgccgacctcagcggccggttcgaggatcggatcgcctaccttgaccgataccggcagatcaaggccagcggcctgcccgagtacgagcacaagttcctcgaggtgctcaacagcttcagccaggaccagatcaccgtcatcgcttctgagatccgcaacgcgttccgcgaggtgagggagcggctcgagccggtcaaccgctcgctactgctgtccgagtaccgttcgggcgtgcacctgcagatcgaggtcaaggagaatcgcgggccgcgggtggacgagtttttggccgacttgaaggagatcacgaagggatcgtggagcgaggacgacctcgcttcggcagagcggcgctacgagcgcaccgccgccgtcatgaagcgcctcggatcgagcgagacagccgaccgcacctggcgcatggcctgcttgaacacgcccgaccacatgaagttcatcgcccgcgaggtgaccgaggatggcagcgagctgaaggcccacgacagcgacggcggcctctcaggcggccaaaggcagaagctcgtcttcttctgtctcgccgccgcactgcgctatcagctggccgacgaggatcagcccatcccctcctacggcaccatcatcctcgacgaggcgttcaacaattcggaccgcttcttcgccgaggatgcgctcgccatcttcggggcgttcggcttccacatggttctggccacgcctggcaaactattgcagacggcggaggaccatatcggatccatcgtggtagtcacctgcgaagacgagaagagatcgaggctttcgcccgtagttttcgaaaacgatgcactggcagcagaagggagggaaagccgatga

SEQ ID NO: 42520 - DNA, 1068 bp, Gordonibacter pamelaeae 7-10-1-b
atgagtgacgtttgcatgatcaccccggatgaggcggcggcaaaggctctgaagcgcttcgagcgcgactgccgcgcatgggcggccgccctgtttgcatcttcctgtggaagtgcgggagaacgaccccaagcctattcgatcccgctgcatccgcccaccgagaaacaggcgatggccgaccgcaacgccgcgcgtgcctgggcgagaacgtggcactcaagcccgctggcaggcgacgtgcagtggacctcccgcaactgggggagcatcgggcagcagacgatccccgtacgcttaacactggagagtccaagcgacatcgcacgcgcggccggcgccggcgcgctgtgggagcggatgagcgaacgaacgctccgccttgcagagcggtatagcgaacgctggtcgaaggcgtgcccctccaccgatcccgatgcactcgtagcggcagtgcgcgctgtcgccggccgctgctgcgagctcgaagagcgcgattgggagatgctgctgctagcgctcgactggctcgtggacaaccaggacgcgacctacttcgtgcgccagctacccatccgaggcatcgacacaaaatggatggagggccatcagggcttggtcaagccgttgcaccgagcgctgaccgggcgcgacccgcaattcgcacggcaagcggggcagttccgcgtccacgtgctcgacgagcgtctggcaccgggcgatctgaccgacctcgcgctatcggttgagcagctgggcaggtggcctcgcctgcccgattgcgttctcatctgcgaaaatatggtgaatgtgctcgcacttcccccgcttccgggagtcatcgccatccacggcggaggattcgccgtcggtgagctggcaagcgtgccgtggctttcccacgtgccgcttctctactggggcgacctcgacagcaacggcttcgccatcctcaaccagctgcgcagccatcatgggcacgtcacctcgctgatgatggatgcgcccacgctcgatcgctatcgcgacctctgcgtggaagagccgacgccgagcaaggcaagctga

SEQ ID NO: 42521 - DNA, 1413 bp, Clostridium cf. saccharolyticum K10
atgtctttttttgaaacattgaacgagaaattttttaatcctttttgctgcagaaatcgggtgctctattttgaatgtatcagccagctgatcgaaaaatcaaaggaaatctctgttttgtacgaaacggacgccagaaatacactgattctgtatcttcaaaattgcacatactccatagaaacggaaaatattggagaagagattgctggcgggaaaactcctcaggagaacgcctccacaattctcaggtattttcgtgcatgcggatggattactccgcaggaaatcggacgcagcggggacaatatcgcgtccgtatcggcatactgccgtaagctgattgacgcaatccataagatttttgatggggacgccaatggcgcgattacgaatcatattttttccatgtatgaaatcctgaaattttccttcagcaaagacaatgcccggtcgatacgtccgtatcagaacatcctgattccactggtagaaaatgaatgtgacttgaaaaatgagcttctgattctgaaagacagtatccgtgaaattatgcgtgcagttatgaagatggcagacgccaacagtttcggtcagtttttgatgaaggatgaactcctgaaccgttttttcaatgattattttttcattaagaaaagtggtctgattccttcttacatttcggacattgaccggatgctgagaaaactgcgccactcggagctttatgaccgaatgatccaggagtatagaaaaatagaaaacacagacgagattcaggcaaaggagaagattgaccggctgtttaacgagctggacagcttcattaacctggaatatgagcaggagatgtcttacattgaccggaaaatcaacaactactacaatctgtattctacccggatgatgatggtactgagtgaaaataccaatctggagcatgaactgaaccggatacttctgtttttgaaaaatttgaacgaagagaaccgggcggaagcactctcaaagctttcagaaacgcaccgtcttatgagcatgggatatatcggaagaaagtcttttgaacggcggaaaaagcgaaatcccaatcaaaaaaatgcgggcttagtctgtgaggaattgtcggaagaagagaaacagcggctgacggacgaacttctgacggagacgcccgatcggtacagtatggacaacgtggagaaacatttcgatgagatcatgagaggcagagatcagatttctgtggaagaatgcggagtacataccagggacgatgcgacgatgatcgcggcaagtatgatttattcggggacgtcagggtttccttatgaagtggaattcaggaagggcatggtggagaccgaggccgccagaatcagcaatatcagcataaagaggaagaaaacatga

SEQ ID NO: 42522 - DNA, 645 bp, Clostridium cf. saccharolyticum K10
atgagcgatatcagtttgcggataacgataaaagaggaaagcggacatttgttcaaacgctgcatacgaaaactgctggagtccactttcatactgcgggataaggatgaaaaactgtatcagtttgcctccagagaatccaatcgacaggatatttccgagtacctgcgaatgattggttttgatatgatcgtggaggagaagacgggagtgtgcatgctggctgccagcgaagaggatgcggatacagtaggcttgaaacgggccaatgtggtgacgttttcgacgctgcagtatcatctgctgctggtgctctggaaagtatatctggaaaatctcggttacagcgaaggaaattttgtgacgagaggggatctgattgacaagatcaagtcctatgatgttcagctgacgcgcacggaatttagcgcagcgcttcgcctgtttaaaaaatacagcctgctcaatttcaacgatgatgaggaaggcgaggacatgaaaattcagctctatccatcgctgcaatttggctgggatctcccacagtttcagactgtggcgcgggaatatttaaaagaagaaccggaagaagaaggcccagaagaagaaatagttccggatgaatttgaggaggaagaggaatga

SEQ ID NO: 42523 - DNA, 3318 bp, Clostridium cf. saccharolyticum K10
atgatcctgctaaaaaaagtgcggctgatcaactggtatggattttccaatgtgacggctcccatcggtttttttacgctgattgcagggaagaacggcaacggaaaatccgtcatgctggatgcaattaaatatgccgcttacggagatacggtatttaacaagtcgtcggagagtaaaggaagccgtacgctgtcctcctatacgagaggtcttctggatgccacagccgggacgtacatgcgcccggcggaccaggtgccaaacgtgtacagccacattgtgctggagtattttgacgatgtggaggataaatcttttttgctggggacggtaattgagaccagcgcgtccaataattgccagacgtatcgttacgtgatggaccggatggtcatggagcaggtggaacatacttatgaagaaaacggcgtcacgatgccctgcagcgcgtcgttccttcaaaaaagatacagactgacgctgatgaaccgggagcagggattgccgaaatttttgcagatgacgggactgaagctgaatctgggacagcttcccgtctatctgcgcaagcttcggggaatcatgtcatacgatccgaacgccaggattgaccggtttatccgggagagcgtcctggaagaacggaacgtggatttcgggaaactgatccaggcgaaggagaacattgagcggctgaacgagaattttgagattatccagcaggagattaacgagctggatgggattcttggggagtacgatgcatgggagagcgagaaaaaccgtctgctggctgatgatatccgcatcatctataaaaagaggaaagatttgaaccgggagattgagcgccagacagctgagcaggaattggcacagagaagaaaggaagatctggagagggaactggagattctggatagaagaaaaaaagagattgacgctcagctggtgcaggccagagtcagtttggagcagctggacagtacccggatgatcgcagaagaaagacgaaaattagaggaactggaggctgagaagaggacgctgatgactctgtgcagaaagctggagcattttcaggccgtggtcagcgaactgatgaatcagttttttgaaaaggaaaaacggatggaggatcagaacgtgctggcgtccctctgcgggcgcgggcacacggctgcggaaaaggcggcggcagtatccaggttcaaacagaaaataaacgagtgttacgacggactggtgatgagagcggcagataccgagagggagctggcagaactgaaccggagtctggacgtgcagcaccggatcatagaggattgtaaaaaacatcgcaatacgtttgctcagattccagagtatgtggggctgcgtgatgagatcaaccgtgaatttgaaaagagaaacatccggtcgaaagcgcagtttgcctgtgaatacgtgatcggactcacagatgaaaaatggagggacgccatcgaggcattcttgggaccgcgccggtatacgatcctggtggaccctcagtattatgatattgcagatgacgtgctgaaccgttcggaacatcgttatgcccatctgttcaacacaaagctgctgatgaagaaaaaagtacatgtggaagaagactcagcggtatttaaactggagatcaaaaacccggtggcaaaacagtattttgattatcagctgggaagaatgcatgcggtggagcgaaatgctgtgaaggaatatgaaaatgccatttccagggaaggccgcgtgtccgtagctatggacagctattttctgcgttttgacaggctccgttcctactatcttggacagaagacgtttgaactgaaccggatccgcgcggaaaaagagatttccaggctcaacgaggagaggaaagcaaaactggcagagaaaaaggagcttgaagatcagaagaaccgtatggcccagaatcgggagatgtttcaggagtatgactatgacgcccaccgaaaataccaggccgcgtcggaaaacgccagggcgtcggaggcgcagctggagcgcctgaaaaaagcgcaggagaataatcaggaatatctggagctgaacgagctggctggccggctttcagatgaacagaaagcggtgcagaacgaatataacgcaaaacttcaggagaaaagcggacaggacacgaccatatccagatgcggagagaagatagaggcaaaatcaggggaactggccgaacaggagaagcggtaccgggaatatcagaccgggtactataccatcgtgcagcggacggtagaggcctatgaaaaatacctgaaaaatggaaagaaaggtccgggcggcctgctggcggaagataccagacggcgtataggaaacagtatcacgcagcatgaaagagatctgacgcagaagcaggcggattataacgcaaaacatgccggacgcatgctgcccagaggaacggagggaagagaacggtatgcaggcagaagagagcgcatctggatggacaatcttcaggaaatccgtcagaaactggaagagcagacccgcagatatgaggacatatttaaaaatgaatttgtgctgacgattctgaaatcctgtgagcgtgccagagaagatttgaggcagattaacggagaactggcaaagctgagctttgctgcaaaatatcagtttgatgtccactatgtaaaggacgggtcagaatacgcaaaggtgattgaatacgcccgatatctggacgagcgggagcagctgggaggcaatgcagacggacagatcgctttcgatatactgacctccgtgtccgatgaggaaggcgagcggttagaaacagagatgaagcagatcatcaaccggatcatcgaaaagaacagtgaagaaacgattgcccgttttgccgactaccggaactatatgaattatgagattctgatcagcaaccagatcctggaccgggcaaaattatccaggcagactggtttcaactccggggcggaagtgcaaatcccgtatctgctgatcctgtcgtcagcccttttgctgatttacaaccagcgtatcaattccacacgtctcgtatttattgatgagccgtttgccaagatggatcccggcaatgtgaaattgatgctgaaattcatgcgggagcagagactccaggtaatcttttgctctccggataagacggaatccatcgggaacgagtgcgaggtaatcctgcctgcgctgcgtgtgcgcgcggacagtatgcagctggggatcgtgcagttccatgaagagaaggcctacagcagccggtga

SEQ ID NO: 42524 - DNA, 1251 bp, Clostridium cf. saccharolyticum K10
atgaagagaaggcctacagcagccggtgaggggacagatatggtgaattacgaagaaaagctgctggctgccctggcggataaatacaggaagagcaaaaaagacagggggaccaatgtgattacgagacggacaaaactgaatccgtctcagctttataagaattacagccgcaacgacggcgatatgacacagattgaggcagtgaatcaggcgattttccggtgcagtcaagaaggatttgtgacctatgagacagagggattcagcagcgagatccagagcatttatctggtggatgaaaaaatcggcgagatcgaggactatctggaaacaaaatatggatatgagccaaaatctgcgaaacggaagtacgtggaagggctgattgccgggtacagcggacgttcgcccgcagcggaacaggagtgtataaagctgcgccaggctctggaaaagaacaggattccgccccgatatcatcagacggaagaccttctcaaagcacttgtctttattgagaataatgaaaaagacctgtatctgcgtgaagcttctctgctgatctacggggactccaaatatctggaggaaaatgtgctgggatccgtttgcagggcactccgggactgcctgggccgtccatgcggcccagcggagctggaagacgagatcctggaggaatatcatattacacgggaaaagcagaagctgtgcctgaagggggatatgacggtatgcatccatggaaaagaactggaactgggggcgtttcccaacggtattgaattttttgctgatgaactgtataagattgagcagataacggtcaaaacggcgttttttactacggtggaaaactatacctcctggctgcgatgtgacagctcgaaaacagctctattttatctgggcggttatgccacccgttatcagagagacttcctgaaaaaaatattttccgataatccaacgcttgtctaccgccatttcggagatatcgacgctggagggctttatatccatgagcatttgtgccgtgtgaccggtatcccgtttcagatgtaccggatgtcgcgcgcggaattggaagacgtacgctttcagtcctgcctgcatccgctgacagagcaggatcgagtgcgcctgaagtctctggaaaaacaggagatgtaccgggaactggcagaatatatgctggagcggggtgtgaagctggagcaggagatagtcagctattatgagctgtga

SEQ ID NO: 42525 - DNA, 1446 bp, Clostridium cf. saccharolyticum K10
atgaaacttctgaacgaaatcccgtcctcattctggggacttttccgttccccaaacagggaaatatatatagaagccctcttaaaaatcaacgaagagtatcagtacagcaactatttcctgagcagggatatgtgcatccaggtgctgggcgattacttttccaggcgccaggtggagattgagagagaacaggaggaggctgaggcagataccctggagccgccggccacacgtattctcaactggctgatcagaaccaggtggctgcgccgccaggaggattttgtcaacctgtcggtcaatatcgtcattcccgactatgccgcggtctttatcggcgcattcgagcggctgatcggggaggagggagacgaggcggacatctatatccagaacatttatgccaacctcttctcctaccggaacgatccccgggcatccatcgccctgttaaacacagcccttgtaaataccagaaggcttaacaagacccttcaggacatgcttcacaacatggacaaattttttacaagcctgctggatcagaaattttacggggagctgctgcgggagcacctggacggatatgtggaagagattgtaaagaaaaaataccatattttaaagacatccgataatttctacctgtacaaggcagatatcaagcagtggctgaagctcctcagagaggagccggagtacctggagctcaccatccgccggggaggaaaaaagctggagctttcagaggcagtccgcctgctcgatgacattgagagaggatttgatgacatcgaacgccggattgccaacatggacagggagcacacccgctatgtgagagttacagtgagccgtctctactatctcttaaataaggaagaggacacgaaagggctgattttacagcttctgaaccgaatgtcccgggaggaggatccggagccccttatcagaaagacggcggccaggatgaacctttcaagaagagagctgctctctgacaaatccctctacaggaagcgaaagcccagggaagccttccgggagaagctgcagccggaggaggctcccaaggagctttccagggaagagcttctgagcctgaaccgggtttcggcaaaatacaccagagaagagattacagacttcatcagagagcggatggaggacaaggctgcggcgatcacaggagacagcgtccgaagcgaagaagattttgaaaagctgatcctggcctacgattactccttaaaaaaagaaagccccttcaggacagagggggagccggagtccatcgacaacggagcctatgtgtttccggctcttgtattcagagaaaagacaaaagcgggggagccagagaggcgcgccggggaggagacgaagggcagctaccatacaggaaagggacagataagagaagatgataccatattttaa

SEQ ID NO: 42526 - DNA, 738 bp, Clostridium cf. saccharolyticum K10
atgataccatattttaatgagctgcttcaggaggagcgggaggagcttacccaggctatccggcttctggagcggcagacctatgtgctggagagaaaatatgacaggaaaacggggcgctaccagtattccggtgtgtacagaaccctggaacgccacatggagtttctgcgggaatacctggaaatatccggtatttctatctatgaggatattcagctgggtgtgatttacataaaaggggaggcagtcctggcagaaaagctgccgaagctcgccaccctgtacctgctcatcttaaaggtgatctacgatgagcagatgacagaggcctccaacagccttgcagtccacacgaccctgggagagctcagcgagaggctcggcgtgtttggcctgaccgggaggacggctcccacagaaatccgacgggcgttaagccttctgaaaaagtatcagatcatcgagccgctggatctgatggacgatctggatggaaatatgcggctgatcctctatcccaccattaacctgatcctgaccggaaacgatgtgagagagcttctgtcagagcttggagaaggagaagggcaggacaggcagctgacacgagacacagaagaagcggcggatgaggaagaaaacgagacagacggggaagaaaacgaggcggatagagaagaaaacgagacagatggggaagaaaatgagacggacggagaggaggattccagatga

SEQ ID NO: 42527 - DNA, 3426 bp, Clostridium cf. saccharolyticum K10
atgaatgacaagggattcaaggcgctgacgcggatctgcctgaacaactggcactatatcagccataaggtgctgtccttaaacagcgggatcaactttttcaccggacactcggggagcggaaagtccacgatcattgacgccatgcagatcgttctctatgcaaacacagacggccgcgggtttttcaataaggcggctgccgatgattcagacagaagcctgattgaatacctgaggggaatggtgaatatagaggaaaacaaccggtttgcctatctgaggaatcagaacttttccacgacaatcgccctggaatttacggagacggagggcggtgaggcccagtgtgtcggcgtggcctttgacgtggagacggcgtccaaccaggtgaaccgcctgtttttctggcataaggggagactgccggagcatttctaccggactgccgatcgcaccatgaccatcagcgaggtgagagacttcctgaagaaaaatttcacaaaggaggacagcttttacggccctcacaacgagagattccgctctcagctatacagcacctatctgggaggcctcgacaaggagaagttcccccttctctttaagagggccattccctttaagatgaatatccgcctggaggattttgtgaaggagtacatctgtacggaggatgacattcacatcgaggatatgcaggaaagcgtcatgcagtatgggcgcatgaagaaaaaaatcgacgatacggtccgggagatggaggagctctcagaactgaatcaggcctttctgcaggtccgggaggccgaggaggagatggaagggtatcatgcccttgcaaaggaaatggagattctggccctgaagggaagagtcaggcgccttggacgtgaggcagaggcggcaagggaggaggcaaaaagacagtctgagtcgaaagcgcagcttgaggagcggattcaggagaaggaagccgggagagaggaacttctgaaaaaaatcgcttccaccggctatgaggatctgaaggaaaagctgaaaaccctgaaggagctgattgagcagtacgaaaaaagtgaggcgaggtttcagaaaactgccgcaggcttaaagggctgggaggaggctgactgcaccgcaaaccagaccctctgggacatcgaggcctttgagaaaagagagatctcagaggaggggcttcacagcctgaagcagagcatagaggccatgaggaaggaggccgatgaggagagaaaggaggcagagtcggagatacgccggctgaagcgggctcagacggaggcgagggagaacctgaaggagttaaaacaggggcgcaaggcctacccgaaagagctccagaatgccagaacctacattcagaaacgcttcctggaggagttccagaagccggttcaggtggatattctggcggatcttctggacatcaggagcgagcggtggagaaatgcggtggagggctatctgggaggcaataagctgtccctggtggtagagccaagatacgtgcgttctgccatgcgcttttacaatgagctggacagaagggcctattaccgggtgtctgtggtggacacggagcaggcggtcagagacagtcacccggtgcttgaccatgccctgtcggaggaggtgtccgctcagacggagtacgtccggtcctatgtggattttatgctgggaaaggtgataaagtgtgaggggattgacgagcttcgccagtgccggatcggcatcaccgacgactgccttctctatcacagctgccgcctgcagtatataaacccggaaaattatacgaggggagcctatatcggcgccctgagcatgaaaaagagaattgaaaacctggaggaggagcttcgggagattggggaggaactaaagcctctggaggaagccaggcagacctgcgatcaggttctgtccctggaacctctttctctgactgtgtctgagtatggggaaatgtttgaggacctgaagaacctgaaaaagaagagggctgagaaaaaacgccaggagcaggcccttctcgaactctctgagggacagataagcgcctgggagaaagagcgggaggagcttcagaaggagatagagcaggaccgcggggctttgaaggccctggaggagaacctctggaagctgaatcgtgatattcagggcagggaaaagcagaatatagagcttcagggagagctgtcacagagggagagagagctttccgaaatgaaaaaagagatggaggaaaagagcggaacccatgctctcgagcagtttgaagcgaagaaggaggaggccctgctgtcagcttttaaggcagttccggacggctattccacggcagaatacgccctggagcggccggctcagtgcgagaggctgagggagacctttgaaaacctggaaagagagtcaggagagcgcagagagagccgctttgagaggctggaaaagcagcggatcgagtacttaaggcgccatcctggccgccgcttctcgccctccgacagaggaaatgaggagtacgacaaacttttggaggagctttcctgtgaccgcctttcagagtacagggagaaggcggccgagcaggccagaacggcagtggagcactttaaggatgactttatctttaagataagaagcgccatcaaggaggcctaccaccggagagacgagctgaacgagattatcagctcgctggatttcggaaaggataagtaccgttttgtcatcgagaaaaacaggggggctgacggaaagtattacgacatgtttatggatgaggccctggagattaatccggccagtctgagccagaacatggacaaccagatgaatttcttcaccatggcccacgaggaccggtacggggcgatgatgaacgagctcatagacattttcattccgccggatcaggccgccgccagggagcaggaggaggccagaaggcagatggaaaagtatgcagattacagaacctatctttcctttgacatgcagcagattatcgagggggaggagaccatgtacattccactgagccggatgatcaagaaaaactccggcggagaggggcagaaccccttctatgtggcactcttagccagctttgcccaggcctaccgcatcaacctgccggcccggttcagaagaaacacaaccatccgcctggtggtgctggacgaggccttctccaagatggatgcggaaaaggtggcaagctgtatccgcctgatccgcggcctgggcttccaggcgatcatcagcgccaccaacgacaagatccagaactacctggaaaatgtagacaagaccttcgtgtttgcaaatccgggaaaaaagtttatctccattcaggagtttgagaggaaggagttcggggagctggagtaa

SEQ ID NO: 42528 - DNA, 1401 bp, Faecalibacterium prausnitzii L2-6
atgaagttttttgaagcggttccaagcgaacttttctcgccgctggcttcgcccaaccgtattttatatgcggatgcactggacgtactgtacgcggcataccaagaaaacctgaaaatacgggaagatgtcttgtattccatgctgcgcggcaggctggagcaggaactggcggatgctacgtttgaagatgaagacattgacgaagaggaactgagggatatctctggccgcgctcgttttttgatccgcaagctctgtagtaaggggtggtttgagaaagaacgcggggacgactttgaagagtacatcacgattcctaattacagcagtcgcctgctggaactatttcatcaactcagggatgatagcccggctcgtggatattcctatgtgttcggaactttctcagtcttaaagaccgccgacgacagcaacaatgcttacgataaaatgacggctctctatagtgcctacgataacacaacggcgctgattagcttgttgcaaatggtctatcataatgtgaagcattattttcagacgcagatcgatatgcaggatgtcaaccaggtgctggctgcacactttaacgacttcggacaaaaggttgtggaggcatatatccgtccgctgaaaatcaaagattcagtgccgaagtatcgtgtgcccattcaatctatactgagacggtgggaagaagatgacgcgctgctgatggcaatggcaaatgaagcattgcgtgataagcggggcaagacattggaagactgccgtgccgatttgctgcggaaaattttctggatcgaagaacgctatgataatttagagaaggactatcttgaagaaattgatacgcaggtccggcgctataccagagcagcaacacagaaaatcgagaacctgacgaaccgagatcaaagcgtgcgcggcaatttgaatgttttgctgacggcactgtccagaaaccgcagggcggctgagctggtggaccagatacaaccggcatttcaattgtatgagcagtcttttttgtcagaaaaaagtctgtggtaccgtaagcgccccgaaaaacggacaaaaaccgcgtcggtgctgatacaagatgatcaggcaccgaatacggaagaacaggtcagagcggcacagttactgcaatcgaaatatggccgggcagcagtaaatgcttacgtgcagggatggctgggagacgctgacattcgttgctcggaggagctctcgcttgaagaggacaaggattatatcatgagtttactggcaatccttggaagcaaggatgcagctgccggttatgtagtccaggaactcgatggcattttttgcaaaaatggctattcggtcccgcaaatgcagatccggaggaaggagaagaagccgtga

SEQ ID NO: 42529 - DNA, 3384 bp, Faecalibacterium prausnitzii L2-6
atgaagaagctgaagaagatcctgctgatcaactggctctatttcagcaaggaactgattgaagtgggcaacatcaatttcctgaccggcaagaacggcgccggaaagtcaacggtcatcgatgcactgcaggtcgtactgctgggcgagacaaattcccgcaattttaatcaggcagccaacgaaaaatcgcagcgcacattggaaggctatctgcgcgccgacatggatgataacagcccgtattcccgtcgtagtaaggacttttctacctatattgtctgcgaatttcaggatgagatggagggcagcagctttgtgacgggcgttacctttgactgccgcagcgatggaagttaccgtgatacattctttatttacacggggacactgccggaaaattgctttattgaacggggcgaggcaatggagatctctacacttcgccgttttttgaagcagaactatgcacgggcagaattttatgatacccaaaaagagtatcgccgcaacatgcttgcaaagtggaacgtccacaacgagcaggtcttacggatgatgaagaaggctgtttcgttccggccaattgtggatatccagaaatttattacggagaacatctgcgatattccggataaacccaatattgagctgatgcagcaaaacatccgggattataaacggcacgaattgctggcgcagcgtcagcaggaaaagctggatgcgctgcagcaaatcagcgggctgtatcaggagatgaaccaagccatagaccgctgccagatccagaagtttctggtacggtgggccgaaaaagaagctgcgcagacagaaatcgaccagagggaattggaacgaactgaatgcaaggagaaccttgcaaatgtgaatgagcaacgggaggagcttgagcggcagatcgaacagaaagaaacgcgccgcagtgagctggagctggcctgcaggcagagcaacgttttccaggaggaagagcgtctgctcaacatggaaaaggctctgagagatgagcagaaaaagctggaacagggtctgcaaaatcttgaagtggaaatcaagcgggaagcacggcgtttacagagattctgtggggagatacaagaactggaaccggaagaacttctcataccggtgcaggaagcggcgaacactgcgcagaaagcatatgctgtatttactggtgacgagaagggattgcttgcccggcctgtggagttgtttgaaacggggcagcaggcagcggccgaattgtcggatgctgtccgcagtgcggctcataaaacagaggatcgtattgcagagctgaagaagcaagccgaccagaaaagtgcggtgcttgcaaatctgcgcaggaacatcaaagattatccccatgggcttctgctgttcaaagaccggctggaaaaggatctggcggataaaacggggcatgcggttcccgtttatattctggctgatgtgctggaaatggcagatgagcgctggcgtggagcggtagaaggctacctaaataaccagaaatattatctgctggtggagccgggacgttatcaggatgcacttaacatttacgaccggctgaagcaggaagcagagtaccgtgcatttggcctggtagatatcggaaaactgcgggaaaaagaaacacttcgaccgctgcccggcagtctggcagaaaaggtggagacagaaaacaagctggcacgcagctatgtggactatcttctgggtcgggtgatatgctgcgacacggcagaacagttgcgctgctataggacggcaatcacggcggaaggaatgctgtatcagggttatgtggcccgcgcacttcggaaagaccggatggaagatgctttcatcgggcggcgtgcggtacagctccgcatcgaccatctggaaaaggaattggcctgtctgcaggaggagcagcggcattggcagccgctccaaaaacagctagcctgcctgccggacccgctttttactcaaagatttgtccgaatcgatgtggcgcaaaagcaggaggactaccagcgcgtccagacgatcaccaaggaaatcgcagaagtcaaaaatcagctttcccagctgaatctgttctggttggatgagcagcggcagatcattgagcatctgaaagaagagatccttgcacttaacaaggaaaaagatgcgaaaaatgtgcaaaggggcaatctggaaagccgcatccaccagctggaatatgagatcttgccggaaaaatatcagcggtatgaggccatcgaagatggtttgaaagaaggattcacggaggaataccgagaaaccatcggtgttccccgctatcggcaggagcttgtccgcttgaaaaaggcagatgtcatccgcaagaacttcggcgacagtttggcgcagagcacaaaggcaatggacggggctcagaagaaactgtttgcagcacgcagagaatatgcagaacggttcaaaccctgtgcattccagatcgaggtgatggataacaccgaatacgaggaagaacggcgtactctgcaggaaagcgagctgccccgatacaaagaaaagatccgggcggcacgggaaagtgcaatggagcaattccagaacgatttccttgccaaactgaaatccagcatcgatcaggtgcaagaacaggtgcacaatctgaacaaggccctgcgccaggcacaatttggcacagacaagtaccaattccgcgtagggccaaacccggattatctggattattataacatgatcacggcagatgaactgatggaaggcgaatccggtctattcgcactgccctttcagcaaaaatacggcccactgatcgaaaaactgttcagtcagatcacaatggcagacgatacgcagctcaatacccgaaaacagagcgaactacaggagaatatcgtccgctatacagacttccggacgtatctgaagtttgatttggaaacgaccgatcagaacggttccaagcagctgctttctcaaacactgaatatgaagtccggtggcgaaacacaaacgccattctatattgcggtgctggcctcgtttgcccagctgtaccgcgtcaacgacgctacccgttttggtaatacggtgcgtctggtggtgttcgatgaagctttcaataaaatggatagtgaccggatcacggagagtgtactccttctccgaaagatggggctgcaggcaatcatctgtacgccgccggataaggtctcggacattatgcccattgcagaccgtacgttattagtggacaaatccggataccggatgcatatcattccatttggaaaggagatgcagaatgaaggaagcacaggtgatcctgaatcgtctgctggataa

SEQ ID NO: 42530 - DNA, 1239 bp, Faecalibacterium prausnitzii L2-6
atgaaggaagcacaggtgatcctgaatcgtctgctggataagtttgaaaatagtaagcatctttctgaacccaacacatccagacgtcgggtaatgctgcgcattgataaaagggagttgccggagtatcaatacgaagatgcggtggttcgggacgcttacaatattgcagcgcgggagctggagcagcaggctttggtgcgtctggaatgggcgataaagcagagcgttctctcctgcattgtgctggatctggaacgggtcgcacagtgctatgaatgcgccgacagagtgcatccgcaaaaaaaggcagaagaggttgcaaacatcatcatgcagaagctggcagacaatcccgttccatggatcgcggcatggagggatgctgtatgtgctcaggtgcggaacagcatgaaagtgccgacgtattgcagagaaaacgatggtctgctgcaggagcttttgctcacgtttcaacggtatgcggagctgtccggcagtgtgacgatgcgtgcattcagcagccagtgttttcacgataccaagtattttgagcgaaatgtacgggagctgtttcttaccattgcacgaaaatacaatacccaactggcggcggcctgtacagaagcgaaacttggtgagcgggatcagcttgcatttctgggaatctatgcccgcccggagctttacgaactctcgggcgattgcgcgatctgcttgaagaagggagaactaaggctcagtgcagcagaaccttatggattggctttgcctagtacacttgtgtcagagattgtgggcattgaactgaaaaacatctgctgcattacctttatcgaaaataaaacgaactatgatgaatatttgctggcagaaaaacagccggaagaacttgttgtttatcacggcggctttctgagcccgcagaagaaaaaactttttgaaaaactggctgctgcggcaggggaaactatgcaaattcgattctgggcagatattgatctgggcggtttttgtatgtttgaaaacctgcaaacggtgttcccacagcttgaacccatgcgtatggaagggcgctttgtggaacagtaccacaaaaatggcctgaagcggccggagcagtatctgaagaagctgaaagaagagcggaatgcgggaagatatacgctgtttgttgatgcaattgataagattttgcaatatggggtcacaatcgaacaagaaacatttctggagtag

SEQ ID NO: 42531 - DNA, 1434 bp, Faecalibacterium prausnitzii L2-6
atgcagttgtttgaactggtcagcccgcggctgttccggccgctggcggggccgaaccgggcattttatgcagagctgctgctcttgctgtgggaggagtgccgccacacggcagattacagcatcctgcgggccgaggccgtatcccgggccgaggattacttcgccgcgctggcaaagcctctggcactggacgccgacgacgcgggcgatgaggccgagcagcccacccgcgacccccacacgctggcgctgggctttctgctgcggctgcggcgcaccggctggctggccgaacagcccggcagctacgaagaagagcccgcgctggcctttgtgccggaggtgacgccgcttctcgaggcgctggaagagatcctgaacccccgggtcatcacctacaccggcaagctctacaaggcgtggcagcttttgcagaacgtgggcgaagagaagagcccctacgagaacgtcctgcgggaggtagccggcgaccttgaggcgctgaataagtccctccgcgccctcaacgcctccatcggccactacatcgaccgcctcacccgcaaccgcaccccgcaggaggtgctggagcttttcgaccagtacgaagaaaaggtggtggcggccgcctaccaccgcttcaagaccagcgacaatctgttcaactaccgcgccttcctcgaagagggactggacgactgcgagacgaactacctgccccagctggcgctggattacgcccgggtggagcgctgcgccccgagcgaggccgctcccgccgtccgcgccctcatccagaaacagcgggacgccctcgaagagatgagcaccctcatccgggagatcgacgccagccacgtccgctaccgcaagcgggccgttcagcgggcgcagttcctgctgctgagcgaccgctcggcccagggcagcgtcaccgccctgctgcggcggtacgccgaggacatcaaaacgcccgaccagctctttgagccggacgacggcccgctggccgcgcggctcaggctctggccggtgcaggtcttcggcgaaaagccgctctatcctccggccgcaccccgcaccgacgcgccgctggccccggtgcaggccggacagctggacgaagagcagcttcgccgggagcagaagctcctgctggactacgcccggatggccgtcaccgaggagaacgtggacatcctcgcccggcaggcgctggccgcacggccttctgtctcggcgtccaccctcgccgacgaatacccgaacgacttcgcacgcatcatcggactgcacacctactcccagtcgccgcgccgctgttatgacatccagctcaccggcgagtgggccacgcggggcggcttccggtttgaagaatttactctgacaccccgcaaggaggacgccgaagatgaccgaaacgaataa

SEQ ID NO: 42532 - DNA, 609 bp, Faecalibacterium prausnitzii L2-6
atgaccgaaacgaataaaatgctggaagagtgcgcaaattatctgctcaaccactgctttgtgctgggcggcgtggaggaccagcgcgccaaatatctctatgttcaggaccacctcaacgaggtgcgggccgtgtttgcgccgctgggctgctcggtggtgctctaccccgccccgctgcaggcggcggccctcgtcaacgagcatgagggcagtcaggcccggcttctgaagtacgagagcatcctgctcttagtcctgcgcctgctctacctccaaaagcgggagagcctctcggccagcgccgatcaggtgctggtgacggtggaagaggtacaggccgaactccaaaagatgaacctgccccgccgcctcgaccagcccacgctggaaaagctgctgcgcaccctgcgccggtacaatctggcccggccggtggggcggctttccgggctggacagccgcatcgaagtattccccactgtattgctcgctctgccggattccgaccttgcggacgctgccgccgaggtgacccgcacccgcagtgagctttcgctttatgagcggccggaggacggcaccgctgccgtggaggtggaagaatga

SEQ ID NO: 42533 - DNA, 3315 bp, Faecalibacterium prausnitzii L2-6
atgatagaactgaagcgcctgaagctcatcaactggcacaactttgagaacgtgaccttcgactgcgcccggctgacctacatgatcggcgtcaacgccgtgggcaagaccaccatcctcgacgccatccgctactgcctgaccaccaaccgcagcttcaacgccctcggcaacaaaaagagcggccgcaccctgcagggctctgtccacgccaagcagcgcggcgagaacgcctaccgccgcccgggccgcaccgtggcctacatcggcgcggagttctgggacagcgtcaagcgcacccacttcgtcatcgccgtccgggtcgagtcggaaggccccatgcaggagctccaccccggcgaccagacctggtatatctccgaggacggctgcaccctcgagcagctgcccttcatcgacccccgcaccggcgtgcccagctcgaaggagaacttcaagcccgctgtgggccgtctctcctacacccgcagccccggcgaagcccgcgaccgcatctgccgggcgctgggcatcggccgcgccgcaagcccgctgggcaagaagttcaacgaagtcttccagatgggcaccagtatggacgagatccccaacttccgggagtttctatatcagtacatcctgcctcagcccgagcttgatctggaagctttgcagggcgaccgggtggagctggaaaacctccacgccgtgctggccgaagcccagacccgcgccgccgcgctggaacagatcgtggactatggccgcgaagctgcccagaaggaaacggaagccctcgtcaaccgcggcactgccctgctggcccgtgctgaggaagccgccgccgggacgaacacctggcaggagcatcttgccgccggaaagcgccagcacgaagagctgacggcccgctacgccgccgcaaaagacgccgaggccgaggcccgccgggcctacctctcggcccacagtgccgccgccagcggcgagggccgggcgctggacgccctgagcgaggagctggcccgcaaaaggaccgcgctggacaaggccggccgggacgcttccagaagcgaagccgccgcgggcaacgtgcagagcctcttgcagagcttgcagcgcagcggctttgccgtcgaaaaatcgctctggcccgcctcactgacggcggagactctgcctcagctccaaagcgccctcgccgggctggaaaagccgctggaagagcagtatttcgccgcacggcagagcgccgacaccctcaccgccgaggtacaggaaaagcaggcggagctggcctccgtctcgggaggccggtgggtctacccccacggcgacgccgccaccagagtgcgggacgccgtgaacgctgagctcaagagccgcggcatgacgccggacgccaagatcttctgcgaactgctgagcgtcgaggacgagagctggcaggactgcgtggaagcctgcctcggcaaccgccggttcgacatcctcgtgccgcctgcccactacgccgccgccaagagcgcctttgtggccctgcgggacaaggtcggccccatcagcctgctggacacccccagcatccgcacggccaaccgcaaggccgacgccgcccctgccgacagcctcgccgcgcaggtccgaagcgagaacccgctggccgcacagtatgccgacaccatcctgcggcgcatcgtctgctgtgacacccccgacacactggaaaactatcccgacagcgctacccgcgacctgctgcgccaccaccccttccgcctcgagcgtctccgcacgccccagcggtacatcggccttgacgcccgccgcgcccgggccgaagcgctgacgaaagctctggatgagctgaccgcccgcagcaaggaagcggcgcagtctgccgccgccctcaaagccgcacgggacggctatcaggatgtgctgcacagcagcgtcatggatgagctggccgcgctgtgggacgcccgcgccgcgctggaagcggcccgcgccgactgcaccgcacaggagcagaagctggccgagtgccgcgagaacccgatgctgcagcagctttacaaagaggacgaggcccgcgaggccgcgtgggacgccgcccgcgccgctgtggagacagccggcggcgacatccgtgtctgcgaaaagcagctggcctcctgcgaggctgagcagaccaaggcagaagagaccgccaggcaggcaaaggacgccgccgaccggttcttcgggcagtacccgcttttggagccgctggcacgggagcgcttcgcggccctgagcaaggacaaaggcccgcgctatgccgcccagtccgccgaaaaggcacaggcccggctggacgacgcactggccgtctacctcaccggcaccctcgagcctgcccagaaagagtacaacacccgctacgtctgcgatcatccgctgggccttacgggcatcgagcagtaccgcgcccagcacgagagcctcgtgcgcattgatctggagcggtacgccgcccgcctcgagcaggcacagcgcgactgcaaggaccgcttccgcaaggacatcctcttccggatgaaggacgacatcttcaacgcacggcggcagttccgggagctgaacaaggtgatggaacagctgacctacggcgaagaggtctaccgcttcgagcttggccccagccgcgacccccagctggccgcgttctatcaggtcatcgtggacaagggaaaccagcagatgaccgacggcgactcgctggacaacctcgccgccaccgccgaccccgtctatgagcgtcaggtggacgagctgatggaaaagatcatggccgatgtggacgagaacacccgcgcccggcaggagggccgccgccccgagaatgtcaccctttcggattatgtagactaccgcacctacctcgactacgacatcaaagtgaccaacaccgtctccggccagcaggcttccctttcccgcgtcagccgcgattcctccggcggcgagaatcaggcccccttctatgtggccatctgcgcgtcgctgctccagatctaccagaagagcgagaacagcatccgtctggtgctgctggacgaagcgttcagcaagatgaccagcgaccgcatccgccccatgatggagctgttccgtcggatgcagctgcaggtcctgctcatctccaccgtcgagaagagcaccgccatccagccctactgtgacatcacctattccatcgtgcgccacggcgacgtgaacgccatcgcgcccttttaccgtctgaatgcatcggaggaaattggatcttga

SEQ ID NO: 42534 - DNA, 666 bp, Bifidobacterium longum subsp. longum F8
atgaccgtggccgaggaacacgaggagcatatggacaacgccaacccgtacgccctgttcgaaggcgacaccggcgacatgccggccgaggcacgcatggccgccatcgccctcaaacgtgaccgctatatcagcgggcccacctacgacaccgtgctcgacaaccgcgacgccgtcgtacgctccctgaacaacgacctgctcgacttggtgatcaacgaacgctaccgcatcatgtacgccacgcccgtggccggcgacgacgtgaccctgcgctcgctcaaaacccgtgtcagcctcaaacgcgaggaggccgcgctgctcgccttcctgcgcatccgcgtcctcgaatacgagaacgtgcacgccgaccccgccgactggctcgtcagctttgaggagatccgcgccgcgctcgccaccggcgccggctatctggccgcccgcaacgacgaggaaggcgtggcaaagcagatcggcgccatcgtctccgcgatgatcacctacgggtatttggtgcgcctggacgacgaagccatgtaccagatcacgccgctcgtgcccgtggtgctcgaccgcgaactggccgacacctggctcgacgtcgcggaacacggcgacggcgacacggaagatgacgatgacgacgagaagggagccgaatga

SEQ ID NO: 42535 - DNA, 3549 bp, Bifidobacterium longum subsp. longum F8
atgatgcaggcgacagacgtgcagatgatcgcggaccggtggatgctggaatcccgccgactcatcaactggggctcctatgagggctaccacgaattccgcccctccacggaccacaagctgccggtgaccctgctcgccggcgccagcgaatccggcaaatccacgctggtcgacgcgcagatctccctgctgtacccaaccggtacgccgttcaacaaggcctcgaactccggccgctccgaacgcagcgactacacctacctgcgcggcatggtcggcgtgggcagcaccgaaaccggcgacgagccgctctacctgcgcggccgcgacgagaacggcgcaccgcaacccgtgtggggcgccatcgtggacacctatcgcaaccagaccaccggccaggtgctctcctgcgccaaattcctctacctgatgcccggcgacggccgcggcgacgtgcgccgacagtacgtggtctggggcaagcccgtggaccccaggcgcatggaccaataccgtgacgccccgttcacgccggcccagctcaaagccacctaccccgactgcctcacattccccagcgccgaagcgttccacacacacatctggagcgcaatgggcctgagcgaggccgcctgtcgactgctgcacaagatccagtccgccgacgcgccctcccggctcgacgacatcttcaaacaaggcgtgctcggcgtgcccgaagccctggacctggcccgcaccacggtcgaggactacgaacgttacgacgagaacttccacgccatggacgagaagacccgccgcatggacacgctgcgcggcatccaacaggcctacggcgaatacgccgccgcacgcggcaaggcccgcgccttcgaaccggtcaagccggccgtcgacggcacggtaccggccgtgctgcgcgactgggcattggcccgcatgcgcggcgaagtcgccgtccaactgcccgccgaccgcgccgaacaacagaacagcgaggcggaagccaagctgctgcgccgccgaaccgaagacctgcgcacccgtctcgacatgatccgcggccagatgcagggtctggacggcggcaacctgacccgactcgaactcgaactcgaccaggcccgccgcaccctcgaagacgtgcaagccaaccgaacacgaatcgaacaaacgttcgcatccatcggcgagacgctgcccggcgacgaacaagcctggaacgaacgccgcatcaacgccgtgaacttcaaacgcgaatacaacaaacgagacggcgaatgcgaggaagccctcaccgccgccatcaacgcgcgggccggcgcacgcggcgacctcgaacgactgcaacgcgacttcgaccggcaacgctcccagcgcacccgcatctcccagcagatggacgaaacccgcgccatgctctgccgcgccaccggactcgcccccgccgaactgccgtacgtggccgaactcatggacgtgaacgaacacgaggaagactggcgtctcgccatgaacgtcgcctacgcgcccatcgcccagaccatcctcgtcgacaagcgccacgaacagggcttcgccgccaaagtcagcaccatcgacccgcgcaccatgccccgacgcacctggcagttcgtggacaccgcacgccactacgacgacaccggcgcgcacgcgaacatactcaccggagaacaggacggcgactggttgtccggcaaactgcgctaccgcgacgactcgcccttcgccgactggctgcgctcgcagacccaggacgaacgattcgacgccctatgcgtcaccgccatcgacgacaccgaccgcaccaaccgtcaggtgcaggccgacggtcagatcaaatccggcgcacgcggccagcacggcaccaaagaccgcgcccaggtcatcggattcgtcaacgaaacctacctcaacgcgctcgcagcgcaggtcgacgccgcccgcaacgcgctcagccaagccgacaccgactacacggccgccaaaacacagtccgataacctccaccgcgaactcgaactggccaaccagctcgcctacacgtcatgggaacgcatcgacatcgccggcgcgcaacggaccatcacggacacgcaggacgccatcgcatccatcaaaaacgatcccaaactcgccgaactcgccaaacagcgcgacgaactgaacgccgaactcgaccgtgtggaacgccagcgcatcgaatccgaccaggccgcggcccgcgccggcagcgccgtcgaagcggcgctcatctggctgcgcgaccatgccgacaccggcacgacggacgccgccggtgccaccgccgacaatgacgatgacgccgcttccggcccgctgccggacgaagtcacggcggcgctcgccgaatcctacgacaaccgattcgccgggctggcggacgcggccatgcgcgcgcacatgatcatcggcgcgggcgcggcaggaacgcaggcgccgggggagagtttccccgaacgcaccatcgccggcatcggcaaggacatgacctcccgcatcaatctgctgaacggccaggccgacgccgcgcgcaccggcgtcgaatcgaaaatgagcacctacatcgcgctctacgcggccgacgacgactcgctgaccgccagcgtggaggactaccggtactatctcgacgaactcgccagcctcacccagctggccgcggttgccgccaccgacgccgaataccggcgctgcctcgaacagctgctcaggagcttcctgaccatcaaacgcgccatcgacacggatgccagtgacatccacgaccagcttgaccgcatcaacgccatgctcaaaggccaacagttcggtcccaagcacggcagcctgtccctgcacgcggacgtgcgccgtcccgagcgcgccttctggacgcagctcatccgcgtcatcggcaccctgaacgattggaaatccgccgacgtcaacgattccgacgcctcgcgcaaggccttcgcggcctgtgcgccgatggtcgggctgctgcgcgccgaactcgcgcaggtcaaggacacgaacggcgtgaaaagctacggcgcccgcaatctcgacccgcgctgccgctcgtccttctacgccatcgtgcatcatgccgacggtccggacgaacgcatcacctccaccggtggtcgctcgggcggcgccttgcaggagctcacctcattcgtatacggcgcggcgctcatctacctgctcggcggcggcctgaccagcgagccctcgtacaccacgctgttcctcgacgaggcgctcatcaaggccgacggccgttacacgcagcgcgccctcacggtgctgccgcgcctcggattccaggtcatcgtctccgctccggaaagcaagaccggcgaaatcctcgaggtctccaccaaggcctacgtgacctacaaggaccccgacaccggcctcacctccctgcgcgaggccgtgctgcatcagaatgacatggacgatgaatcatcgtcggatatattgaaggatgacggggttgccgaatga

SEQ ID NO: 42536 - DNA, 1185 bp, Bifidobacterium longum subsp. longum F8; identical to SEQ ID NO: 41659

SEQ ID NO: 42537 - DNA, 1473 bp, Cellulomonas fimi ATCC 484
atgatcactcgtgccgaaggggcgtacctgggcgccctccgggccttccagaacccgatgctcgacctgctccacaagcggcacgccccgctcgtcgtggcgctgctgtcctcggtgttcaccgccgagcgccccacggttcccgtcgccgacgcgcacaccgagatcggcgacgccctggaccagctgcgagccgccgggtacgaggacgggctgcccgtgggtccggcgcgggacctgtgccgccagtgggcggacgccgggtggctcgtgcggcaggtgctcgacgacgacgtcgaggcctaccgcctgtccgcgcacgccgtcggcgcgctggaggtcgccggccgggcgggcggcacgggcgcgcgcgtgtcgaagtcccgcgtccgcacgctcctggaggcggtcgaccggctcgcgcaggacgccgaccccgacgtgatggtccgggtcgcacggctcgacgcgcaggtccgcgagctgcaggcggagctcgagcggctcgagcgcaccgggacggtcgacgaggtcgacgaggaggagctcctcgaggaggccgagaacgtcctccacctcgtgcgtgagctgccgggcgacttcgcgcgcgtcgccgagtccatcaaggccatgcagcgcgacgtcgtgaccgcgctgcggcaggacgagcgccccacgggcgacgtgctgcgcgagtacctggagcgcggcgagcacgtcatggagtccaccgcggagggccgtgcgttcgccggcgcgctgcggctcatcggcgacccgcaccggctcgacgggctctcgacgcagctcgggctcgtcctgcggcaccgcttcacgcgccggctcacgccgcagcagcgcaccgacctgcgcgaggtcggccggcggatcgagcagggcctcgaccaggtgttcacggcgcagcgcgaggcgtcgtacgtcatcacgacgcaggtccgcaaccacgacccgctgcgcgaccggcaggtcgacgacctgctgcgcgacgtcatgaccggcctccagtcgtggatgccgctcgcgcgtcgcgggcaggccgtcgagcccctgcgccgcctcccggtcgccgaggtcgagcacctgcggcagtccgcgggcgacctgcgaccgcccgagccgcccgcgccgctggcggcctgggacgacgacgacctcggtgcggacgaccacgaggtgcgggcgtggggcggcccgcactacgccgagctgcacgaccacctgcgcacgttcgcgcccgacgagcccgtcgacgtcgcggcggccttccaggcggcacctgcgccgctgcgacggccggtggacctgctcgggctgctggagatcgccgaccagctcgggatgaccgagacgggcgagctcgcgtacgtcgacgcggtccggccggacggcacccgccgccggttcgctttcggcggcgtgacgacacggacgaaggacgaggacgatgcctga

SEQ ID NO: 42538 - DNA, 825 bp, Cellulomonas fimi ATCC 484
atgcctgagacgaccgccgacgtgacggccgccgacgtgacggccgacgacgtgacggccgacgacgtgacggccgacgacgtgacggctgacgacgtgacggccgccgacgacgtggccgccgacgagggggagcgcggcggcttcatcgcgcccgtgcccatggaggaggaccccgccgagctgttcgcgggggacacgggcacgctcgacgccgacgtgcgccgcgtgctcgtcaggctgctgcagcgccgctacctgctcgccgagcgcagccccgcccagtggcgcaccctcctggagaaccagcaggtcgtcgagtcgcggctgcacgacctgttcgtgcacctcgtcgtcgaccacgaccgcggcatcgcctacaagaggcaggtgcggtccgccgagctcgacgtcccggtgctgctgcgcgacgacgcgtactcgcgcgccgagaccctcgtcctggtgcacctgcggaccgtctaccagcgcgagcgcggcgcgggggaggcgtcggtgcgcgtcgacgtggaggagctcgagcagaccgcgctcacctacttcgacgccgacgacaccaacgtcgccgggcagcagcgcgagatccgcggcgcggtcgcgcggctcgcgaaggaagggctcatcgaggaggagtcggagggccgctaccgcgtgacgccgctcgtcgaggtcgtgctgagcaacgagcggctcgtcgagctgcgcgggtggctgcgcgagcaggcggaccgccgcgccgcaggccccgacgacggcccgggcgccgaccacgagacggccgacgccgaggaggtcgcacgatga

SEQ ID NO: 42539 - DNA, 3357 bp, Cellulomonas fimi ATCC 484
atgacgatggtcgactcgctgttcgggctcatcccggcggcgtccaccgggcagcagtgggtcgcgcgcgacctgcagctcgtcaactggggcggctacgacggtcaccaccgggtgcgcctggcgtccaccgcgacgctgctgtcgggcggctccggctcgggcaagtccacgctcatggacgcctacatcgcgctgctcatgccgcacacgacgccgttcaacggcgcgtcgaacggcggggtcgtcgggcggccgcgcggcaaggaccagcgcaacgtgctgtcctacgcgcgcggcaagctcgacgagtcgcgcaccgaggacggcacccgccagcgcgtgctgcgcggcgacgggcaggacacgtggtcggccatcgcgatgacgtggacggaccagtccggcaccgagctgacggcggtgcgcgcctggtacgtgccgtcggccgcgcgcacgctcgaggacgtcacggccgtgcgcgcgaccgtcgacggcgcgttcgacctgcgcgagctcgagcacgccgcgagccagcgcctcgcgcgcgccgccgtgaccgccgcgggcctgacgtgcttcgacaccgaccgcgacttcaccgcgcggctgcactcgtcgctcgggatcggtgccgcgggcgacggcaaccgggcggttgcgctgctcggccgcatccaggcggggcagcagatcacgacggtcgacgccctctacaaggcgatggtgctcgaggagccggacacgttcgcgaccgccgacgcggtcgtcgagcagttcgacaagctcaccgggacgcgcgagcagatgatcaccgcgcgccagcaggtcaaggcgctcgagccgatccgcgagctgcgcgcgaccgtcgaggcggggcacgagcggctgcgggtcatcgaccggatcggctcgttcgccgacggcacgtcgcccgccgcgctgtggcggcacgagcgccgcctcggcctgctgcgcgacgtcgaggaggacctgcagcaccgccaccagcaggcgcagcgccgcaccgccgagaccgcggcacgggtcagtgccgcgcgcgccgagctcgacggcgtcaaggaggcgctgtggtcctcgggcggcgaccggctcgcgaccgcgcagcgcgagctcgcggcgacccgcgtccgccgcgacgacgccgcccgcgcccgggcccgcctcgacgacgtcctgcgcccgctgggggtgcgcgtcggcagcgaggcggacctcgccgcgctcgtcgcccgctcgcaggccgcgctgcacgacgccgacacgaaggccgcggcacggcaggcgctgttcgacgcgatgcaggcgaagaaggaggccggggccgacgtcgcggagctgcgcgcggagcgcgccgccgtcgcgagccgtcgcgacaacatccccggcgacctgcacgccgcgcgcgcggcgctcgcgcaggcggcgggcctgagcacggacgagctgccgttcgtcgccgagctcatcgaggtccgcaccgagcacgagccgtggcgggacgcgttcaacctcgcgctgggcgggttcgcgacgcgcatcctgctcgacgtcgcgcacctggccgcgttccggcgcgcgatcgacgccgtgcccctcgcgcgccggatccggttcgagggcgtcccgacgggcatccgcgacgacatcggcctcgacgtgcggacgctgcccgggcggctcgactaccgcagcggcccgttcacgggctggctgcgcagcgagctgtcgcgccgcttctcctacgtgtgcgtcgacaccccgggcgagctctctcagcacgccaaggcgctcacgcgcagcggccaggtgtccgagggcacgcagggcgcgcacggcgggcaggggttcgcgaacctgctcgggttcaccaacacgcgccggctcgcgcacctcgacgagcagatcgcgcgcgccgagcgccgccgcgcgctcgcggaggaccgggtcgtggacgccgagcgggacctcgaccggcacgaggagcagctcgcggcgcaccgcgcgctcgccgacgtctcgtgggaccaggtcgacgtcgccgcggcggacgccgagctggcccgctgggagcaggtcgtcaccgacctgtcgtcgggcaacccggaggtcacgcgcctgcaggaccgcgcgcgcgagctcgagcagaccatccagcgcctcacggaggacctcggccgcaccaagggcgacgccgaggcgctcgccgcgcgctggtcggcggtcaccgacgaggtcgacgaggcgcagcgcgcgctcgacgacgcgcaggacgcgggcacgaccgtcggcgccggcgagcgcacctacctcgacggcctgctcggccaggacgccgcggtgcccggcgcgggcgagccggcggcggcgctggccgagttcgacggcgtcctggcccgtgccggcgaggtgctcgcggccgcgcggctcgccgcgcagcagaccgtggccacggcccgcgacgcgctgcgccgcacgttcgagacgttcgtcgagcgctggcccgaccccgacctcggcaccgacccggacgagtcgtacggcgacttcgcgcgcgtcctggccgacctggagacgagcggcctgcacgagctcgaggccgactggcgccggagcctcctgcggctgtccggcaacgacctcaccgacctgcaccacgcgctgagccggtccgtgcgggagatcaaggagcgcatccagccggtcaacgacatcctggccgacctgccgttcgccgacgacgaccaccggctgcggatcgacgcgcgcgacacgcagtcgaccgtcgtcgcccgcttccgcaaggagctgcgcgacctgcgggaggtcctcgccacggacgcgacggacgccgagcgcgagcggcggtacgtgcgcatggccaaggtcatcgaccggatccgccgcacctcgccggatttcgccgacctcgtcgacgtgcgccgccacgtgcggctgtccgccgagaaggtggacctcgagggcaaccacgtcgcgctgtacgaccacatcggcgagaagtccggcggcgagtcgcaggagctcgtcgcgttcatcgtcggtgccgcgctgcgctaccagctcggcgacgccggcgcggagcgaccccggtacgcgccggtgttcctcgacgaggccctcatcaaggccgacgcgcggttcacgggccgcgcgatcggggcgtggcgcgggctcggcttccagctggtgatcggtgcgcccaacgacaagttcagcgccctcgagccgcacgtcgacgtcaagtacgtcgtcctcaaggacgcgtcgggccgctcccgcacgaagccgatcgcgggggtcgcggcgccgtcctga

SEQ ID NO: 42540 - DNA, 1419 bp, Centipeda periodontii DSM 2778
atggaactgtttgatgttttgccggaacgtttctttgggctcctggcggggaaatgtcggcggatctatgcggaggcaggtctttgtctctatgagcagtatcgccttgcccaatttgggatcgagcaggagattctgcgcgataaatttcaggagctcatcgagagctgggcagatgccggcgttgcgtatgaggacgaggacttttcggggcaggatgcagccgtggaggagtcgcgtgccaaggcaaatcatatgattcgccgcatgaaggaattcggctggctggactatgagcagcgcgagaacttcaagatatttattttgctcccacattacagcagccgcttgtgggggctttttgcaaatttatgcgaggggcgggcggtcgagtatcagcgctttgcctttacgacctatcaggtgctctcgggggaggcagcaaaggtgcagccgagcatggcggtgctcgaggcggagcggctcgccgaagagttcgtcgaggaactgcggattctcttgaacaacatcaagaacaagatggagcaggtgtccgcgcagacaagcctgcaggaagtgctctcccaccattttgtcgaatatcgggcggatattgtagatcgcagctaccatcgcctcaagacatcggatcatgtctcgcgctatcgcatccgcatcctgcaggaggtacaggagatccggcagaataaagagcgcctgcgtgcactttgcgaggacgctgtacgccgtcagcttgccgactcgatggaggcggcggaataccgcatgaacgcatcgctccatgccatcgaggagatctatcgggggctcgatgatatgttcgcacagattgaccgccgtcacaatcagtatgtaagagcctcctatgagcgcgcactctatttgcagcaggcggggagtgcgcgcacggaaagcatgatcgcaggtacgctcctcgccatttccgaggcgcgcgagcaggggcaggaaatagagggactgccgcgtctctttcatctgcagacgatgaatatgcttctgccgtcatcgcgctatgtaccgcgcaaaaagcgcgttttggagccaagcgcgggcacgcctgtgcgtgaggttgacgaaatgatgcgagagcgcgtacggcgtgaaagtgcggagcgtgttgcacgcggcatctcacggcagaagatagaggcatggattttggacgtgctggggcagcgcagctcgatggagattcgtgaactgttgtctcgcctcagagaggaggagaatcccgacctcttgcaattactctatgtctatctctacggacatgatgatttggcaaagtatcggctgggcaaggacaaggacatcgaggagatggatacactccggtacagcaaccgcgtggtcagacgcagggagaagagaaaatga

SEQ ID NO: 42541 - DNA, 600 bp, Centipeda periodontii DSM 2778
atgaaactggaactgttaaacgagcaggagcgtgagcggattcggagtgtcatacagtccctgttggcgtgtaattttttgacgcgtgaacacgatgcggaactctacattgcggcacggcgatatcgggaggaaattgccgagtactttcaggtgatcggctgggagtttcgcgtggatgagcgctatgagatcgtgtggttgctcagtgcggggatggcacacaggcgtgcgctgaccttggaggagagtatctggctgcttgtgctacgcctcctctatgaggaaaagcgcacgggtctcaacctgagcgcgtttcccatgacgacacttgccgagatccgtgccaagtatctggcgctgcatctgcccgatctcaagaaaaccgcgattcagcgactgacacagctatcgaaacagtaccgtcttgctgacgtattggatcgtgatctctccgaagaggcgcgcattcgcctcttccatacactctcccttgccgtggatggagaggaactttcggatctgcaccgtaaactggagatttaccgacagagaaaggaggaagacgatgaagaaactgcggaaaatgaaggtaattaa

SEQ ID NO: 42542 - DNA, 3321 bp, Centipeda periodontii DSM 2778
atgaagaaactgcggaaaatgaaggtaattaactggcattattttgatgaagatgagatttcttttggctccgcaacgatgctgtccggacacagcggcgcgggcaagtccacgctgctcgacgcgctgcagtatctcttcattggcagtcaaacgcagacgcgcttcaacgccgccgcgacacaggaggcgcggagaacgctcatccactatctgcgcggcaagatcaaggcagagggcgtgcagtatctgcgcacggatgagtttacctcttacatcgctctcgaattctatgacgatgccaagaaaaattcttttattgtcggctatgtggtcgatgtctttcgcgatgacagcttgcaggaggagttctttctcctcgatcagcgtacactctcagacgttgaattccgtaatgcggatggcgtattgtacacacgggaggcatttcatcgaaggtatgcgcacgggagcagcgtgtttgagacggggaagaagcagtggcaaaggcgcttgatgaaccgtcttgggcagctctctgcacgtttcctgccggcgttctcgcgggcgcttgcctttcgccccatcgaccaagtgcgcgattttatctacgaatacatcctgctcccacgcgatctgaaactggacgttctgcgagaagtattctattcctatcagaagttcgagcgtgacctgcaggggctgcgcgcgcagaagcgccaacttgaatcgctgcaggagaactacgattcctactgcaaatggcgggatacggcgtgcgagcaggaatttgttctgctgtccttccgtcacaggaacgatgaggagaagctggaggcggggcggcaacagaaagagatgtgccatgatcgattgaaggctttgcaggtgaaactgcgcgaacaggagcacctgtccgaacgcaggaatctggaacagcaggaggcgtatgccgcatggcagggaaatgacacaaagcgcaggcgcgatgccctgcttgaaaaacaagcggcatgtgaagaaaaacggcgtgcgctcacagatgcgcatcggcgcatgcaaaaggagcttttgcgtgaatccgaaggagcgcgcgctctctctgcctatccggcagggactttctttgccctgcccgatgggatggatgcggcactcacagaacttgcggcgacacttgcctatgtgggcggggattcgattgcggcgtcagagatcgagccgatacaggaaaagctgcgtgcaggtggcgcaatgctcgctgagatcgccgggacatggcagcgcagcagtcttcttttggaacaggagcagagtgcgatcgcacagcggcaggaggaactgcgtgcggagatcgatggtctgaagcgacgacagcgcaaataccgtcctgagatgatgcggctcaaggctttattggagcagcgtcttgcaggtcgatccaaggtctatgtgctctgtgaggagcttgagattctggatgaggcatggcgcgatacgctcgaaggctatctgaacacgcagcgctttgatctcctcgtagagcaggaaacgtttcgtgaggcgctgcatatctacgaaacggagaagaaggaacggcattttgacggcgttgggctcgtcaatacagaggcggagaaaaagtatctgaatcgccgagaaaacggatcgctcgcaaacctcctgcaggcgaagaacccgctcgcacaggcgcgcatcgaccatctgcttggaacggtcatgcaggcgcaggatgagcaggagatgcttgcgtatcagagtgcagcgacgaaaacctgtatgtcgtacaagggcttggtcgcacgtcagattccgcgccgtttctatgagattccatacatcggcgcaggtgccattgagcggcagctggagattcggcagagagaacttatggaggtgcagcagcgccttgccggacttgccgaggaagccgagcgtatgaagcggattgcccctattcttcgtgagcctctgcacagatatgtgaactttgctgaaaagatgaccgttctctccgagctcgatacttgtctggcagaggggaagcgcatcgagagtgaactggctgcgatggatctcagtgagacagagcgtctgaaatctgtctatgaggaatccaggcggcaggctgaggaggcagcacgtgcctgcacagcaacgacgagagagctggcacgcagcgagtctgcactcgatcaggcagagcgtgtgctgcccctcctcacgcgtgctgcagatgaggcggcagcggcggttcgggcgtggcgggagacctatccgggactctgtgcgagtgccgagtcacgtttctcctccctcgtgcaggagacgcgtgacgagcgtacgacggaagagcgcctgcacagctatgagagcagcaagcgggggaacgaaacacggcgggacaatatgtggcagcagctccttgttgcccgtgagcgctatgggctcgagcatggagatacggggcatgtctacgatcccgatcacagctattatgcacagattcttgatcggcttgccgcgacggacattccttccttcgaggagaaggcaaaggaggctctggcacaatcggagatggagttcaaggcacatttcattttcagtatgcgtgaggcaatcgaaagtgcacgtcatgaattccgtgagctgaattattctctggatcaatttcaatttcacaaggataagtacagttttattatcacgccgagtgcgaagtacaaaccgttttacgatgctgtgatgacggcggattgggagatggcgggcggactttttgccgagacggacacggccgcaaatgagcaggcaatggaactctttgacaaattggtcaaaggcacaccggaggagcaggaggagttttcggactaccgccgctatctggactacgacatccgcatcacggatacggcaggtcagacctatctgtattcgcgcgtgctccggcagacttcgggcggagaaacgcagacgccgttttacattgcaattctcgcggcatttcaacagatctatagcgataagacgatacgcctgacggtctttgatgaggcatttaataagatggacgaggagcgcatcaaatcctgcatcgaactcatcaagcgcatgaagatgcagctgattgtcgccgttccggatgagaagctggcggcaattgcgcctctgatggatcagtcgatcattgtaacgaatgccgggaatcattgctttaccgatgagctgggggacgtggcgacatgggagaagggaatgacgcatggatcggacacggctgcaaaagcgttatga

SEQ ID NO: 42543 - DNA, 1227 bp, Centipeda periodontii DSM 2778
atggatcggacacggctgcaaaagcgttatgaggagaagattctgaccatcctgttggaaaaatatgaaaacagcaaagccgccgtcggagagaaggggcgtcgcccacagttccgtctgttgaaatcctcccttgccccggactatacagatgaactcgatgtcgataaacgcgaagcgctccatgcagcagcgcaggaacttgagcgacaagggatgatctcaattgtctgggagcgtcacggcacgggacatatggagcgtattctgctcgctgcggacgttgcagagctttatgcgcgcatgaggcgtacgctgccgcttgcacgcgtggaggagtattgcgccgaactcgcggcactgtcggaggcaaagacactgtggattcagcgtctttgccgtgagacgggcgaaatgctctcagagaagaagattcccgcatatctgcccaaggagaaagtgcttcgcgcccacctgatccgcgcgattcttgcacttccacatgcaggagagaattccataccgaaacgcgtattcagtcagcgcatctttggcaacagcaagtattttgagcagttcgtagaggctccattgctcgtccttctgcggcgattcacagaggaaccgtgtgagtcggacgcagagtatctcgatatgtctgggattgccgggcatcagggcaaggtgtggattgcgggcagcatggcgtttttactccatggcagaagatattcactcgctgatttttccggtgggatggggctgacgtatgaaacaatcacagagatgttgattgatacattgccgcacgctgtcctgacggtggagaatctgacgaatgcggagctgcttgcacgggacggcggagaggatcgtcttctgatctatacggcgggatttccgaatcgtaccctacaggcattccttcgaaaaatcgccgcaatgcagcctgtcctcgtgcagcactggggggatctggactatggcggaatttgcatctttgagtacctgcgcagtcatttctttccaaaactcgccccgtatcgtatggatacagagtcttttcgtgcctatttgccgtacgcgcaggaactgaaacccacgcagcgtaaacggcttggcagtcttctcgaacgcgaggagttttcggcgtggcatgaactcatccgcattatgttggatgaggggaagtgggtggagcaggaagtcatgctctgggcaagataa

SEQ ID NO: 42544 - DNA, 1392 bp, Marinomonas posidonica IVIA-Po-181
atgttgtttagtcatttgccagatgaaatttttcaggcgttaagcggctcgaataagactctcatcgaagcagtactcaaagatctagctgacgttttctatgatcatgccgaggatccgataaaagataagtccaccattattgagtcaattgaagatacccttcataagctggataccttgtcttggcatgaggaccaaaaagagtctttcgattcaccaaaaacaattcatgattatgccttgcgtatctaccacagattagtcaacacaggttggcttgttgaagaacaagagttatatcgtgttagcgtgctcatgacgccacagatatccatgttgcttagatctttggttgagatcagcagtcatggcaagcgtaactatggcgcgactgtgctaagtattttgagtaatcttgaggccgtagcaaagcaaccgaaagaaagaggcgtgacacttcgccaatcggctgaagctgcgcgcgaattttcggcacacttgaatcaaattttattaggtattcgtagcttgcaacgtgagttatttgccagccgagaccccaaagccattgtttctggtttttttgatttatttgttgaaggcattttaatcgccgactacaaaaccattaaaaccagtaacaacccgtttcgttttcgccgacaaattcttgagttaacgcaagactttttagccaacccgaccaccatggggcaagtcgcgcaatgttatgttgatcaacaactgattaccatggcagaagctcaagccatggttgaacaagattgtcgcgacatattgaaaacgtttaataacatagagcaacgcctagaacggattgacgaatatcgttatcggttggaaaaacgtgccgcggataccgcccgttatatggacagttcgcgtcctggcatggcgactaaaattgccggtattatcagtgatgtggcgaaattcgaccatttgccagtaatgaaacaagtggttggttcacgtttcgttggcatggcttcagcagcacaaccgacaaaacgtcgtgaggctccgccacctcgtataatgacgcctgccgaagtgtcggctgatgccattaaatttagagatcagcaacgtcgattccatgaagctcgtcaggtgacagttgctaaaatgcagacttatcttgaaaaacaaatggcgagcagcactcagaaacacattctggattttaccatttcatcagtggaagactttgtttgctttgatcatcttcgttacatcggctctttaggcgtgagtgcgaagaaattagaaaatgtgtttgaaatacaatttaccgatcaatttgtagatgttcatgattttgttgaatgccgtgagttcaatgttgtacgtaggagcgaagcttaa

SEQ ID NO: 42545 - DNA, 648 bp, Marinomonas posidonica IVIA-Po-181
atgcttaaagaattaaaaaaggtcgttgaagagtcaggaaaggacgcacaagagttccaacagacagcgaattatgtcattgccaatcaatttgccagtgcttacaaacacggccaacgcaaacactacttattacttgaatcttatcaagaatattttgatcgcttatttgatgcccttggcatgaaactctacattaatgaaaatgaacgtttggcaggggttttacctgtgcagagagaagcttttgttcgattgaaaaccgacgaaactttattcttgcttgtactacgacaaatatacgaagagaaaattgaaaatttcgaagtggacaacggttttgtggctacgaatacccacactattttagatcgctttgtgcatttggtaaaacgagagatcccaagtgaaactcgctttaaagatattttatctttattcagtcgtcatggggtgatcatccgtggcaaaacttatgaagaagacagcaaaaaccagatcatcaatattacgcctgtggtacgcctgattgtcacggaagcttatttaagacaattagagtctttcaatggaacagacccagatgaagacgatatagaaagtgacgacagtgatgttgaaatcacctctgagacgaaccaagactag

SEQ ID NO: 42546 - DNA, 3417 bp, Marinomonas posidonica IVIA-Po-181
atgaaaaagttaaatcgtattgtattagtaaattggtacctacttggtgcagaagaaatcaacattcgcggtaataccgccattattggaccaaccggatcaggcaaatcgtcattactggatgccattcaaactgtgttgaccggtgccagtaaacgtcacttaaattacaacgccagtgccaatgatggaaaggcgagtggtcgtagtattcgttcctacattttagggatgatcgattctggtcaagccaatgcaaaagtatttggaacagagccaagacaagatgccacctgttaccttgccttagtgtttgaagacagtgtcacaggaaaagagtcaactgtcgggctcactttaagtgcctctctggcgtcgccggaagaagacgtattagggcgttttgtcttacctaattttggtgcacgtaaatcagacttcattgatgcaatggaaggtaagagctacaaagccaagccttggatagaagttcgagaaagcttcaaaaaaatctgcctagatccttttatcaagtccggcagtgcttctgccactcaatatattaaccgttacttagaagaattgagtccaagttctgatcagctcattaccattgatggctttttgaagaacttcaagaacgcactaaaattcgttcctattgcgtcacccactcggtttgtacaagactttgttttgactgaagcgccattacaagttggcgcttaccaaaaatctctgaacgaatatcgccagttagaagccaaaactctggaagtttctaaacgtattgatgaccttaaaatcatccaacaagattgtgagaaaaaacatcagcacgatcaaaatgccattaattaccaatggattgcgacagaagcgcgttttgatgaactgggcagtaaacaagatgacattcaagatcaatacgatttgcaaaaagagcgtgaagaggaaattgaagaagaactagcgactcaatcaagtttgttaaagcagcttcaaggacaacttttacgactagagcagcaatatgagcattcagacgttggtttaaaacttcaacagcttgaacaaaataaaaagttgattgagctacaaggtcaacaagaccaaaaagccattttgcaattacgtcaaatggccgtgctcttaaaagcactggatggcttcacggaagtgttatcgaaagagtcgattgagctggctcaagaattatcatcactgcaaaccgtgattagtgaagatggccgcattgatggcaatttaaaacctttgactcagaaactgtcctcgttgaatgccgcgttggacaaagaaaaatcactattgtttggacagcgatcagagctaaaccgcagcatcttgaatctaaaagatgaatgcaaacaacttgagtccgatgtgtcatcattaaaaggcggcgtcagtccgctgtcacaaaataccaaacgactcattgccttattaaaagacgccaatatcacggcaacgcctttaagccatttggctgaggttaccgagcgcaaatggcaagatgctattgaaggctatttaggtgcacaacgagaagccctgattgttgagcctgaagatgcagaagaggccattcgtatcttccgcgcccatcgacgtcaattaatgggatgtcgagtggttgatacgactcaaacaagattatggttaagccgaggtgatcgtcaatctgcattgcgctttattcgttgtaataatgatcatgcgcaagcgtatttgaatcgtcgactgggtggcattaagcccgtagaaactgaacgagagctgttaagagaagacagtgcaatgaccgccgatggcatgttaaagctatcgggaaccatttcaaccattcgttctgtgcctcatatgatggttggcattaacactgaaggcatgcgcgaatcccgtgagcagcagctgaaaacgcttagtgcagaactggccagtttgttgacatcagatcagcgtcttgagcaagctgatgctttgcttagccgggttattgccaacaatcagtttgatgttgagacattgggtaacgccagccatgcggtgactcgcttggttcaagaactggaatcggtcaacgccgagatcactcagttacaacaacatgatgataccgatctacaagaacgcattgaagagctcaagactcgtgtggcaaatgttgagttagagcagaagaagctagatcgtgaacgtcaacagattgcagagcaatttggtgctctcaatacacaaaaaacgcaactgagttctgccttatccgcactggatgaagaacgtacacgtttgacttccaatccaaaatacgacgcagagtttgccagtgagcgatattcattactggaaagtagtatggtccatggcgcggccatttataaggaagccattagtcgagcggacaaagccagtgaaaaagctcgtagcttcgatcagaaagttcgtaaagaagtcgctgatcactatgccaaataccatcaagcgaatctagacaatgatacccaattggattacctcgagtcgaaatttgaagaatttgagcattacgtttcttaccaaattgacattttgagtgaaactgagctggctaaatacgctaaacgcgctgagattgctcgtcgtgaagccgaagaaaccttccgctctgactatgtatcaaaactcaaagactccctagatcaagtggcgcacatcatccgtgaattgaatcacagtttgaaacgtcgcccattcaaccaagaaatctatcaattccgctattacccaaatggcgacatgaaagacattttggatttagtggaacgctttagtgcacaagatcaagcgaatgttggtggtttatttgaccctcaaatgggcaatgacccagagcatgctcgtgctattgaggccatccaagaattgatttctgacgaagagaagcaacaagaccttgctgattaccgtaagttctacaactttgaagtcgacatactagacagcgatggcaataagaaaaccaccttgagtcaacgtattcagacggggtctggtggggaacaccaaattccattttatttggcaatagcggctgcgctttctaccacgtatcgcttacatgaaaccatggatggggatatcgttggcggcttctccttggccatgtttgatgaagccttcaataagattgatatggtaaaaacatccacttgtatgggctttatgaaagacataggcttacaagtaatcgccgcggcacctgatgataagcgagccgtcatggcggctaacatggataccattatcagcgtttggcgagaaggtggtgctgtctctattgatgttgcttatccaaaagaaaaaggccaagtgttattgaacggtcaaactgaaagtttattaacatccgcttaa

SEQ ID NO: 42547 - DNA, 1464 bp, Methylomicrobium album BG8
atgagctttcacgaattaaacgcccgcttccgccgtctgcacaaggaacaccccgcctggcgcctgctgcgggccgaccatgcgccggtgatactggcgtttatcgccgatttgttcgaagacgacaacgaagtggcgttcgggcgcgcccgagccgctctggacatggaactcgaacggctgcgcgaacaaggaagtctggacagcaaagagaatgcgccgggttacctgcgccaatggatacagtccggctggctgcgcgagttggacgaccgcctgagcaaaactgacgcctgcgaagtggcgctgcgtttctgccggcaactggaccagcgcgagagcggcgccaccgcctcgcacctgcgcatcgtccaggatgcggtgcgcgatctgtcggtcgcgctcagccccgatcccggcgagcgtacggccatcctggaagcgcgcaaggccgagatccagcgcgagctggacgacttgcaggcgggcatcgtacgcgagttgtcggacagcgaacagcgcgaacgcatcgtcgaaatctatcaattggcttccgtattgaccggcgattttcgccgcgtcgaagacgacatccgccggctcgaccaaagcctgcgcatcgagatgatcgaatccggcggcggccgcggcgcggtcatcctgaaactgctggaacaggaacggctgctggccgacagcgatgccggccgggccttcgacggttttttccaattattgtgcgatccgaatcgcagcaccgaacttcgcgagcaattgaagacgatcttgatccgcccggccgcgaaacacctgaacgacacgcaggcgcgctttctcggcaaattgatgcgcgaattgaacaaggaaagcgatcgcgtgttccgggtacgccgccgcaccgaggaaaaactgcgccagttcgtcgaaagcggcgcggcctccgaaatgcgcgcggtcgaccgtttgctcggcaggctcgaaaggctggcggtcggcttcaaggacgccgcgattccgctccgccacgacaccggcctggcgcttgcgagcggcacggtcaaaatttcttcgccggccagcctgcgcctgaaaatgccggaagaacaattgcatacgcgcggcatcgaagccgagcaaaacgcttcgacgccgagcgcggccatgctcgagcagttgcatgcggtgcaggtgatgcagatcgccgaaggcatgcgcaacattgtgcgcggcagccgcattccgttgtcggtcgcggacgtcctcgaacgccggccgatcgaggccggactggaagaactggttgcctgcctgcgggtggcgcgggcggtcggcgcggccgaattgagcggccgccaaacggtaagcatcgccgatcgccagggccgccgattcaaggccgagattccgcattacctgctcagcgccgagcagtttcccgagcggctggaagaattgcaattatga

SEQ ID NO: 42548 - DNA, 762 bp, Methylomicrobium album BG8
atgacccgcgaataccggcaaacccattttttcgacatgttgctgaatccggccgaagcggaggaagtgccgcctccgcccgtgccggaaagcgagccggagacggagcccgaagaggaggccatgctgccgctcgcaccgcttgcggtcgaagaccagcagcaaggacgcttgccgcaggaagcgcggcgcgcgctgatcgcgctcatgcgccacggcgtggtcatggccgagaacaagcgcctgttgttcgaggcgctgtgccgttaccgcgccggcattcaggaacatctggccgacatgaacctgcgcctgttgctcgacgaaaaggccggcatcgcgatgctgctggtgcagggcggcgatgacggcggcgacgaagacgaagaaggcgcttcgctgatcaaccggcgcactttgtcgctctacgatacgctgctgctcctggtgctgcgcaagcattaccaggaacgcgaagccgccggcgagcagcgcgtgatcatcgataccgaacgcatcgaaaccgcgctgcggccgtttctgccgctgaccaacagcagccgcagcgacctgcgccaattgaacggcgccttgaacactatgaaggaccggcgcatcctggcggcggtgcgcggcgaggacgaccgttacgaaatcacgccggtgatccgctacgtcgtgaacgcagcgtttctggagcaaatgctcggcgaatacgcccgcctggccgaacggtccggcagcgagacgaacgatgaatga

SEQ ID NO: 42549 - DNA, 3354 bp, Methylomicrobium album BG8
atgaatgaaataacgcaaatcgccgacctgtacgattgcggcgcgatcaggctgcggcaattgtcggtctacaactggggttcgttccacggcctgcatacggccgccatcgatcccgacggcactctgatcaccggcgacaatggcgccggcaaatcgaccctggtcgatgcgctgatggcgctgctgcagccggccggcaaggcggcgttcaacgtggccgccgcgcagggcgaccgcagcgaccggagtttgatgtcgtacgtgcgcggcagtttcggcagcgcccacgacggcagccagacgcgggtgcgcagcaagcgcgaaggcgcggttgtgaccggcctgtgcgcgaattatgttgccgaggacggcgccgagatggcgctcgcggcgctgttctggatcatccatgccggcggcggcctcggcgatctgaagcgggtctacctggtcgcgcgccgcaaactggcgctgaaagaattgctcgacgcgttcggcgacggcgatcctcgggcattgaaaaactttttgaaggacgatccggccatcaccaactgcgacgatcgcttttccgaatacctggaaagctatcggcggctgctgcgcatggataacccgaacgcgccggcgctgctggcgcgcgcgttgggtttgaagaaaatcgacgatctgaccgcactgatccgcgaattggtgctggagccgagcagcgtgcgcgaagatgcgcgcaaggcggtcggcgagtttgccgatctggtcggtatccacgagcgtttgctcgacgcccgccgccagcgcgatgcgctggccgaattgccggcgatcgaaaaggacctgtttcgcgccgaaagtgaactcaaacagctcgatgccgaactgcagggcttgccggtctggttcggcgaacaatgcgcggcgctctgggccgagcgcgtcgaacggatcgaagatcggctgcgcgcggcgaagcaggtattggccaaactggaacaagaggtaaaagacgccgaaagcaacgcggaacagcgccacgccgattatctgcaggccggcggcgaacgaatcgaagcgatcaaaaaagacttatccgtcgccgaagacaaactgcgcgacacgacccgccgcgccgccgactaccagcagatcgccggcgccttgcagttggataaaacgctgcaggaagcggtgtttgcccggaatcggcaacaggccgcaaatgcgatcgaacaaatcgaacaggaaaaaacccaagcgcaggatgcgtttgccgagcaggcggccaaattctccaacgcgcagcagcaacagcgcgacctgcaggaagaaatccgcgcgatcgaagcgcgtcccgactcgaacatcgacagcaagtttcaacaactgcgcgacgaaatggccgaagcgctggggctcgcacgcgagcaactggtgtttttcggcgaattgctcgacgtgaaggacgaagagcgcgcctggcaaggcgcgatcgaacgcgcgctcggcggcctgcgcacgactttggcggtgccggaaggcgaatatccgttggtcacccgctggctgaaccagcgccacaccggcctgcatgtgcgtgcgcaggtcgtgcgcgcttcgaacgacaaggcaacgttcaaaaccaacggctatctgcgcaaactggcttggcgcgagcatccgtaccgcgactggctgaagcagcatctggcgcatttcgacctcgattgcgtcgcttcgaccgaagcactcgaccgcacgccgttttcgctgacccaacagggcctgatgcacctcgaaaaaggccgcttcgagaaaaaggaccagcagcgcatcgacgaccgccgcgcctggcagctcggtttctcgaacaaaaaccgcctggacgcgttgaagcaggaggccaaggccctggccgaacaactgggcgttctcgacaaggccgccgccgaagcccgcacaaggctcgatgaagtcggcaaacgcagccggcagtgggaaaaactcggcgaattccgctgggccgaaatcgatgcgccgtattggcagggaagaaccgggcaactgcaaaacgacatccggcaactggagcaggccggcggcgatctggccaaggcgaaagctcgctgggacgaggccaagcaggcgctgcagcagttgcagacaaagcaagggcaacagatcgccgaggtcgccggtatcggtaaagaccggcaaagcgcggcggcccgacaggaacaggcgcaacgcttggcggcggcagggctcggcgacgatttgcgcgcggcgttgcgcggcaaaaccggcgcgctgaaagacgaacaactggacgatgcggccaaaattgaagaacgccatcgccgcggcctcgaacaacagcgcgatgcggtacgcggccgcaaagaccgggcaggccggagcgcgatcggcatcatgaccggttttcgcgccaaatgggaagccttgaccgccgaatggggcgcggacctggccagcctgtccgagtatttgcaccatctcgggcaactcgaaaaagacggcctgccggccttggtcgaagaatttcaaaaacgcctgaacaagcacacgacgcaatcgctggccgcgatccgtcagcgcatcgattcggagcgcgaagaaatctacgaacgcattgaaacgatcaaccgggtgttggcgcggaccgaattcaaggccggcagcttcctgcgcctcggcattcaaaacgatcaatacgagcatgtgctgcatttcaatcggctgttgcggcaggtcatggagcaattgaccggcgacgatcacgaggcgcggttcgcggtgttgcaacaggtgatcgaaattctcgacaaagccagcagctcggccagcgcctatacgctcgaaagcctgcgcctgctcgatccgcgccaccagttgtcgttctatgcggaagaaatcggcctggaagacggcgcgatccgcgacgtattgaaatcgtcgagcggcaaatccggcggcgaaaaagaatcgttcgccggcacgatcgtcgcggccagcctggcctacgtgctgacgccggacggctacgaccgtccggtctacagcaccgtattcctcgacgaagcgttctcgaacaccgccgaggcggtcagccgccgggtgctgcgcatcttcaaggaactgcacatccacgtaaacctgatcacgccttataaaaacctgaatctggcgcgcgaatcggcgcgttccctgatcattgccgaacgcgatggcgcgacgcacgaaagccggctttgcgaggtgacctgggaagaaatcgaccgacgcctgcagcggcaagccggcgaactcgacatcgtgctggcacccgaaacatga

SEQ ID NO: 42550 - DNA, 1203 bp, Methylomicrobium album BG8
atgaagccgtggggattgccgcccgcggaagccgttgccgagatcaaacggcgcgaatgggatcatgcccggaatttgcgcggacgcctatgcggagagcgcccgtttccgctgcgcatgctgcttaaggcgccgaccgaagaccaggcgctggccgatctcgaacatttccggcaattcatcgccggctggaaggcctggcgttttcccgagcaactggaatggcaacgcaaaaaattcccgcacctcggcgaacacgacgtgccggtggccttgcaaatcgggtcgatgccggaactggtcgcgctgctcggtccggaagcccaagttagaagccggctctgggaagagcgcatgctgcctctgctcgccatcgatacccgtttgtcgaacgccttgctcaaacatctcgacgtcatcgaagacatggcggcggacgatgccgttctgcttgcgaaatgcctgccccaactgcggccgggaatggggcagggcgcttttttgcgcgcgctgccgctcgaacatgtggataccaaattcgtcgagaactatgccgtcctgctcggcgacctgctggattgcctgtatgacggtacggcaacccaaccggacgggctgctcggctggctggactgccgcgaaaatccccgcggctggctgcaagtgcggccgctttgtcgacaaagccgggagcggctggccgggctgccgctgttgcaactcgatacgcagactttacgatgccatccgctgccggcatccttcatcctggtcgtcgaaaacgtccaaagcggctatgcgctgcccgaactcgacgacacgattgcggtattcggcgggggcggcaataccgcctggatggatgcggattggttgggtgctcggcaaatcggctactggggcgacatcgacagcgcggggctgatgtttttaagcgatgcgcgccgtcgccagccgcatgtacaggcgctgatgatggatgaagccaccttgctgcggtatcgcgagcgtatggtcgacgaggagagcccttgccggcggacgcccgcttgcctgaccgccgccgagcttggcttgttcgaacggctgcgcgacggcttttacggcaggacgcgcctggagcaggaacgcatcgcgccggaccatgccttgcggcaactcctggactggctggagaccggcagaaagcggattttaagttag

SEQ ID NO: 42551 - DNA, 1500 bp, Treponema azotonutricium ZAS-9
atgccccttggtaccggggtctttgccaccctgcctgaaaatttcttttcccctctggcacgggtaaatcgtgaacattatgctaatcttctgcttatctattaccgcctctttcaggaaaatgcccggggcattgaacgcgaacaggtagtgcgttcttttacggattatcttggcctccaccggaataccttggcggacgaatcgccggatgcaggggataatactgattccccggacgaggctgtcctgcccgaggctgagctcctgacgccggagctggacttcgaaaacagagaagaaaataaagaatcaacggaacacccggcaaagtctccgttcctgaatgaccgcgccttggcaagccgttttctccgcaagcttatcaatgcgggctggctcgacgaagagatcctggctgactacacaaaagtcatcaatattaccccccatgggcggccttttctggaggcccttgcaaaggttgatgaaggactaaaaaacgaatacgaaagccacgtagtcgccatctattccctgctttgcaccgacgcgattaccgataacggtcattatgcggtgcggaacgcctatgtccatacccaggccctcattgattcccttaaagtgctttcccagagcattaagggatattatgacaggattagcactgatgctgcacaattcggcatttcaggcatactccgcctgcaatacgatgaatatgcccctcagatccttgacgccgcttacaagcgtttaaaaacctcggacaacctttcccgctacaggccgaagattctcgagcaggtaggggatcttctgcgcaacaatgcctggctggatacaagcgccagaaagcttgcggtgatgaaggcccaaacccaatttgaatgcaaaaggcagcttgaggatatgctcaatgaaattcgcgacacccttaatgcggtggaccccctgctgcgcgaaatcgatcaccggaacagcctttattcgcgatccagcactgaacggataaaagtgctgctggagcctgattccaccattgcagggaaaatcgcggccctggttaaggaaatccatgtcgggaacaaaggcctttatcacaggctggcacacaggcttcaccggattagggcttttgcgccggagtccctgtataaaaggcagaaaaaagaagcccccgattttatgcaagctgtagcgcctgccgacagggcagccctcgaaagggataaagagcttttcatgaacaggcttcttaatcagctcggcattaagcggataagcgcctggcttgatgagcatggcgggcaggagaggcttctttcttccaaagatctggtatacgacgaggcttcctttgtccgttttatctattcagtgctttatgctgattcaaggcagaccttcgattatggcatagaagacaagcctgaatatgaatccattgacgccgcagggtacggggtgccggatcttttattaaggaagaaataa

SEQ ID NO: 42552 - DNA, 609 bp, Treponema azotonutricium ZAS-9
atgttacaggatcttcagggtttgtcccttatcaccgaattgaccgcctcggattttgatctgtttaaaacagcagtgcgcacgctcctggcaaaaacattcataatcaggggcatagaaaaagaacgggaactttatgattttgccatacgcaacgcttcgctttttgacgcatggttttcctgcatggacgcaagcctggtacgggacgaaagcctcggggtggtaagcttccggggaggcggcgatacccgcctgcgcctgggccgggaagaaacttgcgccttcctcgttgcccggcttctctatgaagaaaagcgggcggagcttttcctcaccgcctttcccaccgtgcggattggcgattttgttgaccgctacaatgccatggctgacgagaagcttaaaaagacccgccaaaaagaaatcttccgccgcctccagtcctataaagtgatagcctttgatgcttccgatttcgcggaccccgaggggaccatgatcctctaccccagtctagccatgggacttgacagggacggcattgacgagcttatggcgcaaattgcgcaggtaacggcggcgaagaaagaggacaacccatcatga

SEQ ID NO: 42553 - DNA, 3213 bp, Treponema azotonutricium ZAS-9
atgattacccttgaacgcgtgcgcctggtgaattggcataattttgatgatacccttattgccataggaaaccgctgcctttttgcaggcgacaatggttcaggcaagaccacgatactcgatgccattcaatatgctatggcagcggatcttcgcaaggccaggttcaacgctgctgcaggtgagcgcaagagcggcagggatcttttgggctatgtgcgctgcaaagtcggcagcgatactaccgattacatgcggggcgataccgtagcccatgtaatgctggaattttcccgtaccggtggagaagttttatccgcaggggtctgtgttgaagcctatacagacgggaattgcaatgaacatttttggatggggagtttgcccattgcttcgttaaaagtgcgtaccggccaggagcagccccttaatttccgccagcttaaggacagctgggccggcgccgccgctcacgcaaacaaaaagatggaaacctttgaatcgaaaaaactttacctcagggaattcactgcggcaattggagtatggcggcgcaatatagattacagtccttacctcgaagcctttaccagatccgtgagttttacccccatgatctcggtggatcgatttgtttgcgattatattctggaggaaaaacctgtcgaaatacaggacatgaagaataaccttgaaagttataaagaagcggagcgtgaagccaaaggggcggttcagcgtatagaagtgcttaaaaaaatcagcgcaaaagccgcagaatggcgcatgtacgaaggactcatccttaaacaggaatatctcatgctccgcattcaccgggacgaagaacttcaaaaaaaccaaaaggaagaacgcaaactttccgcagctgaagaaaaactgaaatccctggagcaaaaaatagccgggcttaatgaaagtcgttttgaatgggaaaatgaactgcggaaaaccgatgccagcttggctgccaatgatgcccatatcctttacatgcagattgaagatcgcattaacaggctaaaaaaagatcttgaaatcgaagaacccaaggccgaacgctaccataccttaaaaacccaatgcgaggccatgttgggccggaaattgagcgaaaaccctgcggaagacagctcaaagatcgaatccgaagaaaatcaagcccgatcagaaaaagacgccgcccgcatacaaaaggaagaggccgccctcgccctgcgcgaagcctcagcggaactggccgaacttgaacggggattactgcggtatcccgaagcgccggcaagccttaaagcagcactcgaaaaagaaggtatagccgccgccattcttgccgatattgccgatattacaaaccccgattgggtggatgcggtcgaaggctggctcagcacccggcgttttgccattttggtagatccgaaggattttcaaaaggctctcgaaatttacgaccgccttccccgtcacatatcaggggcttttcttcccaacctcgaaaaaatgcgggatgcggtcgaaagaaacccggcacagaaaaattccctcgcctcccttgtggaaaccggatcaatctatgcccggcattacatcgattttgtcctgggcaatgtaatctgcgcagatatcaggagcttgaaaaacttcggttcggcagtaaccagggaatgcatgcgttattccggttttaccgcgtcgcggatagatcaaaatatctatagccgccattatcttggcaaggcagcccaaagggaacgcaaagaattccttatagcagaaaaactgcggcttcaaaaagttcatgaagaatcaacagcaaaggaacaagaagctgcgcaaaaagaagaaggcttccgcagggtaggccgcacccttatcgatttaagttaccttctcccctcggtggctgccacgttaaaaatgcgcaatgatttgtcagtggctgaaaatgaactttcggccattgacaccaggagtttcaaggaactccaggaaaaacgggacagccttgcagaacgcatacgcgtaagcggtgaaggattgcaaagctgttacaaagagcagggaagcgaaaatcaaatcattatcgactgccgtgcttcaatggaaaatataaaaaccgcaattggggatcgtgaacacgcaatagggctttttgccgaaaaccatcccttcgaaataagcgaatgcgaggattatgcggaaaaacagcttagcaaagaaaatatttacgacctttcgagcaaatatgaatcgaatttaaagggatatcaaacaagcgtcaaaaaccgccgtgccgaatatgctgaccttgtccacaactacgacagggattttcatacctatctccccatagaccctggggaaaatgacgaggcggaaaaactgttaaaacgcctcgaaacatccgagctacctgaataccgcgaaaagatagaaaaagccaaacgggatgccgaaaaggaattcaaagagcatttcatttccaatcttaacgagaacatagaaatagcgcgcgaaagctttaaggagataaacgaaatactccgctccctttcttttggccgcgaccagtaccgctttgccctggaagaaaaaagcgaccgcaaggggcaaatcgaaattatcaagagaaccgcagccatccccaccatggacgacggtctcttttcccaaatcaacgaccccgaagaatacaaagccgtggaaatgcttttcgaaaaaatcctcaccaccgacctcgattccccggaaatgcggagcatctgcgattaccgcacctacttccagtacgatatcaaaatccgcgccaccgataccatcgatcaaatcaccggcaagcctatggacagctccctctccaaagtgattcgtgagaaatcgggcggcgaaacccagactccctactatgtcgccattgccgcaagcttctaccgctttttcaaagaccgccccgaagaaaccatacgcctcgtaatgtttgacgaagcctttaaccgcatggacgacgaacggattatcaaaatactcaatttttataaagacctcaatatccagcttatcagcgccgtacctcctgaaaaaatcgaagccatcgccccccaggtagaccgcacgaacctcgttgtgcgccacggctattctgcgcgggtctgggatttccacggggaagccgggaaagcaaaagcatga

SEQ ID NO: 42554 - DNA, 1227 bp, Treponema azotonutricium ZAS-9
atgaccacctgggaagatcatatactcaacgcctttatagagcgttaccctttttcggtctccgccaaagtcaatagcgcggattttcctgcggcaaaccataggctgcgtattcctgccgcaaaaatcttccccggctttgataacgccccgcctgacgaaaaggaatctttcctcgacgctgtggaatcccttgagacacaagggttcgtctcccttgtctgggcacgccacagaaaaggcgagctgctttccgccattgtctgcctcgacatggaaaagctttatcaattaagaaaaaggctttcgcctaaagccgctgcggaagaggcacgggaagcggcggaacaaatcgtttcacccaatgataccttgggcgcttttttcgctttccttgccaatggcatcacagcccttgatgccgccaaggggatcaatgcagaatcggtgcacgatttggcaaaactctttacggcaatttccaaacccataaaccttacccttcgcgccctgtcagtctcgctttataatgattccaaaaggctcgaagcccttattaattcattcaagacgatttttgccagggcagaaaaacagggaatatccattcctgaattttcgtttcttgaccgttcctttcctgaaacttccatagccggaaaaattatcatcaatattgaagattctcggcccctggccaatgaaaacggcgtaatactcatcctgccccttatcaccattcaaaaaatcagatccataacaggctattgctccgtacccgccgcaggtaaatctccctcggtattaatgatagaaaacaaggaaacgttctttacccttgccgcctcttcgcacaaatacacctgcctgctctatattggcggccatcccaacagggcggtacgcgccctggcaaaggttcttgcaaaatcgggctttgctttcttccatgcaggcgaccttgaccccgagggcatactcattttgcaggagcttcaggatatagcaggccaaaccgtaacgcccgtatgcatggatgcctcaaccttcgatgggtatcttcagcatggcaggaagcttgagccgtccatgctgaagcgtatcagcctgataaaagacgaaacccgcgcccttccgggcatacgggagcttatccaaagaattgaaacaagcggcaaagggatcgagcaggagattattgaatacaagccctggactcttgactaa

SEQ ID NO: 42555 - DNA, 1416 bp, Methylomonas methanica MC09
atgaacctattcgaccgactgccctcatctttgtttaaccctctaactgggcagaacaaccggcgtgcttgggacttacttactcaactatctgaacgattttttggtccagattgtgttccagattttccagagggttatcttcatgagcgaataaccaaggaaattgagagatttctgcttgatcgtggatgggaggttgaaggtgaagaagaatcctccacgcctgtcaatgtgcaagctaaccagcttttatctcgatttgttgagaccggttggttcattgaagatagggtgggagcgagagttttcgtaaatatgcgacctgtagtggcccgcttttttgagctgttagagagtttcactatggaaggccctcaattggtagggggcaatatccaattgatccacaatcagttgaaacacgtggttactgatccaaaaggtcaggcagccggttttcagagtgcggctttactatgctcccgcttgatcaatgctttgaatgccacaacgctacgcgtccgtgatttgattcatgatttgactcaggaagaagctacaccgattttcgtcaaacgtttttttgcggagcatatcgaggaaatttatgtgcgtgattttcgtcagatgcgtactgagaaccatcctttgatgttacggtttgaaatcatagagttggttgatcaagctgcgcatagtaaaccatcgcgctcattattacttgatggctatcgtgaactaccgggtgatcgacaaacaacggcggaggatgcattagctagggatatcgctcgatttcatcgcctgctggatgtggaaaaattccttgagcgtatggatcgggtgatcgattcggcaactcagcgtgccttagcttatctgggttatcgactcaaggcatcggagcgaatggagtctgtcctaaaaaatgcggtttcatcaatttgccgtgctgcggatgtcggcatacctatcgaatccagcttgttgtctccttccgccgtgattgctgactatcggctacgcatgcctaatcttcctcctgccaaaccagttcgtcgttccatgaaaaagcgtgaaatgacaccgcgagaacgcgccgaacttattctcagaaaagcgatgatcaggcatcgtgatacaacgccagcagctatacaccgttatgtcgagtctcgtatccccgttggatcgcaattagatgcgtctagcctaccaattgaaagtgttgaggatgcagtagctgttcttgttctaatgcgtatggcttcaatattacgcgcaaatccaagagccatccgtgaaaatcccctttttcgcggcctcaaatttgacgtgcaaatgaaagaaggcacacgagctgaaacgcccctgtttgaaatggctgatttcatagttattaggagaagttga

SEQ ID NO: 42556 - DNA, 639 bp, Methylomonas methanica MC09
atgccacgcgattggtcggcgattgccgaagcctccaatgggtcatatgaaattcaggattttaagcgagcgttatatcagttggttgtccagcagtgcctttatctccgacatcagggacaggcggttgcctatcgattggtatccagttatagacgcgactttgcagaggcgttggacctgatggggttacgcctgggatttaatgatcgctttgaatattgctatgtgactcaggatgttggtactttaggggcgatggatctgcaagaaaccttgtttctgttgacgctccgccatgtttaccacctgcgagccagcgctggtgatctgacagctgacggagaagcaatggttagtattcctgaatttgaagagagttttaagttgctttgccagcgtagcctcgatactaagacagaatcattaaaatcgatgcttagaatggcaaatcgtcatggtttagcgaagtcctttcctgcgcccgagggtgatcctcagccctttgtgatcttaattcttccgggtgtaactgatgtgctcagtgaacatgcggttagccggtttggtgcccatatcagcgccaatctattagatgtcgaagatggtgttaatcgacaagcggaagtggagccatga

SEQ ID NO: 42557 - DNA, 3381 bp, Methylomonas methanica MC09
atgaaaactctagttaatgcacatattgtgcagttttcattgtgggactatgaaactttccaaatttcagcgggtggtactgcgattatcggtccaaacggtgcgggaaaaacgagcttaattgatgcagttcagattgcaatggtgggtggtcacggccagcatattcacttcaacgcacagtctgtacacaaggatgctcgaagcattcgatcctacgcgctcggcacgatgcggtcaggggatggtgaaaatggtgtgattactcgcaagcgcgacgaggcgttatcttatatctctcttgtgtttcaggggaaagatgaacgagatgttttaagcgctgggatttgtattcatgcaacagtgactgatagccgtacccttggactttatgtgtttccgggggttgccctgaaactcgagcaccaccttgaagaggtgggtgacaacagcaaggcgcccatcgactgggagctcttttgtcaccatggtcgtaacctttcccgctcagcaggacgagagccaacgattaccagtcagcccgaatcctatgtcagggagttactccacaatattcagcaaagtgttgatgcacgcaggtttctgcgagcatttggtcatagtatcaatcttaaagcagtaagtagcgttggtgactttttacgaggttaccttattgaggctacacctatcgataaacgcgggacgcttcaacacatcaaaaccttgcgcgcattgagtcaacaaattgagcaaataaaagagcagattgttcaactcgaggctatagaaaaaagttatgccagagttggggatttacgccgaaaagcggcagtcgctgaagccgtaaagcttcaatttgcaagcgaaagtgccggcgaagtggccgctaatttggagaaagagctaactgaactttcccaatctgtagaggatgcccggcgagatttgccctatttggaagaattgcaaacaagtttgcagaatgcctacgaggctttgctccaggaatttagtgccgatccagatgcgcaacaaccagcgcaattgcttagtttgcgtcaagcccgttcaagcaacgttttacaaactctaaaagaagtaaatcgaatttctctccaggtaaggatggtattacaggagattagcgataactgtgatggagaaacatctccttggattaaggaagtaaagcaaaatttagatatttgggatggctgggccaagtctgatcacatcgcgagcgtatcacaaatggagcaagttcttgatttattgcgacgagtgaacccgttattgcaagaaaatcttgaaagtgctcgcaaaatagctagtttagcaaaaaaggcctctcgttccagtgaaggaaagttaaaggctcttagtcagggaaaccgtatcaccgatggaaatgttgcccaggcggttttgttgtttgctaacgcaggcattacctgtgtgcctgttgcagaattggtgcaggtattagacattcgatggcaaggaccaatagaaacttttcttggccctcatcgattagcattattggttcaagaaggaagcgaggatgaagctgttgaactgatccgcagggagaagattaacgatgtaaccattattcaacctgaacacctaaaaagtgaaatagaccgaaccgtcgcttctgatactgtggccgcattgctgcagggtgaaaacaaagtggctttggcttatttgcgtcgaattcttggtcgtatgaagcgtgtagaaaccgccgctgagcttcgtcgtgaagatagggcgctaacaacggattacatgttaagcgccaatggaggtactaagcgtattcgccctttacctgagggtcgttggattttaggtatcaagttaacgaatgaagatcgatctgccattttggaagagaaccgccaagtgcttctgatggcaagagaagctgaacaacgtgaagggaagctggcgagcgcgtcaaataatcttcaatcgacaattcagcaagtcactaaaacagcctatgaggtagcttttacattacatcgaacagcgttaactgaactgaacgctactcccgatccagacacaattcctgttccagatcgcgtggctgttttgcagttaaatttaaaaacagcgaaaagtgaggccgacaaaagtaaaaaagattacgagactcgcaatgctgaatttaccaagctatcaacaaattttgataacttaaaaccacaattggaaagtagacgcgaagaataccaaaaactacagcaacagcttgccgaagcagtggcagatacagactgggatcgtgagcttgctaatgccgagtatagtcgtatatcagcaatggataacgaagaacttggtgatgcgctagaagatctatattcgaagagacaaacctggctaaaaaacattagttcaatcgagcaagtagcacgagacgactttatcgattttatcaatgatcattccatcgaattattcgatgagcgtaacgattggcgattggctcacaagtgggtaacgtcgcatatcggaaaattgaaagactcgactcttgctgattatgagaacgaagcccagtcggcgagagaagctgctgaagaatctttccagtcagatgtgaaattcaaaatgcgggaagctattcttcgggttcgccaggagatacgagacctcaataaaattcttgaaacctgcccagcgtttacaaatggggagaaatatcaattcgtcgccgatatttctcctgcacataaatcactttacgaactgatagtgaataattctggtgacagtgaaatagacctgttcagtcaaccggaaactcaagtcaatattatggctttattggaggctagcgagagcggacaagacaaaggcaacaatccattagaggactaccgcctgcttttcaattttgacctgcaaattcgtcaggacggaaaagtggttgatcttttgagtaagcggatgggggttgcgtcaaatggggagcatcgtgtgcccttctatgttatagctggagcggccttagcgactgcttaccgtattcgccctggtgcagagcgttcaggcgctggattgatgattttggatgaagcattttacggaatggatgctcagaactcttttgtgacagctgaattcttgaaaagtcttggcttacagctattaatggccgggcctgactccgatgtgggtaaactcgcgccacttttggacaattattatgatttggttcgctatggtgcggatgtctttgtggagcaagtgcgggtcaaggagccagctcgccggctattgagtagcgatattcctttgctgcatcaagaactgttggatgctcaggaagcacagttaatcgctaatgtacagtaa

SEQ ID NO: 42558 - DNA, 1215 bp, Methylomonas methanica MC09
gtgagggagggcgttgttctatcgggtgaagaggctgctaactcaattcttggaaagctacttaagcgagccgaaaacgctttggctaaggatgcgtctcgtgccatatcattgagattatcagataagtcagtaccggagtattggcggttgcagcgacataaggataaattggagtgtaatgcggtactgagagtcgctgaaaaacaaggaggcattaaaattgaatgggacaagcgagcggatgagaattctcaagttgaacgggtgcttttgcttaatgaaaacctgttagcgagttacctaggggtagtgcctcgttgggtattgattgagcaagcttctcgagagtttgccttgtatcttgctctgtacccgatattagagcaagtactcgagaagtggcgacatggttcgcaagtacgtaattccaaaccaggagattttgaagtatggatcagcgcaattcgggttattgattattgtagaaacaaagttggcgatgatattccgattcgtcgattaagcgcctctatttttagtaatagtaaacgtttagaaacactggttccttatattgattcgctcatccaaaatgacttatcagcagctattcgagaagctgaagaggtttttagcgaactcggtttagttaagtttccacccacgttattgctggctggagatttagcggttctatatggccaacaagaaactagagtattaaggccttatatcggtttggcaccgaaggaaataaaggctatcaaaaaggaagtatctttttcatatttactgacagttgaaaacctaacgacatttcacgaattggtgtcccaacggcctcaaggagctattgttttttatacgggcggaatgccgagcccatcttggaaaagggtgtataaattgctgcttcaagagctaccacggaatgcttctatatatcattggggagatatagatggtggcggatttagaattgccaatcatttagcaatgtgctgtttagaagtgggtttcgatttgcgcctccattgcatgaccgcatctttgctatcatctgacacagtcatagcccgtgatttatcgttagctgagcgaacacagattcaaaatatctgtgaacggtggagttggaagaacgaaaaagacggattagggccggtagcgatcgaacaagaggcattacctattgtatggccagcaacatag

SEQ ID NO: 42559 - DNA, 1473 bp, Desulfotomaculum kuznetsovii DSM 6115
atgccgaaccacatccagttaaaaaatttccccgggaggggtttagaagtgaacctttttgccgtcatcccggagcggtttttttcggtcctggccagccccttaaagcaggactacgcggccatcctgttccgcatttacgaccagtaccagctgaccaccttcgggatggaacgggatgtggtcatcgacctgattgttgactatatagagcagaaggacggcttttttgaacaggccctggccgacgagatctgggaggaatccctggatacgccggccgggccccgggaaagggccgcctttatcctgcgcaagctggaggccacaggctgggtggtcagcgaggtgtacagcaattacgtgcagtacatcagcctgcccgattatgccataaaaattctggatgtactggacaagatccgccgccaccggcaggtggaataccagggatatgtttatgccacctacactttgctccattccgaggaggccgaccgccagggcaacctggccctggaaaaggcctatgagcagaccgagcaactgatcaacggtttgaagtccctaaatcacaacattaagcgttacattgagcgggtcctggcggaaaaggagccccgggagattttaaagattcattttcaagactacatggaggaaattatcgaccgcagctatcaccgcctgaaaacttcggacaacgtttcccgttaccgtccgaagattattgcccgtttgaaccagtggtacaacgatgcggcctgggtggaccggacggccggtctggaagtgcagcgggagcgttttccggatctgcccacggcgcggcaggagatttaccgccgtattgactacatccgccaggcctacatcggcctggacgacctgctggatgaaatcgaccggcgcaatgcccgctatgccaacgcttccttccagcagttgaagtacatcctcaacagcagtaaagacgtggaaggccagctgatggaaattttaaagttcctggccgggctgcgcgcgcaggagggcatgcgcccggacgacctccttccggaagagctgggtcgcttgttcagcctcttcacccagggatttctggaccgggaatccctttataccggtagggaggcggccaggcagcaccagccccgggaagtgcaggagctggaggaaattgacccggaacgccgcagggagcggctgcgctccttccggcagcagctggaaaggcgcatgacccgggagaagatcaacgcctgggtgatggaaaaactggccgggcggaaggagatctgcgcccgggagctgggcatcgaggatgtggaggaatttatcaaactgatctatgctacggcttacgggcgttcgcgccaggtaggttaccgggtgcaccgggatgggaggccccgggtatctgcggccggcggccgctttgaatttagagatttgcgttttgaaagaaaataa

SEQ ID NO: 42560 - DNA, 627 bp, Desulfotomaculum kuznetsovii DSM 6115
atggaactgctggaacagtggaaccgcctgcttccggcggagcgggaagagtttacccgggtggtgaacaggcttctctcctgcacattcatcacccgcaagaacgaagaaaaccgccgggactactactttattgaacggcacgaagacctcctgcgggcctatttgaagctgggaggctggagcctggaaggagaccgggcctatggggtctaccgtgttttcagcgatttcgcctataaccggctgcgcttgaaactggaagaaagcattatcatcctcatcctgcgcctctgctacgaagaaaaacgccgtcaaatcaacgtgacggagaacataatgattaccgtgcgggagatccaggacaagtatgcggccctcaaaatacgcaaccggcccattgacaaaaaaaccctgcgggaaaccatgggcctgctcaagcgtttcaacatcctgcgggtgctggacggggaggttaccgatcccgactgccgcctggaggtgtttcccaccattctcttcgccctgcgggtggaggacatccggcaggtgtacgaaaagctggatacctaccgccaggccggggcggaagaagggcgggaagaggaaaacggaaatatgcagtag

SEQ ID NO: 42561 - DNA, 3372 bp, Desulfotomaculum kuznetsovii DSM 6115
ttgaaagaattaaccggcatcaggttaatcaactggcactattttaccaacgaaaccatacgcatccggggcagcaccctgatcaccggggacaacggcagcggcaaatccaccattctggacgccatccagtacgtgctggtggccgacctgcggcgggttaaatttaacatttccgcctttgacgagaccaggcgggatctgctgggttacgtgcgctgcaagaccgggcgggacagcgagagcggccgcaagtacgagcgccagggcgacattacttcctatgtggtcctggaattctacgatacctccagaaagaactacttccttttgggggcggtcattgattcctacgccgatgacgtgacctatgaaagccgttttttcaaaatcgaggactgccgcctggacgacagcctttttttagcgggcaagcacccccgcaatatccgggagttccgggccgcggtgagggaacgcaaggccaccatttatcccacggtggaaaaataccaggccgatttgctccacaagctgggttccctgggggaccggttctttacccttttcgtaaaggccatctcctttaagccgataacggacatccgccagtttgtttactcctacgtgctggaggagaagcaaataaatattgatatcatgcgggagaacctccagcgctacaaggagtacagcgacctggcggcccagaccagggagaaaatagccgctctggaaagtatccgggaaaaataccaggagatccagcgggaccgggaaagggccctgatccaggattacgtgatcctgcgggccaaccgggacggggtggcggccagcctgcaggccaatctggaacaggcccgggccctggaagaagagctggcccggttgagccaggctctggacggggccagggaacggttgaaacgctgccgggaggaggagcggtcctaccgggacgccctggcggccaataccacctggcagctggtggagcgtttgaaaggtgagatccgcgccctcaaggaacgggtgaaggaactgtcccgcgcttgcagccaggtagctgaaaccgcccgggaagaatgccgggtgctggcgcaactcctggacgaggcgggggaagatttgcttttaccggctgagcgcagtatactcgcggagctggtggacgggctccaggggctggccgcgggcggtgacgggcaacccctgccgcccggtgacggggaagctctcgatgccctgggccggttgattgaccggggccgggaaaccctggggaaggtacgggaaagggtgcaggaacaggcctgggaaatccggcgcaagctgaaggagctggatcaggaggagcaaaccctgcagcaggaactggccagcctgcgcaacaagaagcatatttacgaccgcaaggtgaccgacctgcgggatctgatccgggagaaattccgcgccgtgaaaggcattgacgtggagcccagggtgctctgcgagcttctggaagttcccgacgagaagtggcaggacgcggtggagggctggctcaacacccggcgcttcgacctgattgtggagccggaacattttgattatgccctttccgtatatgaaaaacacaaaaaggaacggcgcatctcaggggtgggcctggtcaataccggccgggtgttgaagtacttgaaccgcattgaacccaactccctggcctgcgaggtgcgctcccagaaccgctacgccctggcctacgtccaccagctgatgggcgacctgatcaagtgtgaaaatgaacaggaactgaaaaattaccgccgggccattaccccgacctgcatgacctacagcaatcataccgcccgtcagattaaatttgaagtttacgaaactccctttatcggtgaacgggcctatgcccgccagattgcccgcaaagaggcccgcctgcaggagattgccgcggcgcggaaggaattgctcccccggttggagaggctggaaaggctgagccagacgacaagcggccgggacgaacactacattttcctgaaagagcgccgggggacgtggctggaactggccgcgttacggcaggatctgtccgccagggaacgggaactggccggggtggatacttcaggcattgacgccttgcagcaaaagctggatcaactggaactggaaatggacgccttgaacggccggattgagaaatataaccagcggcagggagaattactgaccaccctggaacagaagagaacggaacgggtgaccctggaagacgagcatgcccggctggaagaggagttccggcagttttgctccttgaacccccgtgttgtgcccgagggggaaaggcgttacgcccgggagatccggcgccattcgccccaggaggtggcggccaacttcgcccacaaccgcaagagcgtggaaacgcttattcttaacaaggaaaaggccctggaactcctcaaggccgaatataacaataagtaccagttcggcgggcgaatagaagcggatgagaatgacgagtgggtacaggagtataagaaactggtggaaagcgagctgcccgcatatgaggaaaaaatcaaccaggccaaaaaggaagccgaggaggagttcaaggagcacttcatctacaagctgcgggagaacattcaaaacgcccgcaatgaatttgacttcttgaacgaagctttaaaggatatttcctttggcggagataaataccgttttctggtatacccttccgaaaggcaccgcaagttctaccagatgctggaggatacggaaatggtggagggaggtgtctccctttttgacagtgtttttcagcagcggcaccgggaggccctggacgagctgtttgataaaatcatcaacctgccgcccaggtacctgcccgaaagcattgcggaatacaccgattaccgtagttttctggattatgatatcaaaattacccatgccagcggtgaaacctctaccttcagcaaggtctgccgggaaaagtcggggggcgagacccagaccccctattacgtggccattgtggcttcctttgcccagctctaccgcgccaagaccaaccgggacagcatccggttgatgctctttgacgaggccttcaaccggatggatatcgaccgtatggaaaattccctgcgctttatcaatgaaatgggcatgcaggccatcatcgccgcccctaccgacaagtgcgagtttatcagcccccatgtacccaccacccttttggtgatgcgcgacgggaaaaacagctggatagaggattacaagcagtttaaggaagcggttggcgaaagccggatcgaggcggcggaaagggcggcgggttga

SEQ ID NO: 42562 - DNA, 1299 bp, Desulfotomaculum kuznetsovii DSM 6115
atggccatggactacgaacgctatattctggagactctgctggacaagtatgagcgcagcgccctggccaggggcaaagggggcaaccgccgcatctggcttcatttcaaccagcgtaccatgccccgttattttgacgataccaccgcccggtataaggaagagatcaatggggccgccctggctttggagcgccgggggttaattgagattcgctgggtcaagtttgaggaaaacaatctcatcgagaaagtggccttaaatactggccgcctggacgaggcctacgcccggctgaaacggcgtcccagggcggagcaattccaggaactggcccgcctggccaggcactatgcccggggggcggccccctgggcgcaggaattcttccatactgttgcccggcggctggaagaaggggaaagccagccctacctgaatcccgcggaccgggagcatgcggagcagctttttatggtcattcgggagatcagccttctgcaggaagagatacccaggcgggttttcagcctgcgggtgctgggcaacagcaaggcttttaacaatctggctccaactgtggtgcgaattgtccgggatttccacccggactggggtaaagacggcgggggaaaagagaccgcccttactgccgcagaggtcaatcaggtcctggccgaagtgggggttgtggacaacccccagcacattttcatcagcggcggcctggaatttgctgtcgaaggccgtaccctccgggtgggagatttttccccagacctggggttgccggcggagatggtggaccggttgacggtcaaaaatgttgccgccgattacattatcaccattgaaaacctgacccccttctaccggtttgtaaagacctgccgcgaccaatttctggccatatacctggggggttatcataacgcggttcgccggcggtttctgagtaagctgcgggaatatctggccggtactggccgggcggtgccgttttaccactggggtgacattgactacggggggttttccatctttgtccacctgcagaagcgctgcctgcccggactgaagcccctgtacatggatgtgcccaccctggaacaataccgccggtttgcttcgccctttaccccggcatacggccggcgcctccgttctctgctggaagatccggattaccgcctcttccaccccgtgattcaaaaaatgctccaggagggcctgcgcctggaacaggagtgtgtggagccgccgtcctcccttggtgaaccgggggagcgaaaggtgtaa

SEQ ID NO: 42563 - DNA, 1515 bp, Isoptericola variabilis 225
atgtcggtggcttcctctaccgtctgggccgtgaccgcactcgcgaccgctctcacggcgcggcgcctcctcgaggacagcagcgcatggtcgctgctgcgcgccgacaacgcaccggtcgtcatcgggatcctcggccagcacctgtcgggagaggtccgcagactgccggcgcccgagctgttcgaggcggtcgaggcggagctggacgagctgcgtgcgcacgccttcgacctgccgaagacggcggcgcagtactgccgcgactggctcacggccggctacctggtccggcgaccgggcgagggccgcgaggaggtctacgagctcagtgagggcgcgctcacggcgatccgcttcgtcgagcagctcgcgacgccgcgtgcgagtgcgaccgagtcgcgactcgcgacaatcatcgagcggattcaccggttggcggtcgagaccgaccccgacacgagccggcgcatcgccgcgctcgaggccgagcgagagcgtatcgacacgcagatcgccgcgctcggctcggggtccgccgacgtcctgtccgacgagcgcgcggtcgaacgcgccgtcgacatcctcgcgctcaccgcagaggtgcccgaggacttcgcgcgcgtgcgcgccgcgctcgagcagctcaaccgcgacgtccgggcgcagctcgtcgaggagccggagtcgcgcggtgcggtgctcgacgacgtcttccgcggcgtcgacctgctcgccgagtccgacgccggacggtccttcgccgcgttctacgccctggtgctcgacgccgagcgcacggccgcgctcgaggcccaggtcgacgacctcgtggaccggcctttcgcccactccttgtcaccggaccagcgccggcttctgcagcgcctgctgccgacgatgcaggacgcgggcgcggagatccaccaggtgatgacgtccttcagccggagcctgcgccgcttcgtccagtcccaggagctcgccgaggaccgcgcggtgcaccgactcgtgcgcgagaccctcgccgaggcgaacgcgctcgtcgggcaggtccagccctaccggcagctcgggctcgagctcgatctcacggcggtgaccgtcgcccaggtcgcgggcatgcgcctgcacaaccccgccgacagcgagacgaccgagccggtcgtcacgagccacgcggcgacggcagacatcgcgaacctgcgcgcggccgtccgcgcgtcggagatcgacatggccgagctcaccgccaacgtcaacgacgtcctcggcatgcgcggaccgtcgacgatcgccgaggtcctcgctgataggcccgccacccagggggtcgcctcggtcgtcgggctgctcgtcctcgccgagcagcacgccacgcccgcgggcgacgggcgtgcggagcacgtgacctggcggccggtcgtgtcatccgacaccgcgtctgacggcgcggccgacgcactgcgaggcgccaccgttccccagttcctcttcgaggaggctctcccgtga

SEQ ID NO: 42564 - DNA, 666 bp, Isoptericola variabilis 225
gtgaccgacgtcgacaccgcctccgaggcggccgcggagccgctgtgggagggcgacccggggaccctgcgcgaaccctcgcgccgggctctggcggctctcgtcaagggcccgtacgtctcggccgagcggcacggcgagatctggcgcgcgctggcggccgacacggccgtgatccggtcgcggctcgcggacatgttcctcgagctggtggtcgaccaggcgctcggcatcgcgttcgtccgcggcgcgcagacggcggacggcacggcaccccaggtggtccgcacgctcccgttgacgttcatcgacacggtgctcctgctgcacctgcgcggcgagctcgtgcgcgcaggtggcaccggccgggtgatcgtcggcaaggacgaggtgtatgaccagctccacgtctaccgggcggccgcctccaccgacgagcagggcttcacccgccggatcaacgcgtcgtggaccaagttcgagaagcagaatctcgtgatcccgaccagcacggaggggcgctacgaggtctgccccgtcctgaggctcgtgttcggccccgaggagatcgccgccgtccgcgacgagtaccgccgcctgctggggcgcgcaccggccgacgaggtggccaccgacgaagccccggcccaggaggacgacgcatga

SEQ ID NO: 42565 - DNA, 3393 bp, Isoptericola variabilis 225
atgacgagcaccgacctgcacccgggccagtggcgtctcgagcgcgtcgagctggtcaactggggcacgttccacggtcaccacgtggtcgacgtggcccgcaagggtttcctgctgaccggctcgtccggctcgggcaagtcctcgctcgtggacgcgatctccgcggtgctcacgccgcgcggcaagacacgcttcaacgccgcagccgccgacggcacgacgcggtccggcgaccgcacggtgctctcctacgtgcgcggggcctggcggcgtgccaccgactccgacaccggcgagatcgccacggagtacctacgtccgggcgccacgtggagcgggatcctgctccggtacgccgacggaacccgccgcaccgacgggtctgccaacacgctcactctcgtcaagctgttccacgtcaagcgcggcgcgtcgagcccggcggacgtccacgacgtgcacatcgtctcccccgtgccgctggggctgctcgacctggaggagttcgcccgttccggcctcgacgtccgggcactcaagcgtcacctgcccgacgcgcacgtcgacccggagcactcccgcttcgtcgcccggttctcgcgcgccctcgggatcacgggcgaccgcgcgatcctgctgctgcacaagacccagtcggcgaagaaccttggctcgctcgacgacctcttccgcaccttcatgctcgacgagccgtccaccttcgcgacgtgcgagcgcgccgtcgagcagttcaccgacctctcccgggcccaccgggcggtcgtcgaggcacgcgagcagatcgaggcgctcacgccgctggtcgacaccgcgcgcgcctacgacgacgccggcgccgcggagcgcgaggccgagcggctcgcggccgggctcgaggacttcacccaggcatggaagctcgacctggcacgtcaagcgcgcgacaccgccgccgacaccgtcgcacgtgccgaggccgagaacgaccgcgcccgggccgccaccacccaggcgctgcagcgggtccgcgaggcgcaagggctcgtcgacgagcgcggtggcgcggagctctcggctctcgacgcccgcatcgagacgcacgagctgcgcctgcggctggtcacgggcgagcgcgaccgtgtggcccgcgacctcgcctccgtccaggtggcgcggccggacacccccgaggacctgctcgagctccagcgggtggcccgtgccgagctcgcgcaggccaccgacgacgacgccgcgcacgcccggcaggccaccgacctgtggaccgagcgcacagaggctcgcacggccctcgagtcggtccagcacgagctcgcagccatgcgccgcacccggtcgaacatcggcagcggtctgctcgaggcgcgccaccggatcgcccgtgccaccgggatctcgccaagcagcctgccgttcgccgccgagctgctcgacgtccgcgccgatcacgccgagtggcgcggcgccatcgaacgtgtcctgcgtccgctggcgaccgtcatgctcgtccccgccgcacaccagaccgccgtgagcgccgcggtcgacgccgcccatctcgggacgctgctgcggtacgagtcggttcctcccgccgtcgacccgccgcgcaggcccgcatcgcacgactcgctcgtctaccgtgtcgacgtcgccgccggcccgatgcaggcttggctgcaccacgagctcgcccgccgcttcgactacgcgtgcgtggagacggtcggagagctcgccgacgtcgagcagggcgtcacacgagccggccaggtcaagcgcggccgccgttcgttcgagaaggacgaccgattcgccgtcgacgaccggtcccgctgggttctcggctccgacaacgcggccaaggtcgaccactacctcgagctgctgcgcgccgcgcgcgagcgcgtggaggccgcggaccgcgcactgggagacctggaacgcgcgcgcacgtccgccgaggcccgacgccgcgtcctggccgccgtcgtggagctcgactgggcgtccgtcgacgtcgccgcctgcgagcgcgagctggccgacgcgcggcgcgcccgggcagggctgctcgccgcccagggtgacctgcgctcggcgcagcacctcctcgacctggcggagaccgaggcgacgcaggcgcgcgccaccgagcgggagacggctgcggagctagcgaccgcccgcgccgagctgaaccagctccaggccacgatcacagacctcgagcgccaggcgccgcccgccgtcgacccgagcgtccacgcccggctgaaggcagagttctacgcgcaccagaccacccggcgcgtcacgcacgcgacgatcgacgcggtctcacggcacgtcgcgaaggcgctcgcggaccgcggcaagcgggccggccgggaacgcgaggccgcgcagctcgcgatcgtcgagctcaccggcggcttcgtccgccgctggccggccctctcggtggacctgacaccgggggtcgaggacaggcaaggcttcctcgacgtgctggccacgctgcgcgccgaccggctccccgacttcgagcaccgcttcttcgagatgctgcgcgagcagtcgcagcagaacctcgggctcctggcacaggagatccgtcacgcaccggccgagatcaagcgacgcgtcgagccgatcaacgggtcgctcatgcgcagcgagttcgcgccgggaagccacttgcagatccgggtggaggacgccaagcctgcggcggttcaggagttcctcaaggacctcaacacgatcaccacgggcgctctggccgccgacgaggaccgcgaggaggccgaacggcgcttcgcggtgctctcccgggtgatgcaacgcctgggctcctcggagagcgcggaccgtgcctggcagtcgctgtgcctcgacacgcgccgccacgtccgcttcaccgggacgcaggtcgaccgggagcgcaccgtcgtcgacgtctacgactcgggtgaggggcgctccggcggccagaagcagaagctcgtcgtcttctgcctcgccgccgccctgcgctaccagctcacgcgcgagcgcgacgcggtgcccgcctacggctcggtggtcatggacgaggcgttcgacaaggccgacgccgcgttcacgcgcatggcgctcgacatcttccgcgagttcggcttccacatgatcctggccacgccgctcaagctcctgcagacgctcgaggagtacgtcggcggcatcgcgctcgtgacgtgcgccgattccaaggactcgcacgtcgcgccggtgcccttcgacggggccggcccccgcgccgaggaggccaccccggcggagcagcaggaccgcgcagtccgcgagctggagctcgacctgtcgtga

SEQ ID NO: 42566 - DNA, 1173 bp, Isoptericola variabilis 225
gtgaccgtcgatgccgcacgcgcctcgattctcaggacctacgagcgtgggtacgcggcgtgggcggcgctcggcccgtccgaggagacggtcgtcgacgtcccgctccacccaccgagcgaacggaccgtcctcggcgacccgcgggccgtggccgactggatcgccgcgtggcgcgcggccgacccgggcgctcccggcacggcgcatgtcgtctgggagacgcgccgctgggccagcatggggacgcaggtggtgcccgcccggctgaggctcaccgccgcggagcacgtggcctcgttcgtccggcggcgtgggcactgggatgccgcccgcacccgggccgcggctctcctggagctcctcggacccgacaacgcgcccgttcgcgaggcggtccggcgcgcgctgcgtgccgtcgtcgagctcgacgaacccgagctcggccgcctcctcggggtgctgcgctggttgctcgcgaactccgcgtcggggatgttcgtccgccagctcccggtgcggggcgtggacaccaagtggttggagcggcaccgcggcgtcgtcgacccgctctggaccgcggcgaccgggacggccgacctcgggctcgcggcgcgccctggcctggtgcgcgtgcgattcctggaccctgcgtcagcgccgggcggactcggcgacgtctcggcacccgttgcggacctcgccggccttgcgatctcgccgccgaccgttctggtcgtcgagaacctcgagacgctgctcgctctccgcccgcacgccggcgtcgtcgcagtgcacggtcaggggtacgcggcccgtcacctgcaccagctgccgtgggtgcggccggccgacgtcctgtactggggcgacctcgacacccacggcctcaacatcctgagcatcgtgcgtgcgcgccttccgcagacgcgctcgttcctcatggatcgggcaacgctggaggcctacccggacctgtgggtccccgagccgaagccgcaccgtacggtccccgagcacctcactgcgtcggaggccgacgcgttcgccgccctcagcgagcacggcgacgtccgcctcgagcaggagcgcgtgccgtgggcgagcgccgtcgaggccctggacgcactcttggagacgtgccggagcacgaggattacgctcccggactga

SEQ ID NO: 42567 - DNA, 1554 bp, Isoptericola variabilis 225
gtggtcgtcgagggggcacggggtccggcgctgcgccgggcgctcgcggaggtcgagcgcgccttcgccgcgcccacgctcgggttgctgcacaaggccgaggcgccgctcgtcgtcgccgtgctccggtcggtcttcacgcccgaccggcgtgcggtcgcgaccgagcagctgcacgtcgaggtcgacgacctgctcgccgagctccgtgccgcggccgggcgcggcgaggcacccgtgcaggtgcccgtgccggacgagccggcgcgcgtgctgtgcacccggtgggtgcgcgagcgctggctcgtgcgctcgctcgacgacgacggcggcgagcgctaccaggtgagcagctacgcggcggaggcgctcgacgtcgtcgcgcgcacgcagggcacgcgcgcgctcgtgagcgagtcgcgcatccgcaccctgctcgtcgcgctcgaggacctcgcccgcgacgcccggcccgaccgcgaggcgcgcatgcgcgagctgcgcgcacagatcgacgaggcggaggccgagctggcccggctcgaggcgggcggcgacgtcgagcccgtcgcgccggagcgcctcgccgagcggtacgacaacctgctgtggctcgtgcgcgagctgccgaccgacgtcgcgcgcgtcgccgagtcgatctcggcgctccagcgcgagatcgtcgcgcggctgcgccaggacgagcgcgcgaccggcgtcgtcgtcgccgagtacctcgacgcgtccgagaacctgctcgagcggaccgcggagggacgcgcgttcgcgggcgcgatggagctcctcggcgacgcgcggatgctggacgcgctcgacgagcgcgtccaggccgtcctctcccacccgttcgccgcggatctcccggccgagcgccgcgccgcgctgcgggcgctgcgcgcccggctcgtgtcggccatcgaggtcgtgctcgccgcgcaggcccgcgcctcgcgcacggtgaccgcgcagatccggcaccacaacccgctgcgcgaccgcgagctcgacaccgcgctgcgcgaggcgacggccgcgatggccgagtggttcccggcgtcgggccgggccgcgcgcgtcgagccgctgcgctggttcgagcgggcccgcctcggcaggctgcgggactcgctgcacgacctgcgccccgagacgccgccggccgagctcgaggactgggcggcctctgacgacgcggacgggcccgcgctcgacgacctgcgtgcgatgggcgggccgcagcacgcgcagatccaggctcacctcgcggcgctctcgtccggcgcggacgccgagggactcacggtcggcgaggcgttctcgcgcgcgccggtcgagctgcgccggcccgtcgagctgctcggctacctcgagctcgcgggcgccggcggcctgcccgaggacgaggcgacgtcgggcgacgtccccgcgcacgcgctcgagcgtgtgcgcgccgtgcgcgccgacggcaccgagcgcgagttcgtgctgccgcgcacccccctcagcacgcaccaggaccaggaggaccgatga

SEQ ID NO: 42568 - DNA, 723 bp, Isoptericola variabilis 225
atgacggacaccgtcgacgcgcccgtcgaggcgcccgagggcttcgtcgaggcgcggcccatggaggacgacgacccgggactgttcgcgggcgacaccggcacgctgccgttcgaggcgcgccgcgtgctcgcgctcgtgctgcagcggcgctacctcgccgcggccgaccacccggccgagtggaaggcgctcctcgcgcaccagcaggtgctcgagtcacgctgccacgacatgttcgtcgagctcgtggtcgaccgcgactacgagatcgcctacaagcggcaggtgcgctccgagggcctggcgatccccgtgctcctcaaggacgagccgtacaagcgggtcgagacgctcctcatgctgttcgtgcgcaaccggttccgccaggagcgcggggcgggggagacggcggcgttcgtcgacgccgaggagatggtcgactacgcgctcggcttcctcgcgcacgacgagaccaacctcgccgcacggcgccgggagatcgacaacgcgatcgcgacgctcgcgcgcgagcacgtgatcgccgaggtcgcgacgggccggtaccggatcctgcccgtcgtcgaggtcctgctgcccgtcgaccggctgcgcgagctcaccgcctggctgcgctccggcggcgccccgaccgcgcccggcgacgaggcggtccccgaggcctccgccgagagctcccccgagagcgaggacgacgagtga

SEQ ID NO: 42569 - DNA, 3381 bp, Isoptericola variabilis 225
gtgagcatcacggcgccgcggatgagcgagtcgctcttcgggctcatccccaccgcgtccgacggccgccagtggaccgcgcgcagcatgcagctggtcaactggggcggctaccacgggcaccacgaggtccggttcgcgacgacggccacgctgctgtctggcgcgtccggctcgggcaagtcgacgctgctcgacgcctacatcgccctgatgatgagccacacgacgccgttcaacggggcgtccaacggcgcgaccgcgggccgggcgcgcggccgcgagcagcgcaacgtcctgtcctacgcgcgcggcaagctcgacgagtcgcgcgaggacgggcagacgacgtcgcgcgaccgggtgctgcgcggcgacggcgtcgacacgtggtcggccatcgcgatgacgtgggccgaccagacgggcgagacgctcaccgccctgcgcgcctggtacgtgccgcgcggcgcgcagcgcaacgaggactgcgtcgtcgtgcgcgccacgcacgacggcccgttcgacctgcgccgcctcgagccgctcgcggccgggcgcttcgcgcgggccggcctcgcggaggcggggctggcgctgttcgacaccgacgtcgcgttcgccacccggctgcacgccgcgctcggcatcggcgccgcgggcgacgggcacaaggccatgcagctgctcgggcgcatccaggcgggccagcagatcaccacggtcgacgccctgtacaaggcgatggtgctcgaggagcccgagacgctcgaggtggccgaccgcgccgtcgagcacttcgacgagctcagcgcggtgcgcaccgagatgctcacggcgagcaggcaggtcgaggtgctgcggcccatggtcgcgctgcgccggcagatcgacgaggccgcggcgtccgccgcgctgctcgacacgctcggcgtgcgggccgacgacgccgaccgtgtcggcgcggcgcccaccccgttcacggcgtggcgcgacggccgacggctcgcgctcgtgcgcgccgaggaggaggcgaaccgcagcgcgcaccgcgcggccgaggagcgccgcgccgcggcggcgagccgcatcgcgcaggccgaggcggagctcgaggaggtccgcgaggaccagcgccgccagggcggcgacgcggtcgaggcggccgagcgcgacgtgcgccggcgtgccgagcggctcgaggaggtccgcaccgcgcgcgccgcgctcgacgcgcagctcgccgtcgtcgagcacgacgtcgcgagccgcgccgacttcgagcgcctccagcgcgacgcccgggcgttcgtcgaggcgcgcgccgagcaggccgcggcgctcgaggaggaggtctgggccgcgcgccaggccgtgtccgacgccgagcgccggctcgcgtcgctcgagcgcgagcaggcgtcgctcgcgcagcggcgcggcaacgtcggggccgaggaccacgccgcgcggtgcgcgctcgccgaggcggcgggcctcgacgtggacgagctgccgttcgtcggcgagctgctcgaggtgcgcggcgagtacgagccgtggcgcgacgcgatcgggctcgcgctcggcggcttcgcgacgacgctgctcgtcgacgccgaccggctcgccgcgttccgggccgcgatcgacggcgtgcccctgcgccggcgcctgcgcttcgagggcgtcgagacggggctgccgctcgacgtcgacgcggacccgcgcacgctgcccggccgcctggaggtcaaggccggcccgttcggcggctggctcgcgcgccggctcgccgagcggttcgcgtacgtgtgcgtggacgacccggccgagctgcaccggcacccccgggcgctgacccgcaccggccagacgtccgacggcgcgcgcggcgcgcacggcgggacggggcgcgcctcggtgctcggcttcagcaacgcgcgccggctcgagcggctcgccgacgacgtcaccgccgcgcgcgccgcgctgcgcgacgcgggcgccgcgctcgagggcgcccggctgcgccaggccgcgcacaccgaccggttcgtcgcctacagccaggtgctccggttcgcgtgggacgacgtcgacgtcgcgggcgccgaggccgcgctcgccgagcgccgcgcgcgcctcgagacgctgcgcgacgggtccgacgtgctgcgcgcgctcgccgacgacgagaaggggctgcgctcccggctcaccgagctctaccgcgagcgcgccgacgcggagaaccgggtgcgcgagctcggcgagcagtgggcggcgatcaccgagctcgtcgaccacgtgaccgacgccgtcgagcgggccgcgcgcgagggcgtcgccccgtcggacgcccagcgcgagcgcctcgaggcggcgctcgcggcggtcgcgcccgggccggtcgaggagctcggcctggccgggctgaccgcggcgaccaccgccgtcgtgcgcgagctcgcgcgcgaccgtgaggccgccgcggaggccgagcgcaccgcccgggcggcgctgcgctcggtgttcgagcggttctgcgacgcctggcccaaccccaacctcggcaccgaccccgacgcgtcctacgacgacttcctgcgcatctacaccgagatcgaggaccagcggctctaccagctccaggagcggtggtcgcgcacgatcgggcggctctccggcaacgacctcacgctcctcggcaacgtcatgaaccgcgcggtcgccgagatccgcgagcgcatggagccggtcaacgcgatcctcgcgacgctgccgttccgcgacgaccggcaccggctgcgcatcaccgcgaccgtgaccgaggcgcaggacgtggcgtcgttccgccggcagctgcgcgagctcgcgcaggcaccgcccgccgaccagacgcccgccgagcggcagcgccgctacgagcgcatggcacgcctcatcgaccgcatccggcccgactcgcccgagcggcgtcggctcgtcgacgtgcgcgaccacgtgcgcatcagcgccgagtgcgtcgacctcgagggcaaccacgtgagcgtctacgaccacatcgccggcaagtccggcggcgagtcccaggagctcgtcgcgttcatcgtcggcgccgcgctgcgctaccagctcggcgacgcgggagccgagcggccgcggtacgcgccggtcttcctcgacgaggcgttcatcaaggccgacgcgcggttcgcgggccgtgctgtcggcgcgtggcgcgggctcgggttccagctcgtcgtgggcgcgccgctcgacaaggtcagcgcgctcgagccgcacgtcgacgtcgtgatccaggccgtcaaggacgagacggggcgctcgcggctcgtcacgctcgtgggggagtga

SEQ ID NO: 42570 - DNA, 711 bp, Escherichia coli 9.0111
atgagtgaacgattacgtgtgatccttagccatccttctgcttctgatgcgcttaaccgtctacagcgtcacgatctgcgctggctggttaaacgtctggtcgatgaatcgcaaactgtcctccaggctcgcgcccgtagcgagcgtgatgtccgtggtttcatgaaaaccggtcttgctgctgaacatcatcgtgttggtcatttgcttaatgagtttctgaatctggcgttaaaactcgactggcagcgccagatgattcgtaaacaagaggtgccgctacctgccgttggtgtggcggtaacaggcatccccgctattgaacgtttacgttttaaagaggtggatgatgaagcagagcagacgttggatctcagtaatcatgcggcggatttaacgcagattggcgatgatttctgggatgccttcaatggcctcgatcgtgaggtgttgattcagcagacgttgcagcttcttgcaaaagaaaatcgccccgttggcctggctgaactggcggcgctgttacccccggctcacgatctcgaaacattcgccgtctgggttggtatggcaagagaagcgggtattgaggttattgattcacagcgtgaatttgcagagcttagtgatggggaaggtcgccgctggcgatttaatctgcccaccaccggtctggaaagtcaggcattaatggatatcgattgggagtaa

SEQ ID NO: 42571 - DNA, 750 bp, Escherichia coli 9.0111
atgacgggcttttttgacaggctgattaaccggagcgttaccgcaaatgcaggctgtgaaccagaaccatcggatgaggaggttaccgatgagtcggttgaagaaagtttggccagtagtgaaacgcggacgctaaaaaaaatacgtgaagcgactcaggaattgctcaaatacggcctgctggaagaggccagtaagcccaatctgtaccgcatcgtactgagccatcctgaagaggttactcgtattctggagcctctcgatctggatatcggcattgatgagatccgtggcctgctgtatgtcaaagtcaggcttgatgaaacgcctgcgcaggatgaatgggcccaccctctggtgaggcggcaacgactaaacctggaacaatctttattagttgccatactgcgccaacattttgtggcctgggagcaggaaagcggaaccggtgccagtcaggcacagatcgccatcgatgatcttctccctcaactccagatttatcttggcgacccgggcagtgaatcaaaagaacgcacccgattgcttaccctgctggatcaattaaaggggcatgggctggtgacgtcgccggatgcacatgagcggatcgtcatccgtccgatcattgctcatcttgccgatccgatcaatcttcaggcattactggcatggctgcgagagcaaattgcccagcaaacctctccaaatgacgcgcgagaaaaggatagcagcgaggaggacgtatga

SEQ ID NO: 42572 - DNA, 3288 bp, Escherichia coli 9.0111
atgaatcaggtatctggcctggctggaaaggaatctttcattcttacccgtattgagttgttcaactggggcggttttcatggattgcatcaggcagcaatccatcaggatggtaccgccgttattggcccaaccgggagcggaaaaacaacgttggtcgatgccctgatgactctgctttgtgccaatcctcgctacaatctggcctcaactggcgggcatgaaagcgacagggatcttatctcttacgtccgcggcgtatccggtcctggcgatggcggtgaagggcaatcgcatattgccagaccaggtaaaaccgtgacaggtattgctgctacgctggagcgcgaaggaaaacaggtccgtctgggggcgttattgtggtttgattccaccagttccagcgtgacggatatgaaaaggctctggctgttcagcgataatcccgggcagacgctggagcattggctaaacgtttaccatgagggaggtacacgtttgctccgacagatggaaaaagaagccatcgggctctggacatacccgaataaaaagcagtatctggcgcgcctgcgggatttcttcgaggtgggggaaaacgcgtttacgttgttaaaccgggcggcagggttaaaacaactcaacagtattgatgagatttttcgcgagctggtgttagacgatcactccgcctttgatcgcgcggctgaagtggccaatagttttgatggtctgactgagattcatcaggaactggaaaccgctcgcaaacaacagcagtctttacaacctgtcgccctgagctgggagaagtaccaaaagcaagagcgtcaactggctgactggcagacgctggaatcgctgttacccctctggtttgcacaacaggcaaaccacctctggcgggaaaagattaaccttcttaacgcaaggctcgctgaggcacaaaccagcgaagaacagctccagtcacagcttgatttgcaaaaaaaggtggttagcgactgtatgcagcgttatctccaggtcggcggtgccaatattgatgaactgaacgagcgtatcaaggactggcaaaaaacgctcggcagtcgagaggcattggcgcgtcaatatcaacagctgacccgtaaccttggattgccgtctgatctgatccaaccacagctggaggcgaatcagcatgaagccgcggccctatgtgagcagatcgccgttgatataaagttgaaacaggaagaagcgtatcaaaaaggtgcgcttagccatcacattaccgaagagcttcgggaacgggaaaatgaacgcgccgagatcgcgcgtcgtccggattctaaccttcccgcacattatcaggcgtttcgtagcgagctggcaaaagcgttgaacgtggatgagtctgaactgcctttcgtcgctgaactgatacaggttaaaccggaagaggcgcaatggcgcggtgcgattgagcgtgctgtcgggagtaacaggctgcgtattctggttgcgcctgaatcggcacaggaagcgctgcgctgggtaaatcagcgcaacaaccgtctgcatgtgcggctactggaggtcaaattaccgcactctcccgcccggttcttcgacgatggctttacccgcaagctgttgtggaaagatcatccgtggcgagaggccgtcaaagcattactggccgaaagcgacaggcattgtgttgacagccctgaacaactgcgtgacacgcctcatgctatgacggtgcagggattaatgtctggtaaacagcgtttttatgacaagcatgatcagaaacgccttgatgaagactggctgacgggattcgataaccgcgatcgcctgaacttccttgctaaagaaattaccacgcttcaggagcaggttaaaaccgcaaacgcggcatttgagtttgcgaaaggcgaggtggggcttttgcaaaatcaggctgcttccttccagaaaatagaacaaattgatttcgatagcatcgatgttcccggcgcgaagagccaactggacgcgctcagggagcggctggaaaatctgacccgcccggattctgacgccagtgtagcgaaagcaaaacttgatgaggctcaaacggttgaatctgaactcgataagcagctcagagctgccaataaagtcactaacgtgctggatacagaactcacatcagcccgtgccgcggaacgtaaggcccagcaaactgcacaacaaggtatgaaggaagaagagcgagagttgtgcgcgtcacattttccagtggtgactttggagcaattgcctgacattcgcgatttagaacgtcaacatgagcggggaattcagcatgaaattgaaagagttaaagctgaactacatcgactgaacattgagttgaccaaacgtatgtctgaagccaaacgtgtggataccggggcgctcgttgaggcaggggctgatttggacgatattactgtttatttacagcgtttgcaggaactgaccgaagaagccctgccggaaaagctcaatcgcttccttgattatcttaaccgttcatccgatgacggcgtaacacaactgcttagccatattgagcatgaggtgctggtgattgaggagcgcctcaatgaactcaatgaaactatgttcagggttgattttcagccgtatcgctacctgcgtctggataccaaaaaagttgtccatgaaagcctgcgcacgcttgaaaaagcacagcgtcagctaaatgccgcccgatttgttgatgataatggcgagagccattataaggctttgcagatactggtggcgcaattgcgggatgcttgtgaacgaaaccgtaccctgggagcaaaagcgctactggatccccgttttcgactggagttcgccgtatcggtgatggatcgtcagagcggaaatgtgattgagtctcgtaccggctcacagggtggtagcggtggagaaaaagagattatcgcttcttacgtgttaacagcttcacttagctacgcactttgtcctgcggggagccgttatccgcttttcggtaccattatccttgatgaagccttctcccgcagttctcatgcggtggcgggtaggatcattgccgcgcttagagaatttggcttacatgcagtatttatcacccccaataaggaaatgcgcctgctgcgtgaccatactcgttcggcgattgttgtccaccggcgcggtcagaattccaatatggcttctctgagctgggaagagcttgaacgacactaccagcgacgggggaacgcgtag

SEQ ID NO: 42573 - DNA, 951 bp, Escherichia coli 9.0111
gtggaatgggaagcggtgagttatcgggcaagtgatacaccagtattaatgccgttgcgctggattctgaatagcccttctgagtggatcaacgccgctgcggatccggttgtgagccgggaatttcgcttgctggaaggaattattgaacaagttaatcccatttttcacccgctgttggtaaagcatcgctctctctggcggcacaaagatccgcagggcgtcatcagcgccgccacgctggcctgccgattagagccgggctgcgcaaaagggctgccgttaagattgctttccgggcaaggagtggataccaaatttatcgagaataatatttcgttattaacccgactgttagacgtgcggttttcaggagaagccagcgagcagggattaacaacttttcttgatgcttttgatgagtccagtcactgggttttagttgtaccattatcacccggcttacttccttttaaaaaatgccgggtaacaacggcggaactggcagaaacaacattacctgcgtcgcaagtactggtggttgaaaatgagcagtgtctgcatcatcttccagcattatctgacactatcgcgattttaggctgtggcctggacgtgcaatggctatccagttctgttctggatgaaaaacgcgttgcttattggggggacatggatagctggggattactgatgctggcgagagccaggcgctgtcgtccgacgcttgatgccctgctcatgaaccgtgagttgtttgagcagtatgccagtcatagcgccgttccagaaccggtcatagcgaaggaagctgtacctgatggcttgcttaacgaagaggccgatttttatcgctacttaacccgtttaccgtgtggtcgtctggagcaggagtttttgccagtggggattgcggaagaggtgcttctcaggtggggaaaagagagttaa

SEQ ID NO: 42574 - DNA, 1428 bp, Haloplasma contractile SSD-17B
atggagttaactaaaaatcccaaagtatttgaggtaataccaaataactttttcaatgtactagccggtgaaaataaagatgtctatttagactgcatttttatcatccatgactatcttcaaggaaagacctcatttggctgtgatcgagatgaactgattccggtactaaaagaatattttgacacactcgaaactaaggttaaagaagatacacaggaccctggtattcgtacacgcgacccaagagaaaaggcattttcagttctcaggcggctacgagaatgtggatggatctctcttgaaattacaaataattataaacattatatcaactttcagggctatgcaattacaatcatagatgcattacggtccttgtctaagaaagataacagtaaggttcagggtctcgtttactcgatttattcgtatttacacaatttagacacctcaactgctatggtagcacttgaacaagtctatgcaggtacagattatttattaaccgaactgaaaaagttaaactcaaatatcaaggagtatattcaaaaaatttatcatgatgatgtggagaacgatttagaagcattactaaaaatgcacttcatcgattataacagtaatgatatttatggaatttatcatcggttaaaaacaacagataatgtttgtaaatttaggccctatatcattgataaattagaggaaattaagaaaaatcggatgctattagaaacaatttgtaatgatctaattaagttaaataaatacacgatctatgatgaggcagagaagtatactttaatgagtatcaatcgtgtcattgagagttttaatagtattgatcaggtcatagatgatattgatgaaaaacactcaaaatatgtatcgagttcaatagccaaagttcaatttaaccttacaaacaatggagatattcctagtaaaataaatacgattttaaaatatatggttgcctcttcaaaggacaagaagaaaaagtccatcgatcaagtatcagatgaagaaatgatggaaggattatttgaattatatacacaacatatgattaataataattcgctatataaaccacctagaaaaagcggagagtttctacccaaagaaattaataaaccagaagaagtaaatgaggaaacgaaatctctaaaattagaacgtttaacgaagaaaaacatatatagtaaacagagtatagatactattgttaaaacctatctacaagaaaaagattccataaaggcttcaatgattcaggttgaatcaattgatgatttaaaggtgatcgtttacattgttttatattcaagaagctcgaatgttagctatagaattaaacgaaaagatagcaaaataataaccgatcactattcgttcaaggactttgaaatttgggggaaataa

SEQ ID NO: 42575 - DNA, 588 bp, Haloplasma contractile SSD-17B
atgaatctaagtagtatttcagacttgtttaatgaaaaatacaaaaaattatcgtcgtcaaatcgtcgcaatttcatacgaattggtaataaactattatcggtctgttttattactgcgaaaaaggatgctgactttgaagattattattttgttgaagagaattataaattatttcaacattattttcagctaattggatggaaagttgaacttgatcagaacctgttagttgttaccttatttaatcagtatgagtataaccgattaaaactaaaattaaaggaaagcatcattttattaatcttaagattattttatgaggagaaagccacacttggagatgtggtcattacaattaacgaattaaataagaagtttttatcgttgaacttacaagaccgtcccattacgaagacggatttacgtagtattttatcattgtttagacgttataatttagttgaatatatggatcgagatctgacaaaagggaatagccgtttaatcatttatccgacaattctctatgcagtaaaggcgtataatatccatgaagtgtataaaaaagttgaagtttataagtag

SEQ ID NO: 42576 - DNA, 3231 bp, Haloplasma contractile SSD-17B
atgaagcgattaatgaaaatcaaactaattaattggcatggctttgtaaatgaaaccgttgaagtaaatggaaactgtgttataacgggtgagaatggagcgggtaaatctacgttactcgatgccgtacagtatgtaataactgggggaaaagtaaaatttaactctgcagcaaatatgaaagccagaagagacttagaagggtatgttcgatgtaagattggaactgataaaaaaacatatttgagagagggagatgtaacaagccatgttgcgcttgaattttatgatgatttaagtgaacgatcggtagtcttaggggtagccatcgatgtctcaagtaaccaaacgcgaccgaaggaacaattttattgtatagatgacaagcgaattacagaagcgtggtatattaaagatcgagtgccagtaaaaattaacgattttaaaaagattattcgtaacttttcctcgacgcttcctatgaccaaaggtgaatcacgtcttttgatgttaaataaacttgatattaacgatgtcaaatacgtagaactattgcctaaagcgttagcctttaaaccgattgataatgttaaagacttcgtctacaactttctattagatgacaaaccgattaatatagacaagcttagagagacaacgaaggcgtaccatcattttggaacgctcctttgtgatgttaagacaaaactagatgatttacaaacgatagttgatacatataagcagttagaacagaagaaaaaacaacagaatctatataaaaacatcgtaacattttccgagagagacctctttttacataagataggggaccgaacaaagacgattgaatcattacaagaacaaattaatgaacgtaaagatcgaattaacggagttgaggtcgagcagaaaaagttagatgtaaaaaagaaagagcttattaaacaaatgtcgtcacttggacagaacaatgagaaagaggaaattaaaaataaaattttagtaaaggaagaagaactaaagggtttaaagcagcaatacgattatgtcttaaatcagcttaagacggtgatcacacagttagaaggcattacagaacaactaacatccaaggcgaatcatgatttattatatgaacttaaacagtttgaactaaatcaaaatcatatagataaatttagacatatacttcaaaaaataatagacacctatgatgatttaaaagaaaaaaatagagaaaagttaatgtttcttaagcaaaaagagaaagagttaaatcaagaagtgagagataaaagagagactcttacgaatttagaacaaaaagaagtcccgtatagacgggaaatcagtgaattaagacaaaccatacaagaggaaatcagaaaacaagggtatccggattttaaggttcatgtgttttgtgaatgtttagagattaatgatgatctatggcgtgatgcgatagaaggttatttaaacagtcagcgttttgacttaatagtatcccctcaattctttgacaaagcacttactatttatgaacaggttaagtttaaaaagaaaatttatggggttggattagttaataccggtaagatatcaatttataaggggacacatcctggcagcttatctagcaaagtcgatacaaataatatccatgcaagactttacgcgaacatgcttttaaatcgtgtagtgtgctgtgaacaggtgaatgagttaaagaatcatcgaacagcaatcacgccaacctgtatggtctataacaactatacggcaagacaaattcatgcaaatgtgtacaaaacaccatttattggtcgtgatgcaattaagaagcaagtaacaaaatatcgagatgacctaaatgagttgactgcaaaaaagtatgaaatagaacaggaaattagtaaagtgaatggaataatcgaacaactaggaacaaagaaactttatgaaatcttatcgaatactcattatataagaacatactataaagaattgtcagacttaaacgatttaaaggaagcagcagaacatgttgaacttgacgatcactatttaacattagaacgcaatttagatacattagatgagacgtctagaggacttaataaacaaatcaatgaactctatacggaaataggaagccttaaaaaacaaaaatctgaactatcaaatgagcttaatgatactgaaaataaaatggctaaactagatgaagaaattgatgacctaattgaacgcaatcataaccattatacagagtctaaagaagcgtataacgagatgttaaaagaaatagagtttatagacgttatcgatcaatgcaagaagcaattagatgaaaaccaaaagactattacaagtctttatagtcaattaaaagtcttaaagaatgagtacaattacaagtatcaaagtagttttgatgaaaatgagaaaacgattaaaccctatattgagacttttgaaaaaattaaaaatagtaccttactcgattatgaagagaaggtacaagaactaagagaaaagactgaactagaatttaaagagcactttattgcgaaactacaagaaaacattaagaagtcacataaggaaattagggtattaaatgaggctttagaaggtaaacagtttggtaaggatgcttatcagtttgtatttacaccgagtagaggaaaagaaaaatattataaactaattatggatgatagtatattagagaacttttccttatattcagatgtaatggatccaaagagtagtgcgattttacatgagttactagaaaaaattacagaggatgataaggagtcagaaagtctgattaatgattttactgactatcgtaaatatatggactatgacattaagattcttcatgataatggggatacatctagtttctcaaaagtctgtcgtgaaaagagtggtggagaaacgcagaccccttattacgtaattattgcagcatccttcgttaaattatttaaccaagactcggcaggaatcgttctatatgatgaggcatttaacaatatggatgaaagccgaatccaaactatgatggaattttaccagtcacttaatatgcaaatgatgattgccgttccaccacaacgaatggagaccttaatgccttatatgagtacggtcttagttgttattaaagaaaaagattatacatatatcgaaccatttaatcatcatttttaa

SEQ ID NO: 42577 - DNA, 1407 bp, Haloplasma contractile SSD-17B
gtgaaactcaagctatttgatgttgtacctgaaaacttttttagtgttctatcatcacaaaacaaacatatatatgctgactgcatatttttaatatataagagtacgaatgaactgagttcctatgggattgaacgagaactcttaatcgatgtattagtggattaccttgatcagttaggcgaagaatcgatttctatttttgatgaagatgaagaaaacacgggtcgtagttctagagaccgtgcaaatgggctcatccgtaagtttgctgagtgtgggtggattgacattgaggaaaatagtaattatgttgaaaccattaacttagttgattacgcgattgcgtttattgagacgatggacaagctgatgaaaaatgatcgccttgaataccagggatatgtttataccatctatacattgttattcagtcatgaatccgttcaaccgagtgtgatgcttgaacaggtttatgaaaatacgaagaaactcattagtgggttaaaaacgctgaactcaaatatcaagaagtacaccgatcaaattacgaaactgaagagtgcggaagatattctaagtttacaatttaatgattatgaaacaaacattatagataagggataccaccgtttaaagacgagtgataatgtgagtaagtttaggccgaaaattattgaaaagctagaggaattaaatcgagacgcagatcttattaaacaggtgagtgaacaactcgttgaaatggagaaagcagaaagtatcgaacaggcctataactcggtacgtaattcgttaaacgataccatttatgcgattaatcatattgatgaaatcatcaaggagattgacaggaagaactctcagtatctaaaggcatctctaacacgcgtcaagtatgtacttaatagttcgaaggacttagaaggacagctaactgagattctaaaatacatagcaacgacttataaagacaaaaatctagacttaaataacgattacttagatgaaattataggcatcattggagtttatccacagagttttattgatgaacagtcattatatgtatctaacgaaggaagacgatcgtttaagccacagtcgttagcggctaaaacgatctcggtaaaagagcgcaaggaacgactggaccgttttaaggagaagaacaggcaacgtcttagtaaaacgacaattaataagtatgtactcggtttattagggggacgtcaggtcatgaatgcttctcagataccgattgatacgtttgaagactttattaaggtgatttatatacgggtatatgctaaaagtaaccttgttcagtataaagtaaagaaattaggaacagaagttaagataaatgattttaaatttaatgattttgagatttggaaacaatag

SEQ ID NO: 42578 - DNA, 624 bp, Haloplasma contractile SSD-17B
atgaactttatcgagttatatgatcgattgaaccagacgcagaaaactgaattttctcgcattgctaataaattacttgccattacattactgacaaagaagaaagaggataataaaaaggactattattttatcacaacccataaggatctgtttatagagtattttgagtatatgaactgggaagttgagattaacgaggcttacggtgtgattcatttaaacaatattcagaatacgaatcggaagaattttaatttaaacgagagtatcatcttactcgtactacgaaagatttatcagagtaagctagaggagctttccttagcagagaacgtcacgattcgtattgaggaaataaagacggaatacgatgggttaaagattcgtaataagcagctcgataagacgacattacgaaatgctgtacggttgtttaagcgctataatattgttgatccacttgatagcgactacgcgcttggtgatacgaggcttattatttatcctaccattttaatggctatcaaagtggatgatattatgaaactaaatgataaattaagaagttatgaccgtggaggtgacgatgatgaagaagttgatgaagatcaaactgattaa

SEQ ID NO: 42579 - DNA, 3255 bp, Haloplasma contractile SSD-17B
atgatgaagaagttgatgaagatcaaactgattaactggcactacctagcaaacgaaacgatcccagttgaggggaattgtttaattacaggggaaaatggagcgggtaagtcaacgattcttgatgcgattcagtatgtattaacggctggtaaacaatactttaatagtgcggctaatgataaagcgaagcgtgatttaatgggttatgtgcgttgtaaaactgggcgtgattcaaatcagtatgaacggacgggggatgtgagctctcatattgcattagaatttttagatgagaagaagaagaaatccttcatcattggagcggttattgactcatccgggaatttaagtacaccaaaggttaacttttaccgaattgaagatcagaaaatgaacgagtcactctttttacaggaaaatcatgtcccaagaacgattagcaactttaaggcaacgatcaagggtaaacaggcaaaagtcttaactactcaaaatgaagctagaaaagatttcaggcatcgtttcgggtctttaaatgatcgcttctttgaactattacctaaagcacttgcgtttaaaccgattaataagattaaagattttgtttattcgtatcttttagatgaaaaagatgttgacattgagtacttaaaagataacatccataccttgcgtgagtatgaaaagtatttaaaaattattaaacaaaaacttaccgatttagagtcgattgacaggtcttatcaagagtatctgaatatagaagaaacaattaaaattcaggactatatcattaagcgtgcttcaaaagaattaaatgaacaaaacattaataataagaagcataagctaagtactattgaaacaaaattagacttggtggggtcaaaattaaatcaaacagaaaaagagatcgaggaacgttctgaagagaaagcgaatttagatcggtcgcttgctaatgatgatacgtaccaagcgattagagagttagagaaaacaattcgaagtctaaatattgatctcgatacatataggaaaaaggaacagaaacttgattacatctttcacgaggcgttcaccacggtaaaggaaatgaatgcactagatgttaatttagcgagtatggtccccttttatgaatacaagaatgaaacaatttcagaagcaaatatgaatgacctgattaataaaacgaagtctctaagtagtgagattgacgggtttaaggatcagatgtttaataagaaggcaacattagattttaaacgcagtcaggaacaagagggattagctgtaattgaacaggatattaaatctttatctagtaagaaactggtttatccgcgttatgtaacggatttacaacaggcgattcatcaaggtttaaaacgtgaactgggtaaagatattgaacctaagattttatgtgaactgttaaatgtaaaagatgacaagtggcagaatgcaatcgagggatacctaaatacacagcggtttaacttaatcattgagccggagtatttcgatcatgctttagaaatctatgaacgtgtaaagtataagcgcaatattcatacgacgggtctcgtgaatacgaagcgcttaaagcaatacgaagagtcagacgaaaacagtctttcgtatatggtgactagtaaaaacaagcatgcgtcaaactatgttaatatgcttttaaataaagtggttcgttgtgagacggttgatgagttaaaaaaccatcgtatagctattacgccaacgtgtatggtttataaaaataagacagcaagacaaattaaagaagatgtgtacaagattccatttattggtcaagatgcttacaaaaaacaattagaacaaaagcgcgaactccgtgcagagaagttagccattttatctgactatagagataagattaatcactgtatacattgcctagatttatgtaagcggcttaatttaaattacatcattgaaaacagtgagattaaaattaacgttcaaaacacggtgaataaaatctctgaaaacgaaaagaaattaaataaaatagaccgtgcttccatgctcgatttacagattcatattgagcaggtgaataaggaattaaaagagattaagcaaaaagaaaaacaattaattaaggatctacaagatttacaggtggaagaacgtattctaaataataaacttgatgaactgaacggaaaatccagttcactaactcctgcattaaatcaagtcatcgatcagatcatttccgtgttaaataaggccgaatcacgttatcaagatgctacagaaaaatataatcatctcgaaaaactgatcgacgtttatacctcgcagcgtagtggtcagttcacacgacggacaaatgtattaaatgagttacaatcaaagcaacgcgattataaccgtgactatgactttggtgcggctcctggagtagaaggaatggatacctattatgaggagtcaaagaggctaaaggatagtaaagtaatcgaatacgaggaaaagatacgtcaatccaaaaagaaggcagaggaacagtttaaagacgaatttatttcaaagcttcaggaacacattctaatggcacaaaatgagtttaaaaaattaaacaatgctttagaaggaattttctttggtgaagatgagtataagtttgattggaagcctagtaaacaatatcgtaagttctacgatatgatcacggatgactcaaatctcggtgggaataccttattcggtggatcatttagagaacgtcataaagaggcattagacgatttattcgatcgcattagtttaaatgatgagcaatctcaaaaagcattagaagaatataccgattaccgtacttacatggattatgatattaaaatcatgcatcgtagtgggtctacgtcttcattctcaaaagtatgtcgtgaaaaaagtggtggagaaactcaaacaccatactatgtagcgattgcagcctcctttattcaactctatcacaccaatcatctaggaggcgattcaatcggaataatcctatttgatgaggcatttgataagatggatgaaaaccgcattgagagcatgatggaattcttaaacaagttagatttacaggtcatattagcagcaccccctcaaaagatagagacaattagtccctttgtaaaaacaaacttagttatttaccgtgatgaacatggatcatatgtggagccgttcttacatgaaaaattatag

SEQ ID NO: 42580 - DNA, 1200 bp, Haloplasma contractile SSD-17B
atgaaaaattataggacattcctgttaaataaattaattgatcgatatgaaaacagtaagcttttcagaggggacaaccaagttacggttcatatcgacttcaagtttaccaagcgtcatttaggggattactttaatgagacacgttatgagcttaaagatgaaataggcgaagtctgcaaaaatttagagtctgaagaacttatacacatcctgtggaaaaaatttgaatatggtaatatcattgataaaatacgtttaaatacagaacaagtagatgaggtatatcgaatactaaatcgtgtaaataaaaaagaacttgaacagaatatgcttaatgtactaggcgactatgtgaatcatgggtcatggatcagtgaatttgcaacgtcattagttgaacggcttagagaaggaaaaagcattcaacggtattttgatttaaatgacactgattatgctaaggaagtcctaactacgttagaagagattctcaaaccaaaagatgaagtatcaaaacgcatgtttagtattaatctattcaataattcaaagcacttcgaagaactcgaaagtaaactcattatgattatgaaagagtttggaccatataatgaggatgtagatattttatccgaagaaaacatattgaataatcctggatatatctatctaaaaggaacgggagtatttaaatgcaatcaggaaacgataaatttagacgggcttcaaggtgaaatcggactaagcactttattattgaaagaattagaaattttagaactggatgtgggtcgagtgctgactattgaaaatctggcatccttccatatgtataatcctaagaaggaattggtcatttatcttggaggttatcacaatacaatacgacgtgagtttctaaaacagattcacctgtttaatcaagtgagtgcatttgatcattggggtgacattgatctgggtggattccgtatcttgaatcacttgagaactaaaacaggtataccatttaatccttatcgaatggacctagacacgttaaaacgttatgaaacctacgcgatgacattcaatactgcttatgaaaagaaactaaaagaattactagctcaggaagcatacaagaaatttcacggtgtaattgaatatatgattgaaaaaggaattcgattagagcaggaaattgttaaaggttaa

SEQ ID NO: 42581 - DNA, 1437 bp, Salinisphaera shabanensis E1L3A
atggactacgactttcttaccaccttgcgccgtcagcacccgggctggcggctgctggccgccgaccatgggccactggtggcggcgtttctgcatcgctatttcattgagccgaaccagcggactttcgccgaggccgagctggcatcgcgactggaggattttcttttccatctgcgcgagcggttgggagatgacgcctttcccaagccggcgcgtcagtatctcaacgactgggcggcggacgaacgcgggtggctgcgcaagtattacccgcgcgacagcgacgagccccattacgatctggcgccggccacagagaaagcggtgcagtggttggtgtcgctgcaggggcagcgttttatcggcgcggagtcgcggttgctgacggtcttcgagctgctgcgcgagatcaccgagggcaccgagaccgatccaaaggcgcgcattgaagaactgacccggcgtaaagaagctatcgagcgggagatcgaggagatccaagagggccgcctgcggatgatggacgacacccggctgcgagaacgctttttgcagatgtcggacaccgcccggggcctgctggcggatttccggcaggtggagcagaactttcgcgatctggatcgccaggtgcgtgaaacagtggcggcctgggacgggagcaagggcgatatgctggcgcaggtgttcggcgaacacgatgccattaccgacaccgatcaggggcgcacctttcgtgcgttctgggattttttgatgtcgccgagtcgccaggaagagttgtccacgctgctggagcgggtgatggcactggacccggtgcgcgagctggaacccgatccgcgcctacagcgggtgcattacgattggctggaggccggcgaggcgacgttgcgtaccgtggcgcgactttccgagcagttgcgacgctatctcgacgatcaggcctggctggagaatcgccgcattatgcagttggtgcacaaggtggagcggcacgccctcgcagtgcgcgaggcaccggcccaggcaccgggcatgacggtggacgagttggcgccgtcggtaacgctgcccctggagcggcccctgtaccggccgccgttgaagccgcgcattgagcagaacgagctggccaccggcgacgccgatctggatgccggcgctttgttcgaccagttttacgtggaccgagcggcactgcgctcgcgactgcagcaggcgctgcagaaccgtgaccagatcagcctggcggcgttgctggagcacagtcccctggaacgcggcctggcggaactggtgacttggctggcgctggccgccgacgatccaagcgcgttgatcgacgaggccggcgagtgtgaggtgagctggcgcgacgatcatggcatggtgcgccgcgccaccgttcccgatgtgctgttcagccggtga

SEQ ID NO: 42582 - DNA, 591 bp, Salinisphaera shabanensis E1L3A
atgagtgaaagtgatatcgataccgcctccgatctgtcgcccctgttgattcgcctgctcaagggcgtgctctatcgcgaccagcaggaagcgctgtggcaatccctgctgacgcttcagggccgggttcgcgattacgtcacggtgctgggcctggaactggtgctggacgaggccgaaggctacgcctacctgcgccaaacggcgcgcggcgacgacgagcagggcccgccgcggctggtgccgcgccgccagctctcctatccggtcagcctgttgctggcgctgctgcgcaagaagctcgccgagcacgacgccagcggcggcgacccgcgcctcattctgacccaggcgcagatcgtggaactggtgcggctgttcctaccagacaccgccaacgaggcgaaactggtggatcgcgtgcagggcgatatcaacaaggtgatcgaactgggctttctgcggcggctgcgcggacagaacgaccgctatgaagtgcgccgcatcctgcagtcgttcgtcgacgcccaatggctcggggagttcgaacagcgcctccaggaatatcgggagcatgccgatgcacaatga

SEQ ID NO: 42583 - DNA, 3384 bp, Salinisphaera shabanensis E1L3A
atgcacaatgagacgctgggattggatttcgcggattccaacgagcaggccggctttcgcctacaacggctggaggtgttcaactggggcaccttcgaccgccaggtttgggcgctggatccgcggggcgacaacagcctactcaccggcgatatcggctcgggaaagtccaccctggtggacgcggttaccaccctgctggtgccggcgcagcgaatcacctacaacaaggccgccggtgccgagagcaaggagcgctcgctgcgctcttacgttctaggctactacaaggccgagcgcggtgaggccgggctctctgccaaggccgtggcactgcgcgatcacaacagctactcggtgattctcggccacttccacaatgccggttacgatcaggacgtgacgctggcccaggtgttctggatcaaggacagcgccggccagccggagcgtttctacatggtagccgaccgcgcactcaccctggccggtgacttcgccgatttcggcagcgatatcgccgacctgaaaaagcgtttgagaaaacaaaccggcgtcgaagtgttcgacgctttccccgcttacggcgccgcctttcgccgccgttttggaatcgacaatgaacaggccatggagctgttcaaccagaccgtctccatgaagtcggtggataacatcacccgcttcgtgcgcgatcatatgctggagccgttcccggtgggcgagcgcatcgaagcgttgatccgccacttcgacgatctcaaccgcgcccacgaggcggtgctcaaggcgcgcctgcgcatcgagatgctcgaaccactggtagccgatctggaccgtcacgacgagcgtgaacggcaggtggcggacctgcggcaaagccgcgaggcattgcggccctggtacgccagtttgaaaatggatttgctggacaagcgcttggagaatctggccgtcgaagcgcaacgcctggcccagcggcgctccgccctggatggccagcgccgcgatcagcaggcgcgccgcgacgagctgcgccagtccatcgccgacaacggcggcgaccggctgcaacgattgaaaacggagatacaggactgtcagcggcaaaaacagcatcgccagcacaaggcgcaacaataccgcgaactgacccgggcgctgtcgctgcccgacgccgatacgcttgatatcttcgtcgacaaccgccgccagcgcgaaaagcgccaggaagcgttgcaggaacagcgagcccagctgcagaaccacatcaacgaagccggcgccaaactgcatgccctgaatgggcagcacggcgagctggaaaccgagctcgcctcactgcgccaacggcgctccaatatcccaggtcgcgtgctggcgattcgcgaggctttgtgcgccgcattgcaactcgacgaagacgatgtccccttcgtcggtgagttgctgcaggtccccgccgaggagcgcgactgggaaggtgccatcgagcgtctgctgcacaacttcggcctgtcactgttggtgccggacgccttgtacgagcgagtcgccgactgggtcgaccgcacgcatctgcgcggcaggctggtgtacttccgggtccgcgactcgcgtggcgcggtgtcatcggcggcgccggagtcgctggtgcacaagctgcgcatccagccggacagcgctttttacccgtggctggagcgggaattggtacggcgtttcgattacgtctgttgcgaggatatgacccgcttccgccgggagcagcgcgccatcacccgcacagggcagatcaaggcgccgggcgggcgccacgagaaagacgaccgtcaccgcatcgacgacgccagccgctacgtgctgggatgggacaaccaggccaagattcgtgccctggaagcggaggccgaatccctggcccggcgcggtcgggagctcgccaagcacatccagggctgggaaaacgagcgcaagggcttggaagatgccctgggcatgctgggccaactggccatgttcggcgacttcgaggagctggattggaagccgttagctcggcaactggagcagttggaaaacgagcgcctggctctggaggccgccaacgatctactgcgggagctggaaagccagctcaagacactcgaaggcagtctcaacgaaaccgaggaggcgcggtcagccctgggccaggacgaaggcgccaaccgcaccaagaccgaaaccgccaccgcccagcgcgaggaaagcgccgccctgctcgccgaagccgacgaggcccagcgcgcctgcttcgagaccctcgcgggctaccgcgaagaagcgctggccgggcgcacgctgacagtggaatcctgcgacaaccagcaaagcgaactgcgcgactggctgcaaaagcagatcgaccagcatgacaagcagctcaaggcactaagcgagcgcatcgtcagcgccatgcagcgccaccagcacgcattcccgctggaaagccgcgaggtggatgccaccctggccgccggcggcgaataccgcgccatgctggacgcgttgcagcgcgacgacctgccgcgcttcgaacgccgtttcaaggagctgctcaacgagaacaccatccgcgaggtggcagcgtttcagggccagctacacaaggaacgccaggcgatccgcgagcgtatcgccatcatcaaccgttcgctcaaaggcatcgactacaacccgggccgctacatcaccctgctggcggaacccaccggcgaccaggaagtacgcgacttccagcaggagttgcgtgcctgtaccgagggcgccctcagcggcaacgaggaagaacagtacaccgagcagaaattcctgcaggtgaaacgcatcatcgaacgcttccgcggccgcgagggcaccggcgagctggacaagcgctggacccagaaagtaaccgacgtgcgcaactggttcgtgttttccgcctcggaacgctggcgcgaggacgaccgcgaatacgagcactattccgattccggcggcaaatccggcggccagaaggagaagctggcctacaccgtgctcgccgccagtctcgcctaccagttcggcctggaatggggcgagcagcgctcacgctcattccgcttcgtggtcatcgacgaggccttcggccgcggttccgacgaatccgcccgctacgggctggagctgttcaagcggttaaatctgcaactcttgatcgtcaccccgctgcagaagattcacatcatcgagccctatgtgcacagcgtcggtttcgtgcacaaccgcgagggccgcgaatctctgttgcgcaatctcagcattgaggagtaccaggcggaaaaaaccgcccgtgaacggattcgtatgcagccatga

SEQ ID NO: 42584 - DNA, 1206 bp, Salinisphaera shabanensis E1L3A
atgaactggacgtcaccggccgacctgaaacagcagctggacaagtactggcggcgcggcgacatcctgcgcgcgcgcctggacggcgatgcgctgttccccgtgactctgcgactgcgcaagcccagcgcccgggatctcaccgaacgcttcgcggatgtcgccgactgggtgcgcaccctgcgcgagggcgcgaaagacagcaaaggctttggctacacggtgcactggcgacagcgccgccaccgggtgcagggcgccaacgacttgcccgacgtcatcaccgtggatacggaagacgacgccctgcgctggctcggccatcgtgacgatgcggcacgctttacccgcctcgccgagcgcaccctgacgcccttccccgccttgcgcgactggctgcgtcagcgcccgctgcgtgcgctcgaacacgcgccacactgggacgacctgctcgccgtgctggcctggttccaggcccatccgcgacccggcgtctacctgcgcgaactggacatcccgggcattcacaccaagttcatcgagacccatcgcggcctgctcgccgaactgctcgacgccgtcctgccagccggcgctatcgatacaggtgccaccggggtccgcggcttcaaccgccgctacgggttacgcgacaagccgccgcgattgcgtttgcggctgctggacgagcggctggcgattcaggggctcaccgacctggcgctgccggtggcgcagctcgcccgcctggacgtgggggcgaataccgtcttcatcaccgaaaacgaaatcaacggcctggcgtttccggcattccccaacgcgctggtgatcttcggcctgggctatcgggtcgaggcgctgcgccgtctcccctggctggctgacaaacgcctctactactggggcgatatcgacacccacggcttcgccatcctgaaccgcttccgtcgcgcttttccgcacgcccgctcactgctgatggaccaggccacgctcgaggcgcaccgaccggtctggggccaggaggctgcggacaagcgcttcaccgggctactggaccacctgacggaagacgaagccgcgctgttccaggcactccgcgacgatcaccgtgcgcccgcgctacgcctggagcaggagcatatcgcccagcgctggttgctggaggcactggctcacatcgacgacctctacgaacgctga

SEQ ID NO: 42585 - DNA, 1443 bp, Leptospira noguchii str. 2006001870
ttgcaaagattatttcgttcttcttcaattcgtcttttaaaaaaagacaatgctccttttattatctattttttagaaaaatattttagaggttctgcgagaatttttgttccgtttgaggaactgaaaatactactccatcatgaattggaaaactttcgagaactcgaggaaacttttctctcaagaacagcggaagtttatataggagagtgggtcagcgaaaattttctatctcgtcggattcgttctttggaaggttcagaagaaataattttggaaccgagtagcgagttagaaaaagtattttcttggatggatgatttacgttctttagaaaataaagaatcaatcggaacagaaactcgatttttttctgtgttaaataaactgaaggaaattgttgaagaaagtgtttccgatccaaaagaaaaaattagacaacttgaatctaaaaaagacgaattagacgatcaaattaaaaagctaaccgaagggaaagagataatcacttttgcgagtgagagaattcgaggccaatacttatatgcaaggaaagaagcaataggtcttctctccgacttccgtcaggtggaaggtaattttacggaaataacaaaattcattcacaaaaagtatttagaagtcgttcaaaaaggggaaatattacaatttgctctcgacggtgacgaggaattgctccaatcagaacaaggtaaaagttttcaagctttctgggactttctcaggtccgaacaaagccaagaaaattttgaaagtatattagattctctttattcattaaaagacatccttgtcttggacgacagaaagttttttcgaaatttcaaacggaatctaagagaggccggatccaggataaacgctgttgtttccagaatgtcggaacaacttaagaaaagtcttgtagagcgtacacttcgcgacaatcgaaggtctaaagcaattatttcggaaatcaaacatcttgttttggaaagaaagttcgatctttcggaagaaaacttttattcaatggaagaaatattcgttcatcttccgatggacaggcccctttggaaaggggattctgcggatactccaagatccattcaaatatccgggcctgacgacgaaatgatttctctagattttttagactcgattcgaggaatcaattttgaaatatacgaacaacgaattcaaacattgcttcgtagttttccagaagtttctctagaaaaagtgttggaggagtttccagagaatatcgggtttgaaagtatcgtagcatatgtttttatagctagcaagggggaatatcattctttggacgattcagaatcttttcttttttatcccgcgttcaattttacacaaaaagaaactcagagtgtctatcgtgttcccaaagctacttatagagtgggtaaggatggataa

SEQ ID NO: 42586 - DNA, 564 bp, Leptospira noguchii str. 2006001870
atggataaacttctttcttattctatttccatattaaggcttttgaaaggttcaatcgggatcgattcggaccctaaggtttgggaaaatctagttacctacgaaaaacaagttcgggaatactttgaaaaaatcggaatatttttacatttagatcgagaagacggttatgcttttttgcgtcaaacttcggacgaagatgatgttgagttcgatataaaacttccggttttaacgaggaagctacctttgacaaaggaggaaaccttgtttcttattttactcagagaatttattatcgagatggaagaaaaagatttatccggatcgattattctgagaaaagaagaattattcgaccgtattcatccattttttcctgactctttcgacgaagtcgatactcaaaaaaagtttgaaagattacttcgtaaatccgaggacctgggttttataaaatacatcgattctgaaaccttacgaatagaaaaaattttaaaagcgaagatcacagtatccgatttggaacgactacgaattaagtttaaaccggagaatgtatga

SEQ ID NO: 42587 - DNA, 3357 bp, Leptospira noguchii str. 2006001870
atgacggatttattttcttccggcgagattactgcaaatacaggatatagattaaagtatcttgaaattctaaattgggggaccttcaacggtaaaatctggaaattgaattcgcaaggagaaacttttcttttaacgggagcaaacggatccggaaaatcgactttggtggatgcaatccttaccttactggttccctctactaaaagaaattataatttagcctcgggcttggagagtaaaaaacgggatagatcagaaaaatcctatgtggaaggacactatggccgagcttcctcaggcagcgagggaatccttaaaatccgaggaaaacaggaagaatgttattccgttctttcagccgttttcaacgctaaaggaaaatttcctattatcagaattgctcaaattttttggtttgaatccagcgacttaaaaagaatttatctcatttccgacgatagcttggatttcgaaaaagatttggttttaagaaatagaaccatcaaggaactccgatctgatctaaaaaattcgggcgccaggctttatgataatttcaaggcttacggggttgactttagaaagatggtcggtctgggatctgagaaggcgattgatctctttaatcaaattgtagctataaaatcattaggtgttttgaatgaatttgttcgagaacatatgctcgaagcgaaagacaaaagatttagaatcgaagaattggacaggaattttttcgatttgaatgaaacatatgaaacgattctaagtgccagagaacaattacgactcctggagcctatagaaaaaaaagcattcgaatacagggattggaactctaaagtagaaggggttcaggaacttattttgtttgcacccgaatactttacgcaaaaaaaatacgaactttgtaaaaagaaagaacaggattatactctcgatttgttccgagttcaggaccacttaaaagaattaaattcgttaactgaatccttaaaaaaagaagaacgagaattgtattattcattagaaaataatgatactcgaaagcgaatttccgatttgaaaagaaaatttgaggaaattcagacaaatctaaataaacgtcgttccgaaaggaaaaaatattccgagtatcttcttaaacttgatttagagaacgttttaatagaggattctttttattcgaattttcgtaaagccggcgaaaaacttcaaaaatccgattcgacccgtgattcaattagagatcgtcttacggatttaacagttaaacggaaggaatctaaagttgaatttgattcggtttattccgaattggaacatctcaaaaaaagcagggataatcttcctagaatcgtgtcctccatgagggaaaaaatctctcaaggcctgggagtttccgaaaaaaaatttccatttgtctgtgaacttatccgtgtaaaggattccgagaaagaatggaccggcgcgttggaaagattattacataatttcggcttacgtatgttagttgacgaagaggattacaaagcgctttcctcttatgtgaattcttctcatctaggtggaaagatcgttttttccagaatgttgactcaaggaggtcctattttacagccaaaagataaggacgaagttttttacaaactcgaaattaaaccttccttatctaaatttcaaaaagaatggctggaaacacagattctgaaggaatttggacatatctgcggggatctacaacgtttgcaaaaagaagaaaaagctcttactaaggaaggtctgatcaagtccggaaaaattcgtcacgaaaaggatgatcgtaaaaatataaacgacgcaagagattatattctaggctggaacaatcgggaaaaaatttctgcgcttgaatccgaatttatgagattgggcaaggtgatcgataagattgaatcggaaattaaaaaagttgaagaagaacaaaaacaaaacgacctatttagagacgacctcaaatcctttctacgcttcgaacagttctctcaaattgacgaccaaagtttggaagaacctcttgaacaaacacgaaaagaaatccaagatttggaagtcctttccgaggaatacggaaaattaaaagaacaatatgaatctgcaaaagttcgccttagcgaggcagagggcaaggaaaaagaaaccaccaaggaattgaccctcttagaagagcggttctcgaatttaaaaaaagaaatggaaaccttaaattccagaatcaaagagttcgaccctaacagacggactcgtttggaaccgatcttaaatgagcgtctcggacaagtaatctttaacttagattcgatcttagaaaaagagcgaaagtttttggaagttcttattaaagaacgggatgattttatagagaaaagagattctatcggtgaagaattaaacaagggtatggatcgttatgtaaaaaaatttagggaagaagcggatcgagaagaattatcggtttctattttaaatgcagaagcatttgcagaattgacggaacggattcgtaaagataggctgcctgagttccaagataaattccgaaatatgatgtcagataaggtagctaaacaaattctagagtttaaggcggaacttgaggatgatgtttcagaaatcaaggaccggatagatgaactaaatgaatctttacgttatcttgactattctaaaggtaaatcttatattcaaatcagatacttcgaaacaaaagatcgggaaattataggaagtacaggttttaaagaattattgcggaatagtattccggatatgggagatagttctaataacgaagaaaatttttcaaggattcgagaattactcgggaaattgaaaggagagaatggatccgatcgttggtccaggctcgtaacggattctagaaattggttggactttcaggcggcagaatttcaaagagacacagacacgatcattcaggtttatgattcttcggcaggtaagtcgggtggtcaaactgtaaaacttgcctatacaatccttgcctctgcgattgcttatcagtttaaaatccgcgaactaaattcgtttcgttttgtagtgatcgacgaaatgtttaataatttggataacgaaaattctagatacgcgatggatcttttccgtcaattaggtttgcaattactcgttgtgaccccgatggataaaattacggtagtggaaccttacgtccagagtgttcattttgtaaaaaacaactcagatggtaatgattccagagtttatctaattacaaaggaaaaattaaattcggagaaaatcgaaaatacagatcggaaagtgggaaatttatga

SEQ ID NO: 42588 - DNA, 1170 bp, Leptospira noguchii str. 2006001870
atgatttctctggaagaaatccgtaagaaatgtttattatattatcataaagttttaaatcgagcagtcttaggtgagaagtcttttccttgggaaatttccacaggcaaaatagatcccgaagagataatacacaacccgtctttactagaaaaaataaaaaaggaatctaaggaaaaaaaaggatttgggtttctgctcgtttcttttcaaaaagaaacgagaaaatttggaacgcaaactctaccttcgaaaattcgattcgaagacgaaattgactttttacgttttttgcataaagaacaagaattttctttctacaaatcagattgtgatatgattttatttaaaattcccgcacttatggaatggatattaaaaaatccttttctagtcattcaagaatctgggaattgggaagacctactttcggtgtgttcctactttttaaaaaatccgagacctggattatacatccgtgaattgccgatctctgttcctacaaaatttatcgaagaaaataaaaaagtactcaggaatcttttagattttttggttccggaaaatattgattacgaaggaaaagatttcgaatctcgattcggattgaaaaaaccggaagccttggttcgtttccgtatattggatccgatcattgccgagaaatctagcggcggtttattcgatataagtgttcccgttgatgaattccgtaatttgcatctatttggttgtaaacgaatttttattctggagaataaaatcaatttttctaatatcgatcattttctaacttttccgaaactttcgggatcaatcgccattttcggacagggatacggtttaggtattttgaaagattgcgtttggctgaataaaatggaaatcttatattggggggatatagatgtccaggggtttgagattctttctttattaagggagcaatacccccaaaccaaatcctttttgatggataaagaaacttttttaaagtttcagaattttgccgtcgacggtaaatattcaaaattttctaaattagattatttgacagaatctgaaaaggagacttgggaatatctacggtctctgggttcgaaaaatcgtttggaacaagagcgtattcctcaagaatatattgaaaaaactttacattcgcagttttga

SEQ ID NO: 42589 - DNA, 1452 bp, Leptospira santarosai str. 2000027870
atggactataaacttttgcaaagattgtttcgttcttccgcaatccgtcttctgcgaaaagacaacgccccctttatcatctactttttggaaaaatattttagaagttctgcacgtactttcgttccgttcgaggagctgaaaattctacttcgttacgaattggaaaacttaaacgatcaggaagagatctccttacaaagaagcgcggacgtttatctgggagaatggattggagaaaattttctgacccggaggatacgatccgcggagggaatcgaagagatcatattggaaccctcggtcgaattggaaaaagtattctcctggatggaagacatacgatccttggaagataaggacgtgatcggcacggaatcccgttttttttccgtattaaataaattgaaagagattgtggaagagagcgtttccgatccggaggagaaaattcgacaattggaattcaagcgggacgaattggatcttcaaattcgaaaactcaaggcgggagaacaagtatccaaatttccgagcgaaagaattcggagccaatatgtgtatgcgcgaaaggaagcgttgggattactttcggatttccgacaagtggaaggtaattttatggaaataacgaagatgatccataaaaaatatctggaagtcgttcagaaaggggaaattttacgatttgctttggacgggaacgacgagttacttcgatcggaacagggtcgtagtttccaaaccttttgggattttttacgatccgaacgaagtcaggaacaattcgaaagtatattagattctttgtattcattggaagacgttttggagctggactcgagaaagtttttccggaattttaggagaaatttaagagaagcgggttctcgggtaaacggagttgttacccgtatgtcggaacagctcaaaaaaagtttggtggaacgtacacttcgtgaaaaccgcagatcgaaagaacttatcgcggaaattaagaatttggtcttggagaatccactcgatttctctcagacggatttttattctttggaggaaatggatgttcgttttccgatggaaaggcctctttggcgcggcgatccggaggagacgtttcgaaccgtccggatcgaaaatgcggatgaggatggaaatgtattcgatattctggaatcgatccgaggaatcgatttggaaatgtacgaacaacggatccaaacgttgcttcgtatttctccggaggtttctttggaaaaggttctgcgggaatatccggacgacgtctgctttgaaagtttagtcgcttatgtttggattgcgggtaacggagaatttcattccttggacgattcggaaacctttgtatattccgtttccataatgaatcatccttcggaaaaacttgcgtatcgaattcctaagggaacgtatagagtgggccatttatga

SEQ ID NO: 42590 - DNA, 564 bp, Leptospira santarosai str. 2000027870
atgaataaaccgtatgactatgcaccttccattcttagattgttgaaaggatcgatcaacagcgagtccgatgcaaagatttggaagaatcttttggacaacgaaaaatcggtgcgggaacactttgaaaaactgggtatttttttgcacttggatcgggaagacggttatgcgtttctacgacagacttcggacgacgaaagtgcagaatcggatgagaaacttcccgtgatcacccgtaaacttccgcttacgaaagaagagactttgtttctaattctactgagggaatgtatcatagaaatcgaagaaaaagatccttccggttccatcctttttagaaaggaagagctatcggataaagtgagtccttttttctccgacctctccgatgaaatcgatcggcaaaaaagattcgaaaaattacttcgcaaatccgaagaactaggctttgtcaaacagatcgagccggaaacgattcggattgaaagactcttaaaggcgaaattgaccgtatccgagttagagggtttacgcggtaagtttcgactaggaacggaatag

SEQ ID NO: 42591 - DNA, 3357 bp, Leptospira santarosai str. 2000027870
atgactgatttattttcacccggtgaaattgccgccaataccggatatagacttgaattcttagaaattttaaattggggaacttttcacggtaggatttggaaattacgaccggaaggggaaaactttcttttaaccggcgcgaacggttccggcaaatcaacgttagtcgacgcgattcttacgctgctcgttccggccgcaaaacgaaattataatctggcttcgggactggaaagtaaaaagagagatcgatcggaacgatcttatgtggaaggtcactacggtagatcctcttccggtagcgaaggaattttgaaaattcgcgggaaacaagaagagtgttattccgttttatcggcggtattcgaagcgaatggaaggttcccgcgaattcggattgcgcagatcttttggttcgaatccggagaattgaaaaaaatctaccttttttccgataaagagttggacttcgaaaaagatctggttttgggaaaaagaaccgtaaaggaattgaaagcggatctgaaaaattccggggcaagactttacgatcagttcaaggcgtataacgtggattttaggaaagcggtgggtttggaatcggagaaagcgatcgacctattcaatcaaatcgtagccatcaaatccttaggagtgttgaacgaattcgtccgagaacatatgctcgagtccaaggataaaagatccaggatcgaggaattgaatcgtaatttttccgatctgagcgaaacatacgaggcgattgtaaacgcaaaagaacagttgaagttgttggaaccgatcgaaaaaaaagccgccgagtatagggaatggaatcggaaggcggccgatcttcaggctttgatcgtatatgttccgtattattttgcggaaaaaaattacgagcttcgtcaaatcagagaacaggattatctttttgaattatcgcgtttgaaagacagatccaacgaactatcgactgaaatcgaatccttaaatcaagaggaacggaagttattcaacgcattagaaaacaatgatactcaaaggagaatcgccgatcttgtacgaaaacgggaggacattctctccgatctcaaaacgcggggaatcgaaaggaaaaaatattcctcctatctttccaaaatcggtttggaggaagcgttctccgaagaaacattctatacgaacctgcgcatagccggaggaatgcttacggaaaccgattcgatttgggaagaaatcagggatcgattgggaaagttgacgcttcaaaaaatggaattgcaaaaaaatttcgattcggtttgttccgaattggagtatctgaaaaaaaagcgggataatcttcccagaacccagtcggaaattcgggcaaaaattgcctccggaatcggactttccgaaaaaagatttccctttatttgcgaattgatccgcgtcaaagaatccgaaaaagaatggacgggggctttggaaaggctcttgagaaatttcggcttacggatgttagtcgcggaagaggactacgaggccgtgtcggcttacgtgaattcttcctatctgggagggaagttggttttttcaagaatggttcctttatcgggaccgatcttgcaacccaaagacaaggaagaagttttctacaagttggaattgaaatcggaattgtcgaacgtaaagaaagaatggttggaagcgcagatactgcgcgagttcggacatatctgcggggatctgaatcgtcttcggaaagaggagaaggctcttacaaaagaaggtctgattaagtccggtagaattcgacacgagaaggacgatcgtaagagcatttcggacgcaagagattatattttaggctggaacaatacggagaaaatcgccgcgttggaatccgaatttgcccttctcgggcagaacattgatcggctgaatgctgcaatcgacctgatcagagaagaggaaaacaaaaacaaaaacaaacgggacgacctgcttctctttctacgtttcgaacaattttcacaaattgacgacgaaagtttgaaaggtccgcttcaggatacggaaagacaaatccgggaattggaattgcgttccgaagaatacgggaagttgaaggaacaatacgaactcgcaaaagctcgcctaacggatgttcaaggaagacaacgggaaaccgccaaggaattcaatgttttagaggataggcttttcactcttcggaaggacatggaagatctacagcagagggtccgaaaagtcgaccgggaaacgtcgatttcactggagccgattctcaacgaacgactgcgggaaacgatcctaaccctggagtcgatcgcggagacggaacggaatttttcggatcgtttggttgtagagcgcgatcaatatttggagaaacgagattcgatcggagaagaattgaacaaaggaatggatcgttatgtgaaacgattccgagaggaggcggatcgggaagaattgtccgtttcggtttccaacgcggaagggtttgcgaaattgaccgaaaggattcggcaggatcgattgcccgaatttcaggaaaaatttcgaacgatgatgtccgacaaagtcgcaaagcagattttggacttcaaggcggaattggacgacgacgtctcggaaatcaaggaaaggatcgacgaactgaacgattcgttaaaagatctggattattctaaaggaaaatcttatattcaaattcgatattttgataccaaggatcgggagattgtgggtgattccggctttaaggaaatgttacgcggaagcattccggatttgggagacagttctcacaacgaggaaaaattcgctaaaatcagagagttgttgaaaaagttaaagggagagggcggtagcgatcgttggtccagactcgtaacggatcccaggaactggctggatttccaagcggcggaattccttagggataacaaccaaattcttcaggtttacgattcgtccgcgggtaagtcgggaggacaaacggtaaaactcgcttacacgattctcgcttcggcgatcgcttatcaattcaaaattcgtgaacggaattcgtttcgttttgtggtgatcgatgaaatgttcaacaatctggacggagagaattcaagatatgcgttgaacctctttcgtcaattgggtttacaattgcttgtcgtaactccgatggataagattacgatcgtcgaaccttatgtgagaagcgttcattttgtgaagaacaattcggaaggaaacgattccagagtgtatccgatttcgaaggaaaatgtatcgtccgggaaggatgaaaattcggaaaggaaagtgggaaatttatag

SEQ ID NO: 42592 - DNA, 1179 bp, Leptospira santarosai str. 2000027870
atgatttctccggaaattttacgcaagagatcgctggcatactatcataacgaactcttacgttctatcgtcctaggaggtgttttatttccttgggagatttcgatcggtaaagttcttccggaagagatcttaaaaaatccctctttgttacgagaattacgggccgaatcgaaagaaaacaaaggtttcggatttagaatcgtctttcgttcgaaagagacccggaaatacggaatacaaacgattcctacgaaaatcgtttttgataccgaagacgattttttgcgttttacaaaaaagaaagacgaattcctctcctatagcaccgattgtacgttgattctttccgttcttcccgagctgaaagattggattttaaaaaatacgttatccgtaatcgaagagtccggtaaatgggaaagtattctttcggtctgttcctattttttagaatataggaatcccggattgtatatccgagaactaccgattcgaattcctacgaaattcatcgaggaaaataaaaaggttttgagaagtcttttggattttctattgcctgagatcgcggatgcgaaggatttcgaaactcgttacggattaaaaaaagcggaacctttggttcgatttcgaattttggatctcgaaattgcaaagtcttccaccggaggtttaacggatttgagcattcccgtccgggattttagaaagttggagctctccggttgtggaagggtttttatcttggaaaataaaacgaatttcgcgaacctattcaattttttaagttttccgcaactgaagggaacgatctccattttcggtcagggtttcggattaaacgttttaaaggattgtaactggttggagaaaatggaaattttttattggggagatctggacgttcagggtttcgaaatcctgtcgcaactacgggaacaatatcctcaaagccgttcctttttaatggacctgaagacatttgttcggtttcgagactttgcggtagacggtatttcttcttctaaatcttccgaaccgaaatttctcactccatcggagcgcgaaacttggaagtatttaagttctttagattcgaaaaatcggttggaacaggagaaaattcctcacgaatacgtgcaagaagttctgtccggtttgggtggatcgcagtaa

SEQ ID NO: 42593 - DNA, 1452 bp, Leptospira santarosai str. 2000030832
atggactataaacttttgcaaagattgcttcgttcttccgcaatccgtcttttgcgaaaagacaacgccccctttatcatctactttttggaaaaatattttagaagttctgcacgtactttcgttccgttcgaggagctgaaaattctacttcgttacgaattggaaaacttaaacgatcaggaagagatctccttacaaagaagcgcggacgtttatctgggagaatggattggagaaaattttctgacccggaggatacgatccgcggagggaatcgaagagatcatattggaaccctcggtcgaattggaaaaagtattctcctggatggaagacatacgatccttggaagataaggacgtgatcggcacggaatcccgttttttttccgtattaaataaattgaaagagattgtggaagagagcgtttccgatccggaagagaaaattcgacaattggaattcaagcgggacgaattggatcttcaaattcgaaaactcaaggcgggagaacaagtatccaaatttccgagcgaaagaattcggagccaatatgtgtatgcgcgaaaggaagcgttgggattactttcggatttccgacaagtggaaggtaattttatggaaataacgaagatgatccataaaaaatatctggaggtcgttcagaaaggggaaattttacgatttgctttggacgggaacgacgagttacttcgatcggaacagggtcgtagtttccaaaccttttgggattttttacgatccgaacgaagtcaggaacaattcgaaagtatattagattctttgtattcactggaagacgttttggagctggactcgagaaagtttttccggaattttaggagaaatttaagagaagcgggttctcgggtaaacggagttgttacccgtatgtcggaacagctcaaaaaaagtttggtggaacgtactcttcgtgaaaaccgcagatcgaaagaacttatcgcggaaattaagaatttggtcttggagaatccactcgatttttctcagacggatttttattctttggaggaaatggatgtgcgttttccgatggaaaggcctctttggcgcggcgatccggaggagacgtttcgaaccgtccggatcgaaaatacggatgaggatggaaacgtattcgatattctggaatcgatccgaggaatcgatttggaaatgtacgaacaacggatccaaacgttgcttcgtatttctccggaggtttctttggaaaaggttctgcgggaatatccggacgacgtctgctttgaaagtttagtcgcttatgtttggattgcgggtaacggagaatttcattccttggacgattcggaaacctttgtatattccgtttccataatggatcatccttcggaaaaacttgcgtatcgaattcctaagggaacgtatagagtgggccatttatga

SEQ ID NO: 42594 - DNA, 564 bp, Leptospira santarosai str. 2000030832
atgaataaaccgtatgactatgcaccttccattcttagattgttgaaaggatcgatcaacagcgagtccgatgcaaagatttggaagaatcttttggacaacgaaaaaccggtgcgggaacactttgaaaaactgggcatttttttgcacttggatcgggaagacggttatgcgtttctacgacagacttcggacgacgaaagtgcagaatcggatgagaaacttcccgtgatcacccgtaaacttccgcttacgaaagaagagactttgtttctaattctactgagggaatgtatcatagaaatcgaagaaaaagatccttccggttccatcctttttagaaaggaagagctatcggataaagtgagtccttttttctccgacctctccgatgaaattgatcggcaaaaaagattcgaaaaattacttcgcaaatccgaagaactaggctttgtcaaacagatcgagccggaaacgattcggattgaaagactcttaaaggcgaaattgaccgtatccgagttagagggtttacgcggtaagtttcgactaggaacggaatag

SEQ ID NO: 42595 - DNA, 3357 bp, Leptospira santarosai str. 2000030832
atgactgatttattttcacccggtgaaattgccgccaataccggatatagacttgaattcttggaaattttaaattggggaacttttcacggtaggatttggaaattacgaccggaaggggaaaactttcttttaaccggagcgaacggttccggcaaatccacgttagtcgacgcgattcttacgctgctcgttccggccgcaaaacgaaattataatctggcttcgggactggaaagtaaaaagagagatcgatcggaacgatcttatgtggaaggtcactacggtagatcctcttccggtagcgaaggaattttgaaaattcgcgggaaacaagaagagtgttattccgttttatcggcggtattcgaagcgaatggaaggttcccgcgaattcggattgcgcagatcttttggttcgaatccggagaattgaaaaagatctatcttttttccgataaagagttggacttcgaaaaagatctggttttgggaaaaagaaccgtaaaggaattgaaagcggatctgaaaaattccggggcaagactttacgatcagttcaaggcgtataacgtggattttaggaaagcggtgggtttggaatcggagaaagcgatcgacctattcaatcaaatcgtagccatcaaatccttaggagtgttgaacgaattcgtccgagaacatatgctcgagtccaaggataaaagatccaggatcgaggaattgaatcgtaatttttccgatctgagcgaaacatacgaggcgattgtaaacgcaaaagaacagttgaagttgttggaaccgatcgaaaaaaaagccgccgagtatagggaatggaatcggaaggcggccgatcttcaggctttgatcgtatatgttccgtattattttgcggaaaaaaattacgagcttcgtcaaatcagagaacaggattatctttttgaattatcgcgtttgaaagacagatccgacgaactatcgactgaaatcgaatccttaaatcaagaggaacggaagttattcaacgcattagaaaacaatgatactcaaaggagaatcgccgatcttgtacgaaaacgggaggggattctctccgatctcaaaacgcggggaatcgaaaggaaaaaatattcctcctatctttccaaaatcggtttggaggaagcgttctccgaagaaacattctatacgaacctgcgcatagccggaggaatgcttacggaaaccgattcgatttgggaagaaatcagggatcgatcgggaaagctgacgcttcaaaaaatggaattgcaaaagaatttcgattcggttcgttccgaattggagtatctgaaaaaaaagcgggataatcttcccagaacccagtcggaaattcgggcaaaaattgcctccggaatcggactttccgaaaaaagatttccctttatttgcgaattgatccgcgtcaaggaatccgaaaaagaatggaccggggctttggaaaggctcttgagaaatttcggcttacggatgttagtcgcggaagaggactacgaggccgtgtcggcttacgtgaattcttcctatctgggagggaagttggttttttcaagaatggttcctttatcgggaccgatcttgcaacccaaagacaaggaagaagttttctacaaattggaattgaaatcggaattgtcgaatgtaaagaaagaatggttggaagcgcagatactgcgcgagttcggacatatctgcggggatctgaatcgtctccggaaagaggagaaggctcttacaaaagaaggtctgattaagtccggtagaattcgacacgagaaggacgatcgtaaaaacatttcggacgcaagagattatattttaggctggaacaatacggagaaaatcgccgcgttggaatccgaatttgcccttctcgggcagaacatttatcggctgaatgctgcaatcgacctagtcagagaagaggaaaacaaaaacaaaaacaaacgggacgacctgcttctttttctacgtttcgaacaattttcacaaatcgacgacgaaagtttgaaaggcccgcttcaggatacggaaagacaaatccgggaattggaattgcgttccgaagaatacgggaagttgaaggaacaatacgaactcgcaaaagtccgcctaacggatgttcaaggaagacaacgggaaaccgccaaggaattcaacgttttagaggataggcttttcactcttcggaaggaaatggaagatctccggcagaggatccgaaaagtcgaccgggaaacgtcgatttcactggagccgattctcaaagaacgactgcgggaaacgatcctaaccctggagtcgatcgcggagacggaacggaatttttcggatcgtttggttgtagagcgcgatcaatatttagaaaaacgagattcgatcggagaggaattgaacaaaggaatggatcgttatgtgaaacgattccgagaggaggcggatcgggaagaattgtccgtttcggtttccaacgcggaagggtttgcgaaattaaccgaaaggattcggcaggatcgattgcccgaatttcaggaaaaatttcgaacgatgatgtccgacaaagtcgcaaaacagattttggacttcaaggcggaattggacgacgacgtctcggaaatcaaggaaaggatcgacgaactgaacgattcgttaaaggatctggattattctaaaggaaaatcttatattcaaattcgatactttgatacaaaagaccgcgagattgtgggagattccggttttaaggaaatgctacgcggaagtattcccgatttaggagacagttctcacaacgaggaaaaattcgctaaaatcagagagttgttgaaaaagttaaagggagagggcggtagcgatcgttggtccagactcgtaaccgatcccagaaactggctggatttccaagcggcggaattccttagggataacaaccaaattcttcaggtttacgattcgtccgcgggtaagtcgggaggacaaacggtaaaactcgcttatacgattctagcttcggcgatcgcttatcaattcaaaattcgtgaacggaattcgtttcgttttgtggtgatcgatgaaatgttcaacaatctggacggagagaattcaagatatgcgttgaacctctttcgtcaattgggtttacaattgcttgtcgtaactccgatggataagattacgatcgtcgaaccttatgtgagaagcgttcattttgtgaagaacaattcggaaggaaacgattccagagtgtatccgatttcgaaggaaaatgtatcgtccgggaaggatgaaaattcggaaaggaaagtgggaaatttatag

SEQ ID NO: 42596 - DNA, 1179 bp, Leptospira santarosai str. 2000030832
atgatttctccggaaattttacgcaagagatcgctggcatactatcataacgaactcttacgttccatcgtcctaggaggtgttttatttccttgggagatttcgatcggtaaagttcttccggaagagattttaaaaaatccgtctttgttacgagaattacgggcggaatcgaaagaaaacaaaggtttcggatttagaatcgtctttcgttcgaaagagacccggaaatacggaatacaaacgattcctacgaaaatcgtttttgataccgaagacgattttttgcgttttacaaaaaagaaagacgaattcctctcctatagcaccgattgtacgttgattctttccgttcttcccgagctgaaagattggattttaaaaaatacgttatccgtaatcgaagagtccggtaaatgggaaagtattctttcggtctgttcctattttttagaatataggaatcccggattgtatatccgagaactaccgattcgaattcctacgaaattcatcgaggaaaataaaaaggttttgagaagtcttttggattttctattgcctgagatcgcggatgcgaaggatttcgaaactcgttacggattaaaaaaagcggaacctttggttcgatttcgaattttggatctcgaaattgcaaagtcttccaccggaggtttaacggatttgagcattcccgtccgggattttagaaggttggaactctccggttgtggaagggtttttatcttggaaaataaaacgaatttcgcgaacctattcaattttttaagttttccgcaactgaagggaacgatctccattttcggtcagggtttcggattaaacgttttaaaggattgtagctggttggagaaaatggaaattttttattggggagatctggacgttcagggtttcgaaatcttgtcgcaactacgggaacaatatcctcaaagccgttcctttttaatggacctgaagacatttgttcggtttcgagactttgcggtagacggtatttcttcttctaaatcttccgaaccgaaatttctcactccatcggagcgcgaaacttggaagtatttaagttctttagattcgaaaaatcggttggaacaggagaaaatccctcacgaatacgtgcaagaagttctgtccggtttggatggatcgcagtaa

SEQ ID NO: 42597 - DNA, 1455 bp, Bacteroides sp. 2_1_56FAA
atggatatgcaagtagaagaaataacacaaatattacgagagtcaccaagcgtacgactcataaaatcaagaagtgtggatttcttcttgtcttttgtcattgaggcgtttgagggacagtcggctataatgcaggaacgcttgcacatgctactggagaaccgactggatgagcaggaaaatgcgttggtggaggataatcttgaaatgacaagactaggggagtcgaacgaacagaaagcaaaacgactcatcaaagactggacagacaagggattcttgaccaactatcagaacgaagagggagaggtgatatacgagatttcgtcgcacacaagcaaactgatggattgggtggtgagcttgaaaaaagaggattacatcggtacggaatcgaagttcaagacgctgtttgcccaactgaaggaattggtggaatactcgaacgaggaccgcgagaagcgactggaactgctccgagccaaaaaaatggagatagagcatcagattcagcgactggagatgggcgaagaggtcgaggtgtatgaggactaccagatagaaccacgatacaatagcttgaataaactggctaaggagctgcttagcgatttcaaggaggtggatgacaacttcaaggggattatcaaagagatatatgagcgccagacagacaatgcggagaagaaagtattgctgaactacatctttgatgcgtatggcgaactgaaacaatcgcaacaaggcaagagtttctatgcattctgggaattcctgctctcggccgatctgcagaaagaatgggacgagttgactggtgcactctatgaaacactggagaatagaggcattgatgcgcatgacatgtttctcagggaaatgaaaaagcatctgtttgacgcaggcgagaaggtggcgaaaaccaacgatcgcatgagcgagaaactgagtcgcatcattcgccagaacggacagatgaatgcagaggtgacaaagcaggtgattaatgatataaagaaactgctcatcgaagccaccaaacagaaagagaaaccagaagcttcgcttgaatatgaaactatcgatatcaatctgccagtcgagcgccctctgactctggctcctataaaagagactgtgtataaggataagcctgatatggctgaactgagtctggacgacttggagcgcataggcaaactctacaatccgtatcacatcgatcgtctggtgctgagagaccgcattaacaaggtgctgtacgacagacagcagacgacactagcagaggtgatagaacggaacgagggtgtggagaaaggtctgtcggaagtgtttggatacattggcgtgctgaaggaatataagactgtggtaaacgaagagcgccagcaatatattgtttttgcagaaaacaaaacgatatcaattcccgaaatcataataacacgatga

SEQ ID NO: 42598 - DNA, 585 bp, Bacteroides sp. 2_1_56FAA; identical to SEQ ID NO: 42186

SEQ ID NO: 42599 - DNA, 3396 bp, Bacteroides sp. 2_1_56FAA
atgatgcagcagatgaatctctttaataccagtccggaagtggcaggcttcaagcttgactatttggaagtgtggaactggggtacattcgaccaaaaggtgtactgcatgaatacgcagggcaataactcgctgctgaccggtgccaacgcatcgggcaagagtacgctggtagatgctctgctcacgctgctagtgccactgaagcgccaacgattctacaaccaatcatcgggtgtggagaagaagggcaaccgtacagaggagtcgtacttctttggcaactatggcaatcagcagcaggagggtgcagcgagcactaccacgcttagattgcgagacaaaggggcacgttcggtacttcttgcatcgttttgcaatgtggacaaacgtgtggtgacgctgtttcaggtgcgctactacactggcgaggaactgaaggtgttgtttggtatagctcgcgaaccgctgactataaagcgcgacttttcggagtttgacctgcatggcgactggcgcaagcgactgacgaagaaatacaatacgaatgacacaagacgcaagatagagttttttgacggcccggttgcgtatggcgagaagatgatagccctcttcggaatgcgttcggacaaggcgcttacactcttcaatcagatagtgggcgtgaaagtgttggacgatctagacagtttcatccgtacgaatatgctcgaggaagtgccggctgaggaaaagtaccaggaactaaaggacaacttccaaaatctgatggaggcgaaaaccaatatcgataaggtgaaggagcagattgcccaactggaacctatcaatacattggcaaaggaactgatggcgatagacacgcgcatagctgaattggagcaagagaagagtgtggtggcctattggtttgctgcgcgaacggtggatttgtgcaacgaggagttggcgcgctgcaagagcaacttgagaaaactggaagatgagttgaaggcgttaaaggtgaagaagagtgagctggaacaagagcagacgcgcttgtcggtggctattgagaaggacgaggtgggtcagcagatacgtgagattgagaaggaaatcaatcagaaggtgaagatgcgtgataaccgcaaggccaaagccgaagaatacgataagctggcaaagacggtggagctgacacaaagtcctgatgcagaggtattcgatgccaatcgtgcgaccgccaaacacgagaaagatgctctgcaggtaaagattgacaggcaactcatggaagagaagcgtcaggcacaaaaccgtcaggatgaaatcaactgcacgatatcagagcgagtggatactatacgctatctgcagcagcataagaacaatatctctggtcgtgtggctgagattcgtgatgagatactggaggctgttggtgcaaccgccgaagagattccattcatcggtgaactgatacgtgtgaaggatattgagtgcgattgggagtatgccatcgagcgtattctgcacaattttgccttgagattggtggtgccagagaagtattacaagcaggtgaatgagtatgtgaatggtcataatctgcgaggacgcatcgtgtatcagcgatacgagggcacagagcctcttcgtgagtttgaggataggacattgaaggtggattcgttgctccgtaaggttgaatacaagtcaaagtgcttgtatttggattggcttgaggataggttatttgctgagttcaactatagttgtgttgattcgcttgcggacttcaactatctgcaagagaaagcagtaacgaaagagggactgataaaagcgagaggtggtaagcatgagaaagacgaccgaccagagacacgaggcaaggaacactatgtgttgggctgggacaataaggagaagattgccatgctgcaggcggaagtacgccagttgcagcaggatgaaaaggaggtggcaaccaaagtccgtcgtatagaggcagatacaaagaatgctcaggagaagcgagaaacctactcgaagctgtttgataaatacgataaatttgatgatatcgactggtggtcgtgtgcactcgtcattcagcaaaaggaagaacagaagcgacaactggaggagaccaatgataaggtgaagatgttgcaggggcaattggagagggtgagaaaggaacttggtgcacttgaggagaagtttaatgaagctatcggtaacaaagcattattggaaaatcgtgagaatatactcaagaaacagagcaatgattgtgctttggctttggctcaaataggcgttgttgataccgatgcttttgagtcgcaacacacagatttactgaatgtggcattggtgggtttggacaaaatgcgtgacacgttacagagtgacatcaattccgctttgcggaaacaacgtgagacgaagggtagcaagagtggcgatttgaagaacctgatttatcgcttcaagaatcccactgaggaaattaccgcgaagtatcgcgattggcgttcggacgtgaaccgtttgcccgaagccgtggagtttgtgggcgaatatcagacctattaccaacgattgctggacgaagatctgcctgggtttgaatcgcgcttcaacaagtatttacaggagaatatcatcaacaaggtcagtgcattcaatatgttcttccagaactggcgccagtctatcaccaagaccatcgaccaattgaattcgtatcttgtgggcatcgatttcaaggatgctccaaagacgtatatccagttggtcgcagccaaacgattgaacgtggatttgaaggagttccaagaccttctgagcagtgcaatcccgaacatccatgagatgaattcgacaatcgatggcagcaggattcattttgaacagcatatcgaaccgctgatgtctcgtttacaagacgaatcatggcgaaagttggtgatggatgtgcgtggatggtacacatataaggcggaggagttttatcaagacgatgatcagaagcgtaacacctacgaggctatgggacagctgtcaggtggcgagaaggcgcaattgacatataccatcctggggtcagctatcgcttatcagtttggcttgactaagaacggactcgactcttcgttccgcttcattgccatagatgaggcttttcgcgcacaggacgaggacaaggctcgctatctgatttcgctctgcaaacagctccacctgcagttgctcgtggtgactccgagtgacaacatccacatcgtggagaacgatatttcgtatgtgcattatgtggagcgcaagggcgaccgttctgtactctataatatgcctatcagtgagtttaaggcagaacgtgaaaggagtatggaggtatga

SEQ ID NO: 42600 - DNA, 1155 bp, Bacteroides sp. 2_1_56FAA
atgataacggcagcagaaatacgtaagaagacagaacgcaagtatgtggattatttgcgttcagtggtcgctggctctgagtttgaaccaattgtgattccttgcgataagaaagcgagcgcatcgatggatgagtatcagcacgaactgacggacatccgttcgcaatcgaaagaggtgaagggctttggttacacgattgagtggaaaacagtgaaaacgaaagcattgggcgaacaggatctgcctgagcgtgtgttgttcaggagtgcatcggacgttgagcgcttcttgctgaagggtggtgaagtgtcacagtttcgcaaggatgtggcgatgttgtttaatgagtttccgcagcttcgtccatgggtggaacgctatccacttaaggtgatcgagaatgcttcctcttggcctgatttgttgaaagttttgcgctattttgtggcgaatccttgtcctgagttgtacattcgtgaattgcctattgaggtgcacaccaagttcattgagcgcaataagggagtgcttcgtgagttgctggatattgtcattgtagagcatgtctgttcggatgagaaggagttcgaaaagcgctttggattgcgatacgatgagccatgggtgcgcattcgtgtgttggaagcatcgattgcgagtgaatacttttctggtgtagacgatctgacgatgcctcagagtcagttctgtgcgttatcgttgcctgtgcagaaggtgtttgtggtggagaataaagtcaacttcctgacttttcccaagttggcaggaagtctgctgatttgggggcatggattcaccgttggcatcctcaagtctgttccattcatgcggcacgcttccctatactattggggcgacattgatgtacagggcttcgaaattctctcgcagttccgcagttattttccccagacgcaaagccttctgatggatcgcgctacctttgacacctattttgaaggcgacaaaggcactccaagcaatgtatcaaagcctctccatcttacccctgcggaagccacactgtataatcatatcaagtctcacaacctacgtctagagcaagagaaaattccgcaaaaatgtattgaaaatatattcaatagttcgttaaaaattagccaagtctaa

SEQ ID NO: 42601 - DNA, 1356 bp, Lachnospiraceae bacterium 1_4_56FAA
atgcagttacgttttgaaataccggattcgttctggagcctgttccgctcggtcaaccgggaagtctatatagatgctctgctttgtatcaatgaagaatatcagtacagtaattattttctgacaagggaaatctgtatccaggcgcttagcgacttatatgtgaaacagcagatcgaacttcgcagagaagaagatgagaccgaaatcgatcttctggagacaccggcttcccgtattttgaactggctgttaaggacggggtggctgaaaaaggtcgaagattacaatacattggtgaccaatatcgtgatcccggactatgcggcggtgatgatcgacgcatttgaacgcctcacatcggaagatatggaagagacggaaatttatattcaaaatgtatatgcaacgttattttctttccggcatgatacaagagtcaatttgaatatgctgcggacggctcttgtcaacacgcggcggctgaataaagcgcttcaggatatgcttcataatatggacaaatttttcgcacggctcctggagcagaaaacatacggggaactcttgcaggaacatctggaggggtatgtggaaacgatcgtgcggaagaaatatcatattttaaagacttccgataatttttatctttacaagaccgatataaagagggtgcttcaggaaatgcgggaagatgaggcatggatcgaaaatgtgcgggcgcagtccaaagcgatgggggatacgggagaggacgtattggaacttctggatctgatcgagaggggatttgatgatattgagcaccgtatttccaacatggacaaagaacatacgaaatacgtccgcgccacggtgagccgtctgaattatctgctcagcgccgagaccgatacaaagggactggttgtgcagcttttaaaccggatcgcggaggatctcgagacaaggataaggaaaaccggggaaaagatgaatctctcacagttggaaatattatcggagagatcactttacaaacggagaaaggcgagaaaagatttcatcagccggatggcagtggaagaagcggcggaagatctggatcgggaagacgtgcttcggctgaaccggatccaagtgcggtacagccgacagcagattgaagaatttatccggtcgcatatggtggatgatgtgatggatgtcagcacactgccgttggaggatgatgagacatttgaaaagctgatactggcttatgattacagtacgcgccgcagcagtaaataccggatcgcagaggaagacgctttgatgatcgagaacggaagttatcgttatccggcattgaaattcgtccggcgcggcgtatag

SEQ ID NO: 42602 - DNA, 687 bp, Lachnospiraceae bacterium 1_4_56FAA
atgattgactattttgagcagttgataccggaagaacaggaggggatcaccgaggtgatccagacattatttcgtcagacctttcttttggaacggaaatttgaccgccgtctggggaggatgcagtatacgcatgaatatcgtgtatgcagtaaacattttgaatttttgaaattatattttgcggcggcggggattacattgaatgaaaatgtccaaatgggtctgatctatattcagggagaaacgctttggggagagaaactgccgcggcttgcgacaatttatctgctgatcctgaaactgatctatgatgagcagatggcttccgtttcttcgagcaaccatatcgtgacgacgctcggggcgatcaacggaagagccggggaattcggcgtgcttcggacattgccgtctccgacggagatccggcggacggtggcgcttttgaagcggtatcaggtgatcgagccgttggatgtgttggaggaattgaacgaatccacaagacttgtcatttatccgagtattcatgcggtgctgtcgggagacgatatccgggcgctgcttcagacattcggcgaggcagatgagagacaggaacgtctggaaacggaagacgatatgaaagaaataacgggaggaacgacgattggagaagacacaggcgtttcaggcactctctaa

SEQ ID NO: 42603 - DNA, 3378 bp, Lachnospiraceae bacterium 1_4_56FAA
ttggagaagacacaggcgtttcaggcactctctaagatctgcctgaacaactggcattatatagacaaaaaagtattgacgctgaatgaggggatcaatttctttaccggacattcgggaagcggaaaatcgacggtgctggacgcactgcagatcgtactttatgcggatacggacggacgacggttttttaacaaagcggccgccgatgattccgaccgttcgctgatcgagtatctgcgcggtatggtcaatatcagcgaaaataatgaatcccagtatctgcggaatcagaacttttccagtacgatcgtgctggaactggaacgcacggatacgcgggaaaaacagtgcgtcggcgttgtgttcgatgtggagactgcgacaaatgagatcagccgtctttttttctggcacacgggcggcctgcttgaaaaccagtatcgcgcggacaggcggtgcctgacgacggtggaagtgcgggaatatctgcagagaacgtttgcggcggatcaattttattacggaccgagcaatgaaagattcaggcggcagctttacgacatttatctggggggactggacgcagagaaattcccccgtctgttcaaacgtgcgatcccgtttaagatgaacatccggctggaagactttgtgaaagaatacatttgcatggagcaggatatccatatcgaagatttgcaggaaagtgtgatgcagtatgggcggatgcgcagcaagatcgaggatacgctggaagagatccagaagctgacagagatcggggaagtctatcagacgtttgatgaaaaacagcagaaagcggtaagctgcgcgtatcagatcgcccgtcttgaaatgctgtatctggagcaaaagatacaggaataccatgaccgcgtaaatgggcggaaagaggagatcgggcagcagaagatacggcaggcaaaactggaggaagagcaggggcatcttcagaaagattatgaagacgtgctcgtccggatcgcgaacagcgggtattccggtctggaaaaagaactggaaacgctgaacgagacattggagcgtctggcaggaagcaaggcacgttggcagcagacgtcggaacggctgaaagaatggaaagatcaggacgtgacacccaaccagacgatctgggacattgaccgtttcctgaaagggacgatctcggagcaggagatggagcggcttcagaacagtttcaaagagatgcggcaggaattggaagagggacggcaagaaaatgcgtccagactgaaagcggtcaagaaagaagaaaaagaggcgcgggaagagctgaaagaattgaagcaggggcggaaagcctatccgcgggagctggaagaagctcgttatgaactgcggaaccgtctgcaggagtattgtgggaaatttgtgaacgtgcagatccttgccgatcttctggatatcaaagacgaacggtggcacaatgcggtggagggatatcttggcaataacaagctgcttcttgttgtggagccgcggtatgcccgggaggcattggagatttacaaggagatggataagcggaaatattgccgcgccgcagtgctggacacagagcgggtcatggaaaacgagcatgcggtccgcccgggcgcgctggcggaggaagtgaccgcaaagaccgattatgcggcggcttatatccggtttttccttggaaatgtgatgaaatgcgaatccgtcgaggaactgcgggagtgccggatcggtatcacgccggactgcgtgctgtatcacagctaccgtttgcagcatatcaatccggatctgtatacaaggcgcgcatatatcggggagaccagtatgcgcaaacgtatccggcagttggaattgaaatgtgaggaactgcagaatgaacggcttccgcttcaggaggcggaggtgaagatccgcaggcttttggaactggaaatgcttccgcagccgacagacgattatatgcagtggatcaaagatacagagatgatctcggataaggaaaagagaaagaaacatttgcaggagcagatggaacagctccgggaagagtcggtggcagtgctggaagcgcagaaaaacgagctgatggagcggatggaagaaaagaaagcttcggtagatctggtgaagcgggaaatctggaaaaatgaaaaagatatcgacggatatcagcgcgcgatcatcgatcaggaagaagcgttggcggtgaaaacaaaagaagtgcaggcgatgagtgggaaagaagtacatgatttggaaacggagtttcaggaatttctcgccgcgaagaaatccgtcaattatgattatctgaggcggcagaaagtatcggaacagcagccgcttctcgagcaggcggagcgggaatatcagaagctggtggacgtccgcagcgcgtatttgcggacatatccgaaccggacgttttccgcaagcgcgcgggataatacggcatatgagaaattgctggaagaattgcagtgcggcgatctggaacgatacagggaatcggcaaaggaacaggcaaaatctgcggtggagcattttaaggatgactttatctttaagatccgcgcggcgatccgggatgcctatcagcggaaagacgagctgaaccggatcatcagcaaactggatttcggaaaagacaaatatcagtttgtgatcacgaaaaataaaggcgcggacggcaaatactataagatgtttatggatgatgcgctgcagatcgatccgatgcagcttagtcatacgatggacaatcagctcaatatgttcacaatggagcatgaagaagagtacggtgaaatgatgaacgaactgatcaacattttcattccgccggaaaatgcgacccgggaagaactggatgaagccaagaaaaacatggaaaaatatgcggattaccggacgtatctttcttttgatatgcagcaaatcgtgtcgggaaaaacttccggggaagagaccgatatgcatatcgggctgagtaggatgatccggaaaaattccggcggtgagggacagaaccctctgtatgtagcgcttctcgccagctttgcgcagatttaccggatcaaccagacttcgcggatccggagaaatccgacgcttcggcttgttgtgctggacgaggcattttccaagatggatgcggaaaaagtggcaagctgtatctcgttgatccgcggactcggctttcaggcgatcatcagcgcgaccaacgataagatccagaattatctggaaaatgtggacaagacctttgtgtatgccaatccgaataagaaacacatttccatacaggaatttgaacggacggaatttggggcgttagaagatgagtag

SEQ ID NO: 42604 - DNA, 1425 bp, Lachnospiraceae bacterium 3_1_57FAA_CT1
ttgaaatttttatatgatatccccgcctccttctgggggcttttccggtcggtgaaccgggaaatttatatggaagcccttttgacgattgatgatgaatatcagtataataattttttcctgagcagggaagcctgtgtgcagattctgggagagatgtgcgcacagcagaagctgctgatggagcaggaagagacggaaacagaggaagaagcccaggaagcagtgcctaagcggatactgaactggctgctgcgggccaaatggcttcgtaaagtcgaggactatacgacgatgaccaccaatatagtcatcccggattacgcggccgtttttatcagcgcgttcgaccagctggtcaaccagccgctggaggataccgatatttatattcagaacgtgtatgccactcttttttccttcaaaaatgattccagaatgaatattaccatgctgaaaacggcactggtaaatacgaaaaaactgaacaaggctcttcaggatatgctgcataacatggataaatttttcgaacgcctcttatccaagcagtcctacggggaactgttggaggagcatctggaaggctatgtggaagaagtggtgaataaaaaataccacatcctgaaaacgagcgataatttctatatatataaaatggacataaaacgctgcctgaaggaaatgcgggaggatgatgcctggataggacggatccgtgcaaaacaggagctttcccgggagaaaaagggaaaagagccggagggcttctaccgaagaagacaggacgaggatgtgctggatcttattgatcagattgagcggggctttgacgatattgaacaccgtattgccaacatggatcgggagcacagcaaatatgtgcgggccacggttagccgcctgaactatctgctgagtgatgaaagcgaccgccacggcctgatcatccagctgctgaatcatctgggagaaccggaggaggaaaaagagcaggccgaccgtctgcggcttgtggcgcagaaaatgaatctttccgcctatgaaatcctgaatgataatccgctgtataagcggagaagaagaaggaattttaccgaagagctggttcccgatgaggaaaataaagagctttcccgggaagaggtccttcagatgaacaagatacatcaccggtttacaaggcagcagatcgaaagctttatcgaggagcgtatgacggatgggatcctggaaacgggcagcctgcagttaacctgtcaggaagactttgaaaagctgatcctggcttacgatatcagtatgcgcaagaacagcaggttccaggtggtcacctcgggagagcaggtggaaggagagcgctacacctatccggccatgatgtttgtggaaagaaagcgcagcggttcggcccggtctgactga

SEQ ID NO: 42605 - DNA, 834 bp, Lachnospiraceae bacterium 3_1_57FAA_CT1
atgcttccatatataaatgaattatcccaggaggagcaggaaaagctgcaggagatgatccgaaggctcttccgccagacttttctcctggagagaaaatacgataaaaaagcaggcaggatggtggccgacaaggacttctattttgcagacaggcacatggattttctaaaggattattttgccgccgcaggaatctgcctggaacagaatacggagctgggaaccatttatttgacgggagaaaccaccatgggagaacggattcccaagctggcaaccatttatcttctgcttctgaagctgatttatgatgaacagatggcagccgtttcctccagcgtgaatattgtcaccaccttcggggaactgaacggcaaggtgggcgagttccggctttcccgcagcctttcttcccttacggaaatcaaacgggcctttgcctttctgaaaagataccagatggtggaactgatggatgccctggacgaactgggagaaaatacccggattattatttatccctgcatcaatctggtgctgatgcgtgaggatgtccttaagctgctgcagagcttcggagaggatggagacgaagaggggaatgcagaggaagagggcattataggtgaagaagacagcatagatgaagaaaccgatgcagaggatgagagcggcatgggcggcgaggttaacggggatgaagaagatacgttagaaggagataaagcagatggaaacaccgcagatgatgacagcacagctttcggaaccgcaggcggcggagcagcaggagggaatgcctcagctggagagcagccgccagtcctttaa

SEQ ID NO: 42606 - DNA, 3369 bp, Lachnospiraceae bacterium 3_1_57FAA_CT1
atgcctcagctggagagcagccgccagtcctttaaggcgattacgagaattgcgctgaataactggcactacatagattccaagatacttaccttaaataaaagcatcaacttttttaccggccattccggaagcggaaagtccaccgttatcgatgccattcagatcgtcctgtacgccaatacggacggaaggggcttctttaataaagccgccgcggatgattcggacaggagcctgctggaatacctgagaggcatgatcaatatcggggaaaacaaccaggcggaatacaaaagaaaccataacttttccaccaccatcgcgctggagctggaacagaccggaagcggggaaaaggaatgtgtgggtgtggtttttgatgtggacacctccaccaatgaaatcggccgcctgttcttctggcataaaggaggaattccggaaaacggttaccggaccgccgggcgcgccatggcgatcggggagcttaaaaattacctgcagaaaaacctgacccgtgaggaatggtttcttacctccaataacgaacggttccgcaggaatctgtatgatgtctatctggggggcctggatatggagaagttccccaggcttttcaaacgcgctatcccgttccggatgaatatccggctggaggagttcgtgaaggaatatatctgtatggagcaggatatccatattgaggatatgcaggaaagcgtggtcctttacgggcggatgcgcaggaagattgaagagacgcagacggaaatcggggagctgataggaatccgggatcagttcaaccggtttgtggaaggccggcagagaacccggagccttcgttaccgtctggacaagctcactatcctgcagctgacggaagtcatccgcgagcttcagacccgggccggggaagggaaaaaggaccttctggcccagaaggagagcctggaaaacctgctttccgtaagggctgattatgcttcccagcatgaagaaattaaccgtcagctcatcagcagcggatatgcagagctggaagccaagcagagaagcctggaagaaaacctgactctgctggaaagaagtgagcggaaatggaagactctctccgacaatctggaacgatgggaagaggaagagaatatatccaaccagaccatatgggatatggataaattccggaagggaaccatctccggcgaagagctggaacggctgaaaaaaagcctgaaggaagtggaaaccgatctggaaaagcagcatcaggaggcggcagcggaaggaaaggcccttcagaaggaagcggatctcatccagaaggatctcatggaaatcatgctgggccgcaaagcctatcccagggagctggaggatgccagaagccagattcagagacagctttacgagaagaccggcaaaaatattccggtccgtattctcgccgatttgcttgatatcaaggatgaaaaatggagaaatgccatagaaggttatctggcatggaacaagctggcgctgatcgtggagccggcttacgtcaaagaagccatggaaatctacgaaagcctggatgccaaaaagtactggcggatatcccttgtggatacggaaaaactcgccgcccaggaataccaggtgcgtgagaatgccctggcggaggagattgactgcagagaatcctatgtaaaagccttcatccatttcctcctcggaaacgtgatcaagtgtgaggatgtgcagcagcttcgccggtgcaaaatcggcattaccgcggactgcctgctgtatcagaacttccagctgcgccgtctgaatccggataactatacaagaagggctttcatcggggaaaagagtatgcgcaggcgccagaaggagcttcaggcccgtctggaggagctgaacaagagcctggaagaatactccgccgcagccgcacaggccaaacgcctgttaagctatgaatatctgcaggaccctgtggaaagttatgtggagctgtttcaggatatagaagaaaaaaagaaaaaagaagcacagcttaagaagctggaaaaaaggatggaggaactcagcgccggttcggtggagcttcttaaggaaatgctgcaggaaatagcggaaaaagaaaaggttttggaagcccatatcgacagcctgaaaatccagatccatgacagggaaaacaaaatcaaggcggacgatgccgcctatatcgaaaagaacgaagaactgctggaaaaacagagacagctggtttcctcccccgcatgggaggaggactgggaacgctttttctcccaggtgaaaaatccaagatacgataccctgatccgccaggcgcttgccgccattacggaggctgaggaggatcttgaggtacaaagaaaccgtcttgtggatatccgttccgaatacctgaagcgccatccgaaccgggacttttccgccagtggtgagaaaaatgaggattaccaggccctgcttgatgagctttcctttgaccgtatcaaggattttgaagaaaaggcgatggagcaggcccggattgcggttgaccacttcaaggaagactttatttataaaatccgcagcgccataaaagaagcgtatatccgccgcgatgaactgaaccgcatcatccgcaggctgaatttcggcaaggacagataccagttcaagataaccaaaaacaagggactggacggagaatactatgacatgttcatggatgagtctctggaaatcgatccctccacgctttccggctccgtggagcatcagatcaatatgttttccatggatcatgaagacaagtacggcaccctcatgaatgatttgatccgtattttcatccctccggatacggcaaacgcccaggagcaggaagaagccaaaaagaatatggagaaatacgcggattaccgcacctatctatccttcgaaatggaacagatcgtggaaggagaggaaaggctggtaatcgggctgagcaaaatgataaagaaaaattccggcggcgagggtcagaaccccctttatgtagccctgctcgccagctttgcccaggcctatcacatcaatctgtcacccaagctgtcccgcaggccgaccatccgcctggtggtgctggacgaagccttttccaagatggatgcggaaaaagtggccagctgtattgaactgatacggggactcggcttccaggccatcatcagcgcgacgaacgacaaaatccagaactacctggaaaacgtggacaaaaccttcgtttatgccaatcccaataagaagagcatttccatccaggaattcgaaaagaaggattttgcccagctcatacgggaggaagagatgtag

SEQ ID NO: 42607 - DNA, 1365 bp, Lachnospiraceae bacterium 5_1_57FAA
atgcagttacgcaatgagatcccagacacgttctggagcctgttccggtccgtgaaccgggagatatacattgatgcgctattatatatcaatgaagaataccaatataataactatttccttaccaaagaggcatgcatccaggttctaggcgatatgaatgccaggaagcggtacgagcttcaatgggaagaaagcgagtctgaattcgatatgctggagacgccgtcatcccgtatcttgaactggcttcttaggaccggatggcttaaacggatagaggattataatacgctggtgaccaatatcgtgatcccggactattccgccatatttattgatgctttcgaacgcctcagttccgaggatatggaggagacagacatctatatccagaatgtctatgccactttattttcctttcagaacgatgcaagagccaatctgggcatgcttcgcacggctttggtgaatacacgcaggcttaataaggcgctgcaggatatgctccataatatggacaagttttttgcacggctcttggatcaaaagtcttatggcgatcttctaagagagcatctggacgggtatgtggaggaaatcgtgaggaagaagtatcatatcttgaagacttcggacaatttctatatctataagatggatattaagaagtgtctgcgcgatatgcgggaggatgaagcgtggatagagcaggtaagagaacgttcaagggccatgggagatacaggggaggatgtattggagcttctggatctgatcgagaggggattcgatgatattgagcataggatcgccaacatggacaaggaacataccaaatacgtccgcgcgacggtaaccaggcttaactatctgcttagcggagaatcggatacgaaaggactggtcgtaaaacttctgaaccgaatgtcagagagcgcggattatgatgaggtgctggcaaagacgggggagaagatgaatctctccctgctggagatattatcggagaagtccttgtataaaaggcggaaggggcgaagatactttatcagtcagatggagccggatgaagagattgcggaccttgacaaggaagatgtgctgaagcttaaccgcatccaggtacgctataccaaggaacagattgaggccttcattgaatcccacatggatcagaacgatattatggatgcggcacaggtagatataacggatgaggaatcctttgaaaaattgatcttggcctatgattacagtaccagagggagcagcaagtacatggtgctggaagaagagccaaagatgatagaaaaagggccgtataagtatccggcgctgaagtttgtaaggagaagattatga

SEQ ID NO: 42608 - DNA, 645 bp, Lachnospiraceae bacterium 5_1_57FAA
atgatagactattttgaacagctaagccaggaagagcaggaggatatcacggaggtaatccagatcctgtaccgccagacatttctgctggagaggaagtatgacaaaaggtcggggcgcatgcagtatgtgcgggagtatcggatatgcagcaagcatctggaattcttaagggcatattataaagttgcgggcattacattgaaagagaatgcccatatgggcctgatctatatccagggggaggctttgtggggagagaagctgccaaggcttgcaaccatctatctgctggtattaaaactcatctatgatgagcagatggcgtcggtatcttccagcagtcatattgtcaccacgttgggggcggtcaacggaaaggcaggagacttccgggtgctccatggcctgccttctcctactgaaatgcgccggaccatcgcgcttcttaagaaatatcagatcatagagccgctggacgttctggaggaattgaacgagcacacgaggcttatcatatatccctgcattcatgcggtgctgatgggggatgacattaaggaactgttagagacatttggcgaggaggagaacattggagacgaagcagccattcaaagcactttcgaggatatgcctgaataa

SEQ ID NO: 42609 - DNA, 3345 bp, Lachnospiraceae bacterium 5_1_57FAA
ttggagacgaagcagccattcaaagcactttcgaggatatgcctgaataactggcattatatagataagaagatattgactttaagcgaagggattaatttctttaccggccattccggaagcggcaagtctacggtgatcgacgcgatccagatcgttctgtatgccaatacggatggccgcgggttctttaacaaggcggcggcagacgattctgaccggagcctgatcgagtacctgcggggcatggtaaatatcagtgagaataatgaatcccagtatcttcggaataagaacttttccagcaccatcgtactggaactggaacagaccaataccagagaaaagcagtgcgtgggcgtcgtatttgacgtggagacggctaccaatgagattagcaggctgttcttctggcatacgggagaacttttaaataaccattaccgcacggaaaaaagatgtctgacgaccatagaaatgcgggagtatctgcaaaggacgtttccgccggaaggattctactgcggcccgagcaatgagagattccgccgccagctctatgacatttatctgggcgggcttgacatggataaatttcccaggttatttaaacgggcgatcccgttccgcatgaatatcaagctggaggactttgtaaaagagtatatctgcatggagcaggatatccagattgaggaccttcaggagagcgtcatgcagtatggacggatgcagaacaagattgaagagacgcaagaagagatcagaaggcttaatctgattcgggagcagtatgaggaattctgcaaagagcaccgggaggtggaagcctgcacgtaccagattgaccggctggaagaactctggctggaagcaaagatccaggaatgccgggataagtcgctggggcgccagggggagatcggcaaacaggaagcggttaaggaacagctggaatcacaggccagaatcctacagaaggagtatgaggatattattctcaggatcgccgacagcggatatgccaatctggagtcagaactggctggccttaatgagacgcttgagaggctgggggccagcaaggcacgctgggggcagacagccgaccgcctcaaagagtggaagcagcaggatgtgacgcccaaccagtccatctgggatatcgacaaattcgcggacggaagcatttccgaaggggaacttgagaggctcaaagagagccttctggatatccaggaagaattagaagagcagcgccgggaggcagactcggacctgcgcaagatcaagaaggaagaaaaggatgccagagaggaattaaaggaactgaagcaggggaagaaggcgtatcccagggaactggaagaggccagatacgaactgcgcaaccgtcttcacgagcgatgcgggaaattcgtcaacgtacagatactcgcagaccttctggatattaaggatgagcggtggcacaacgcgatcgaaggctatctgggcagcaataagctgctgcttgtggtggaaccgggatatgccagggaagccatggacatctaccaagggatggacagaaagaaatattaccgtgcggccgttctggacacggagaaggtcatggaggatgggcaccaggcaaaggagggctcccttgcagaggaaattgtggcaaaagagccttatgtcagggcttacatcgactttttcctgggaaatgtgatgaaatgcgaatctatagaggaactgcgggagcaccggatcggaatcacgccggactgcgtcttgtatcacagctaccgcctgcagcatatcaatccggataattataccaggcgggcctatatcggagagacgagtatgcgaaagcgtatccgccagttggaggagaagtgccagcatctccaggaagagcgtctgcctctgcaggagatgctggaggaaatccgaaagactatgcagctggaaatgctgatgcagccgatctccgattatctgggctggctgtctgatatagagcagattccggcaaaagagcgaaggaagaagcagatcgtagagaaaatgcagcgcttaaaagaggaatccgtggatacctggaatcgtcagaaagaggaaatccagcggcagcaggaggataaaaaagcgcagatcgatcaggtgcagaaggacatctggaacaaccagaaggatattgaacgattccgggaggaacttatacagtccgagtccgcattggtgcagcagaagcaaaagactgtggaaaaccctgaatatgagcaagaattccaggagtaccttgcagggaagaaatcatccaattatgaatatctgaagcggcagaggattgcagagcgctatccgaagcaggaaagggaggagcaggcataccagaaactggtggatatccgaggcgaatacctgaggaattatccaaaccgtacctactccgcggcaattaagaataacgaggcttacgataaactgctgaacacgctgcagtgcgacgatctggaatcttaccgggagtcggcgaaagaacaggcgcgccaggcggtggaacattttaaggatgactttatctttaagatacgaagcgccatccgggaagcctaccagcgcagggacgaactgaaccgcatcatcagcaggctggacttcggaaaagataagtatcaatttgtaattaccaagaataaaggggccgacgggaaatattacaagatgttcatggacgattcgctgcagatcaatccaagccagctgaccaataccatagacaatcagcttaacatgttcaccatggagcatgaggatcagtacggggatctgatgaatgaactgatcaacatcttcatcccgccggaaaacgcaacgaaggaagaactggacgaggcgaagaagaacatggacaagtatgcggattaccgcacctatctgtccttcgatatgcagcagatcgtaaaaggcgataaagatatgaccatcggtcttagcaagatgatcaagaagaactccggcggcgagggacagaatccgctgtacgtagcgcttcttgccagtttcgcgcaagtttaccgtatcaacctctcgcccaaaatccatagaagccccaccatacggctggtcgtactggatgaggccttctccaagatggatgcggaaaaagtggccagctgcatctcgctgatccggggactcggcttccaggccattatcagcgctaccaacgataaaatacagaattacctggaaaatgtagataagacattcgtgtatgccaatccgaacaagcggcatatatcgatacaggaatttgagaggaaagattttggggaactgaaagattga

SEQ ID NO: 42610 - DNA, 1239 bp, Lachnospiraceae bacterium 5_1_57FAA
atgtatattgtagataaaattataaataaatgtgaaaaaagcagcagggattggcgaagcggtgcctccgggcgccgtacgatacagattatgcagtcggattatgacagatgtgggaaatcagtgctgataagcgaagtgaaggaattggaattccgggggctgatcgagattgaaaagtgggtaaccagaggaagcgatgtagatataattgcttttcgggtggaaaagctggacagattctatgaattagccaaaagcgaggggagaatggtctggccgaaacaggaacgggttgattattatagagggatgctggaggcagaacttgggaagggtatagaaaagaattggatccgggagtattacagataccttatatctagactggataaaggaaattttccaaaagatgtggagaaattagaattatatacttgctgcctcagagggattgacgaattggaggagcctgtatataaacgcatattcagcaaaaagtaccttaacaattcaaaaaaatttgaaaatgaggtgcagggccatctcatatctgtagcaaagaagtattgggatgagatcgaagaagatatggatgacaagacggtgctgtcgcagttactgctcgaagaatacgctcaggaactggaaatgaaagggcccctcaggctgattatcgaatcagggggtaagatgcaatcggaagaaggaacagagatagaaggagagacaccgccagatcaagaaatagatatatctgccttcatctatggcgttacattaaacagtgcgatgctgaaatatagcagaatcgcgcctaagcagccggatatcagacgtatcattaccatagaaaataaggcaaattttgtatctgtgccctatgatcctcacacattatatattttcagccatggatacttttcgccaaaagaaagggaatttttgaaaaaattggcgtatattttgaacgaagaggatgtgggatattatcacagcggcgatctggattacggcggtattaagatatatgaatatattaagaaacgtattttcccggaattaaggccttatctgatggatgtagagacttatgacaggtatttggaatatggagaggaagcgccggaaagtgtcctgaagaagataaaaacggtggaattgccggagtttcaagggctgataggccgtatgctggagacggggcttatgattgagcaagaaagttttttgatttaa

SEQ ID NO: 42611 - DNA, 1452 bp, Lachnospiraceae bacterium 1_1_57FAA; identical to SEQ ID NO: 42394

SEQ ID NO: 42612 - DNA, 639 bp, Lachnospiraceae bacterium 1_1_57FAA; identical to SEQ ID NO: 42117

SEQ ID NO: 42613 - DNA, 3366 bp, Lachnospiraceae bacterium 1_1_57FAA; identical to SEQ ID NO: 42396

SEQ ID NO: 42614 - DNA, 1233 bp, Lachnospiraceae bacterium 1_1_57FAA; identical to SEQ ID NO: 42397

SEQ ID NO: 42615 - DNA, 1446 bp, Lachnospiraceae bacterium 2_1_58FAA
gtgttacagaactatttgtacctgaaaccgacttcgtgctataatatgacagacacaaatcaacgagatacggagaaaattatgcagttacgatacgagatcccggacacattctggagtttgttccgttcggtaaaccgggagatttacatggagtcgctgctggtgatcaatgaggaatatcagtacagtaattattttctgacgaaagaaatctgtgtgcaggtattgagtgatatgaatgcacagaaacaggttttgcttcagcgggaggagaacgagacggattttgacatgctggagacgacagcatcccgcattttacggtggcttttaaagaccggatggctgaagaagatcgaagattacagtacgatgaccacaaatattgtgataccggattatgcggcggtttttattgaggcatttgagcgactcacgtccgaagagctggaagaaacagaattatatattcagaatgtatatgctacgctgttttcctttcagaataattccagagtaaatctgaatatgctcaggacggccctgatcaatacaagaaagctgaacaaagcgctgcaggatatgcttcataatatggacaagtttttcgagaggcttttggatcaggagtcttacggggaacttttgcgggagcatctggacgggtatgtggaagaaattgtcaagaaaaagtatcatattttaaaaacatcagacaatttttatatctacaagatggacattaaaaaatgtctccgggatatgcgggaaaatgaagaatggatcgaaagcatccggcagaaagcaaaagcagcaggagatacgaaagaggatgtgttagatctgttggatctgatcgaacggggatttgatgacattgaacacaggatctccaatatggacagagagcattccaaatatgtgcgggcaaccgtgagccggatgaattatctgttaagcggagagactgataccaaagggctggtggtgcagcttctgaataaaatatctgcgcaggaagaaccggagaagctgcttacggaagcaggaaaacggatgaacctgtctctgtttgagatgatttccgaaaaatcattgtataagagaagaaaacagaggacagactttatcagccagatgggacaggatgaagaatatgaagatctgaaccgggaggatgtgctgaagttaaaccggattcagatgcgctacagcagacaggagattgaggattttatcgaagagcatatggaaaacgaagtgatggacgccggaacacttcatattacagaagagacagcatttgaaaaactgatcctggcatatgactacagtaccagaaagaacagtaaatatcgggtattgaatgaggaggagacagtcatccaaagtggacagtatcaatatccggcattaaaatttgtgcgaaggagaccgcaatga

SEQ ID NO: 42616 - DNA, 645 bp, Lachnospiraceae bacterium 2_1_58FAA
atgatcgaatattacgaacagctttcggaagaagagcaggacgatatcaaacatgtgatccagacattatatcgtcagacctttcttctggaacgaaaatttgaaaaacggaccgggcggatggttccggtcagggagtaccgtgtatgcagcaagcacagggaatttctggagaaatattttgcagttgccggaatcacactgcaggaaaatctgcatatgggcgtcatgtacatccagggagagacactatggggagaaaagctctccagacttgccacaatctatattctggtgttaaagctaatctatgatgagcagatggcagcagtgtcatccagcagccatatcgtgaccactcttggagcagtgaacggaaaagcgggagaattccatgtgttaagcggcttgccgtccccgacagagatgcggaggactgttgcatttttgaaaaaatatcagattgtggaacctgtggatgtgatggaggagctggatgagaacagcagacttgttatttatccgtgcatcaatacagtgctgcttggagatgatatcagagaactattagagacgttcagcgaggaggaagacagtggagacaaaacaggcgttcaaagcgctctcgaaaatctgcctgaataa

SEQ ID NO: 42617 - DNA, 3357 bp, Lachnospiraceae bacterium 2_1_58FAA
gtggagacaaaacaggcgttcaaagcgctctcgaaaatctgcctgaataactggcattacatagacagaaaagtacttactcttaatcagggaatcaatttctttaccggacattccggaagtggaaagtctacagtgatcgacgccatgcagatcgtactgtacgcgaacacagacggaagaggattttttaataaggcggcagcagacgactctgaccgttctctgatcgaatatttaaggggaatggtgaacatcggggaaaataacgaatcccagtatttgagaaaccagaatttctccagtacgatcgttctggagctggagcagacagatacgaaagaaaagcagtgtgtgggagtggtatttgatgttgagacagccacaaatgagatcaatcgcctgtttttctggcataaaagcgggcttctggaaaatcagtaccgggcggataagcgctgcctgacgacatttgaagtcaaagaatatctgcagcggacatttttaaaggaagagtattattgtggtccgagcaatgagagattccgcagacagatgtatgacatttatctgggtggtctggatatcgaaaaatttcctcgtttgttcaagcgagccattccgttccgtatgaatatcaaactggaagatttcgtgaaagaatatatctgtatggagcaggatatgcacattgaagagctgcaggaaagtgtgatgcagtatggaagaatgcgcgggaaaatcgaagagaccatggaagaaatcgggtatcttcaggagatccggggttcctatcggcagtatgaagaaaaacaggaagagacggcgtcctgtacctatcagatttccaggctggaaatcctgcatctgcagagtaagatccaggaactgaatgaccggatgaaagagacacagacggagattgcaggacaggaagcgaaaagagtcaatctggagaaagagcaggcagaacttcagaaagaatacgaagcaataattttgaagattgcggacagtggttatgcagccatggaaaaagatctggagagtctgaacgaagccctggaacggctgcagaacagtaaggcaagatggaaaaagactgcagatggtctcaaagagtggaaagaaaaagatgtgacgccgaaccagaccttgtgggatattgaccggtttgtttctggaaagatcacggaaggtgagctggaaaggctgcagacaagtctgacacagatccgggaagaactggaagaagagcgtcaggagacagatgccagacttcgcgcggtcaaaaaagaagaaaaggcagcacgggaagaattaaaagagctgaaacagggaagaaaagcctatccaaaagaactggaagaagcgagatatgagttgagaaaccggctgcatgagaagtgcggcaagtttgtcaatgtgcagattctggcagatcttctggatgtgcgggacgaacgctggcacaatgccatcgaaggatatctcggaaacaacaagctgcttctagtcgtggaaccaaagtacgcgaaaattgccatggaaatctatcaggacatggataagaagaaatttttccgggcagcagttctggatacagaaaaagtacaggagacagaatgggaagtaaaagaaggagcccttgctaaggagctgattgcaaaagagccgtatgtgcaggcatacatcaatttcttcctcggaaatgttatcaaatgtgaaagtatcgaagagcttcgtcagaaccggatcggaatcactgcagactgtgtgctgtaccacagcttccgtctgcagcatatcaatccggaaaattatacgagaagggcatatatcggagagaccagtatgcgtcagaggatccgccgtctggaagaaaaatgtgagagtcttcaggaggaacggattccactgcaggaaatgctggaagaaattcgcaggatctctcagctggaaggactgacacagcctctggaggattacagacaatggctgtctgatctgcagaaaattccggcaaaggaggcagaaaaggccagacttctggatacaatgcagaagctgcgagaggaatccgttctggtgtgggagcagcagaaacaggaaatccagcagaagcaggaagcaaagaaagcagagattgaggcagttcagaaaaccatctggaatcatcaggaaaacggaaaacgattccagaacatgcaggtagattttaatgaacagttagtgcagaaagaaaatgaattccggcagcaggacagagaaaaatatgagccggaatttcaggagtatctggagggcagacagagccgcaattatgagtacctgatgcgggaacgtatcaagaaaaaacagcctttggaagatgcgcaggaaaaagcatatgaaaaactggtagaagcaaggagtgcatatcttcgaaaatatccgaacagaacctattctgcaacgatccgtgacaatgacgtgtacgaaaagcagctttcaaatcttgagtgcgataacctggaaaaatacagggaagaagcacaggaacaggcgagagcagcagtggaacactttaaagttgattttgtatccaagattcgttatgcaatcaaagaggcatatcagaaaaaagatgaattgaaccggatcatcagccgtctggatttcggaaaggacaagtatcagtttgtcattacgaaaaacaaaggtccggacggacgattctatcggatgtttatggatgacgcattggatatcaatccgtctcagttgagtgaccacatggaaaatcagatgaacctgtttaccatggagcatgaggaagaatacggaaatctgatgaatgagctgatcgagattttcattccgccggagaatgccactagggaggaactggaagaagccagaaaaaatatggataaatatgcagattatcgcacgtatctttcctttgatatgcagcagatcgtgcagggagaaaaggatatgcggatcggtctgagcaagatgatcaagaaaaattccggtggagaaggtcagaacccgctttatatcgcgcttctggcaagctttgcacagatttacagaatcaatctgtctccgaagatcaagcgtccgccaaccctgcgtctggttgtcctggatgaggcattttccaaaatggatgcagagaaagtagcaagttgtatttctctgatccggggactgggatttcaggcgattatcagtgcaacaaatgataagattcagaactatctggaaaatgtagacaagacatttgtgtatgcaaatccgaataaaaagcatatttcgatacaggaatttgaacgaatggagtttgaacagctgcaaggggaagaatga

SEQ ID NO: 42618 - DNA, 891 bp, Lachnospiraceae bacterium 2_1_58FAA
ttgtggattcgtgcatattaccaggatttgctggaacgatcggaaaataaacgaaaaaaagatcttctggaattattagcggatgagaaaaaatatgccccgtgctttgaaggtctggatcagcttacagaatctgtttttaaaaggattttcagtaaaaaatatttgggaaatacaaaaacatttgaacaagagatgcaaagtcatgtcatcagtactgcgaaaaaattctgtccggatgtagaaaaagaaatggatgacacgacagtgcttcagcagctgtggatcgaagaatatgcacaagaactgtctttaaaagggaaactgcatttttgtctgaaagaagaaaatggaagcactcaggagattaatacagagtgttatcggttcggtactacattaaacagtcagacactggagcatgccgagataaaagaagtacagaatattcagaagatcgtgatatttgagaataaagccaattatatctctgcaccgtataaggatggtattctatacttatttagtcatggatatttttctccaaaagaatgtagatttttaaagcagctgcatcaagtgttaaaaaatcagacatcctgtgaagtgcaatattttcacagcggagatctggattacggtggaatcaaaatttttcagtatatacgcaaaacaatctttccggagttagagccgcttcagatggatgttgagacatatgaagcatatcaggaatttacagaagtgatagatccggaaacactggaaaaactaaagcgtgttcaggatgaaaatccaaagctgcaagagctgatcaaaaggctgatagaaacaggaaaaggaattgagcaagagtgttttttaatagagaaaagagggaatcacatatga

SEQ ID NO: 42619 - DNA, 1476 bp, Cellulomonas gilvus ATCC 13127
atgatcactcgtgccgaagcggcgtacctgggcgccgtccgggccttccagaacccgatgctggacctgctccacaagcggcacgcccccctcgtcgtctcgctgctgtcggtgctgttcaccgcggagcgcccgaccgtgccggtcgccgacgcgcacaccgaggtcggtgacgcgctggaccagctccgggccgcgggtcaccaggacgggctgccggtcggcagcgcgcgcgacctgtgccgccagtgggcggacgcgggctggctggtgcggcaggtgctcgacgacgacgtcgaggtgtaccgcctgtccgcgcacgcggtgggtgcgctcgaggtcgcggggcgtgcgggcggcgcccgggcgcgcgtctcgcagtcgcgcgtacgcacggtgctggacgcggtgggccgcctcgcacacgacgcggacccggacgtcctggtgcgcatggcgcggctcgacgcggagatccggcgcctgcaggacgagctggcccgcctgcagcgcaccggcacggtcgagcccgtcgacgacgaggagctgctcgagcaggcggagaacgtggtgcacctggtgcgcgagctgcctgcggacttcgcgcgcgtcgcggagtcgatcaaggcgatgcagcgggacgtggtgagcgcgctgcggcaggacgagcgcccgacgggcgagatcctgcgcgagtacctggcgcgcggtgagcacgtcatggagtccacggtcgagggccgcgcgttctccggtgcgctgcgcctgatcggggatccgcagcggctcgacgagatcgccgaccagctggacgtcgtgctgcggcaccggttcgcgcagcgcctgcccgccgcgcagcgcacggagctgagcgaggtggtgcggcgcatcgagcaggggctcgaccaggtgttcaccgcgcagcgcgaggcgtcgtacgtgatcaccggccaggtccggcaccacgacccgctgcgggaccggcaggtggacgagctgctgcgcgaggtcatgaccggcctgcagacgtggctgccggacgcgcgacgcggccaggcggtggacccgctgcgccgcctgccggtcgcggaggtcgagcacctgcgccagaccgcgggcgacctgcgtcctccgcaggctccggccgcgctgccggactgggccgacgacgagcccgacgtgtccaccgacgaggcccgcgcatggggcggtccgcactacgccgagctggacgcgcacctggccgcgcacgccgacgagtccggcaccgcggacgtcgcgcgcgcgttcaacgccgcacccgacgcgctccgccggcccgtggacctcctggggctcctcgagatcgcgcaccagcgcggcatgaccgagaccgacgagctcgcgttcgtcgacgccgtccggcccgacgggagccggcgacggttcgcgttcggggccgtcaccaccacgacgaaggaccccgcgcatgagtga

SEQ ID NO: 42620 - DNA, 657 bp, Cellulomonas gilvus ATCC 13127
atgagtgagaccacggtcgaggagggcttcatcgcccccgtgcccatggaggaggacccgtccgagctgttcgcgggcgactcgggcacgctcgacgcggacgtgcggcgcgtgctggtgcggctgctgcagcggcggttcctgaccgccgaccgcaaccgcgcgcagtggcgcacgctcctggagaaccagcaggtgatcgagtcgcgcctgcacgacctgttcgtgcacctggtggtcgaccacgagcgcggcatcgcctacaagaagcaggtgcgctccgccgagctcgacgtgcccgtgctgctgcgcgacgaggcgtacacgcgcgccgagacgctggtgctggtgcacctgcgcaccgtgttccagcgtgagcagggcgcgggcgagacctcggtgcgcgtggacgtcgaggagctcgagcagaccgcgctgacgtatttcgaccccgacgacacgaacgtggccggccaccagcgcgagatccgcgccgcggtggcccggctggccaaggagggcctcatcgaggaggagtcgcagggccggtaccgggtcacgccgctggtggaggtggtgctcagcaacgagcgcctgaccgagctgcgcgcgtggctgcgcacgcagcagcccgccggcacggaggccggccgatga

SEQ ID NO: 42621 - DNA, 3378 bp, Cellulomonas gilvus ATCC 13127
atgaccatggtcgacacgctgttcgggctggtcccggccgcgtccacgggtcagcagtggatcgcccgggacctgcagctggtcaactggggcgggtacgacgggcaccaccggatccgcctggcgtccaccgcgacgctgctgtccggcggctccggctcgggcaagtccacgctgatggacgcgtacatcgcgctgctcatgccgcacaccacgccgttcaacggcgcgtccaacggcggtgtcgtcgggcgtccgcgcggcaaggaccagcgcaacatcctgtcctacgcgcgcggcaagctcgacgagtcccgcacgcaggacggcacgcggcagcgcgtgctgcgcggcgacggtcgtgacacgtggtcggcgatcgccatgacgtgggtggaccaggcgggcaccgagctcacgggtgtccgggcctggtacgtgccgtccgccgcgcggctgctcgacgacgtcgtgcccgtgcgcgcgacgtgcgactccgcgttcgacctgcgcgagctggaggcggcggccggccagcggttctcccggcccgccgtggcagccgccggcctgacgccgttcgacaccgaccgcgacttcacggcgcggctgtactcgacgctggggatcggcgcgtcgggtgacggcagcaaggccgtcgcgctcctcggccgcatccaggccggtcagcagatcaccacggtggacgcgctgtacaaggccatggtgctcgaggagcccgacacgttcgcgacggccgacgccgtggtcgagcagttcgacaagctcaccggcacgcgtgagcagatgatcaccgcgcgtcagcaggtcaaggcgctcgagccgatccgtgggttccgcgacgcgatcgagcagggtgcggagcggctgcgcgtcatcgaggcgatcgggtcgttcgaggaccgcacctccccggccgcgctgtggcggcacgcgcgccgcctggacctgctgcgcgcggtcgaggcggacctgcagcgccgccagcgtcacgcgcgcgggctcgcggccgagaccgaggcacggatctccgccgcgaaggcggagctggacggcgtgcgcgagacgctgtgggcgtcgggcggcgaccggctcgccaccgcgcagcgcgagatgcgcggtgcgcaggcacgtctcgacgaggtcgcgcgcgctcgtcgtcggctcgacgagacgctggccgacgcgttgggcgaggccgtcaccaccgaggccgagctggaccgtctcgtcgcacgcgcgcgcgccgcgctggacgacgcggacgccaaggccaccgcacggcaggcgctgttcgacgcgatgtcggagaagaaggaggccgccgcggacctggcggacctgcgcgccgaccgtgacgccgtcgcgcgccgccgcgacaacatccccggcgacctgcacgccgcacgcgcggcgctggcgaaggccgccgggctgacgcccgaggagctcccgttcgtcgccgagctcgtcgaggtccgcaccgagcacgagccgtggcgcgacgcgttcaacctggcgctcggcggcttcgcgacgcgcgtgctgctggacgtcgcgcacctgggtgcgttccgcaaggccatcgacgcggtgcccacggcacggcgcatccggttccagggcgtacccaccggcgtccgggacgacgtcgctctcgacgcgcgcacgctgcccggccggctcgactaccgcagcgggccgttcaccggctggctgcgcggcgagctggccagccggttcgcctaccagtgcgtggacacccccggcgagctgtcgcagcacgccaaggcgctgacgcgctcggggcaggtgtccgacggcacgcagggctcgcacggcgggtcgggcggagccaacgtcctgggcttcaccaacacgcgccggctggcgcacctcgaccagcagatcgcgcgcgcgcaggagcggctggcgctcgccgaggcgcaggtgctggaggccgaacggcgcatcgaccggcacgacgccgcgcagcgcgcgtacgccgcgctggtcgaggtcacctgggagcaggtcgacgtcgccgcggtcgaggccgagcaggagcgctgggcgcaggtcatcgacggcgtgaccgccgggagcccggagatcacgagcctgcagacgcgcgccaccgagctcgacgtcaccatccaggtgctcgccgaggagctcggccgcaccaagggcgaggcgcgcacgctggccgagcagtggtccgcgacgaccgacgacgtggacgccgcgcagctcgcgctcgacgacgcgcagtcggcgggcacgctcgtcgaccccgcgaccaccgcctacctggacgggctgctcaccagcggctccgagcacgcgaccggcgcacccgtcggcccggtcgacgcgctcgcggccttcgacgccgtgctcgcgcgcgccggcgagcacctgcgcgccgaccggcaggccgcgcagcaggccgtcgcgaccgcacgcgacgcgctgcgccgcacgttcgagacgttcgtcgagcgctggcccgacccgaacctcggcaccgacccggacgcgtcctacaacgacttcgcccggatcctggccgagctcgagaccagcggcctgcacgagctcgaggccgagtggcgcaagagcctgctgcggctgtccggcaacgacctggcggacctgcacagcgccctggcgcggtcggtgcgcgagatcaaggagcgcatccgcccggtcaacgacatcctcgaggacctgccgttcgccgacgacgagcaccgcctgcgcatcgacgcgcgcgacacgcagtcgaccgtcgtcgcgcggttccgcaaggagctgcgggacctgcgtgaggtcctggccaccgatgcgaccgacgccgagcgcgaacgccgctacctgcgcatggcacgcgtgatcgaccggatccgacgcaccgcacccgacttcgccgacctggtggacgtgcgccggcacgtgcggctgtccgccgagaaggtcgacctcgagggcaaccacgtggcgctgtacgaccacatcggcgagaagtccggcggcgagtcgcaggagctcgtcgctttcatcgtcggcgccgcgctgcgctaccagctcggcgacgcgggcgcgccccgccctcgctacgcgcccgtgttcctcgacgaggcgctcatcaaggccgacgcgcgcttcaccggccgggccgtcggggcctggcgcgggctgggcttccagctggtcatcggcgcaccgaacgacaagttcggcgcgctcgagccccacgtggacctcaagtacgtcgtgctcaaggacaccgctggccgctcccgcaccaagcccgtcgccggcgtccccgacgacgcggcgggacccgcctga

SEQ ID NO: 42622 - DNA, 1473 bp, Acetonema longum DSM 6540
atggtacagcaaaaaaatgaattctcggagcatatgtcctttgaattcctggaattattgcgtaagaaaaatccggcatggcgattattggcttcgccgcaggcgcctcttgttgcagcttttctttataaagaattcattgcggaaaacaagcgattggttgctgaacaggagttgatcagccgcttggaaggttttatcgaccggctaagccaggggcaaaatgagcgcctttttcctagaacaggacgggaatacctggatgactgggccggtgatgagcacggttggctgcgaaagttctatcctccggggcaggatgaaccctattttgatgtaacctctctggctcagaaggccattgaatggctcttgagtttaagacagcaaacctttattggtacagagtcgcggttaatcacagtatttgagcttttgcaccagattgtggagcgttctgaaacggatcccaagctgcgtttggcggaactggaacggcgaaaggcggaaatcgaacaggaaatcatccgagtgcaaaacggacaagtagcactgttagatgaaacgcaaatcaaggaacgcttctggcaggcgatgacaatagcccgagagattctggctgactttcgggctgtggaacagaattttcgggacctggaccggggcatgcgggaacggattgccacatgggaccggggaaaaggggagttattggaaaccgtctttagtgaacaggatgggattgggcagtcggaacaagggaaaagtttcgctgccttctggaaatttctcatgtcctcttcctatcaggaggattttcaggatactcttgatagggcattgcagctgaaagcggtgcacgaaatgagtacgagccggaatctccggcatattcaccatgactgggtgaacgccggcgcccatgttcaagagacggtagccgtattatcccagcagttgagacgatatgtggacgagaattttttggaagaagaacgccggatcaaccagatcatacgggaaatcgaaggaaaagctgtggccgtccgcaatgacccgccgcaagaatgggaaatgaaaattgacgaggtagctccggaaatttcattccctttggacaggcctctgtttacgcctccccaacgaccggaaattaaagacgacgtaatcggtgccggtgtggaggatgtgtcggcggaagcgcttttttcccaggtttatgtggataaggaaaagttaaaggaccagattggctatctgctgcaggcccaggacagaattacgctgtcccggatcattgagcattacccgttggaattgggtttaagcgagcttgtaacttatctggtcattgccagcgaaagtccgcaggcagccttctatccggaggatgtggaggaagtatcctggaccgatgaaacaggaaagaaaaaagtggctaagatggccaaaattatttttcagcggacttag

SEQ ID NO: 42623 - DNA, 606 bp, Acetonema longum DSM 6540
atgaatgttttggatgatttggcattttcgaggactctggtggctctctttaaaaacgttatctttaaagaaacagacccggaaacttgggaagtgatcttggcccagaaatataaaattgaggattatgtaagcaaagtcggcctcatcctaattgttgacgagatggatggttatgggtatctgaaacagcgcctttacggggaaggagaggaggagattccccgtctggtgtcccgtcatgcattgagttatccggtcagcctcctgcttgtcctgctccgaaaacaattactggagtttgattcaactacaggagaccagcggctcatcgtaaccaggcagcagattgccgaacggatgcagttgttcctgaaagatacaaccaatgaagccaaaatggtagcgaatattgacaaccatattaaaaagattgaagacatgggtttcttgcgccgtttgcggggcagcgaagatagtttcgaagtacagcgcgtccttcgcagttttgtcaatgcggaatggcttcgtgatgttaacgaactgctggataagtatcgggtttatgccggcggagagacaggagaaggggagagtcaggaatga

SEQ ID NO: 42624 - DNA, 3402 bp, Acetonema longum DSM 6540
atgagtttgttgaacttgaagcaggaatatcctgggctgctctttggcgcgacaccaggtttccggctagccaagctggaagtgttgaattggggcacctttgacggacaggtctggacgttttcccccggaggggaaacatcacttttgactggcgatgtgggttcgggtaaatctactctggtcgatgcgctgacaacccttctggtcgcgccgcgaaaagtagcctataacaaagcggctgattccagtgccaaggagcgttcaatcacgtcttatgtccgtggttactttggtcagaagaaaagcgccgaagggaccggccaaccggattctttgagggatatgcagcattattccgtcttgctggcgacctttcaggactcgggtttgtcccagtctgtcaccttagcgcagtttttttggtatcaggatgcgcagaagccaccggctcgtttttatgttgtggctgataaagaaatgtggattacacaggatttttccaagtttgacaaggatgtccgcgaattgaaaaagcgtttgaaaaatagcggtgtccgggtatttgaggattatacccgctatgcggaagttttccgcagaaaatttgggattgaacaggaacaggccttggatttatttcagcagactatttccatgaaaaaggtggaagcccttaccgagtttgtacgggctaatatgctgcaggttcctaatacagaagaggaagtcgagaaactaaaaaatcatttccaagatttgaatagtgctcatgaggctgttctgaaggctaagagacagattgaactgcttcatcccattgcagaccagggcaaacgctgcgaacagatggataacagacaaaatctgatggaaaagtcgctccgcgccctgagtccttggttcgcggaacaaacagcggctttgttgactgatgaaatcgccaggattgaacaagatctgattttggctgcaggggcgcgggaacaggcggaaatcaaacaacgagaaatcgaagaaagtatcaaaaagaccgagcgagatatttacgctaatggcggtggggcgttggaagcattaaaagctgaaattgagaacctgcgccaaatccttgatcacattcgcaaaaactgggcaaactatgcgaattgtgccggaaaattaaaattatccatgccaaaaacagtggacgatttcattagcaaccggtcaaaattgccggaaatcaagtctaacgaagaaacattacaaggtcgtttgaatgcagaccttcaggcggctgccggggaaacggccagagcggagaaagaaacgcagacagtggctgaagaactggagtctctccgttcacggagaacaagcatcccccgtgaatacattgagaaacgaaaacaactctgccgagatttgaagcttgaggaaacggaactcccctttgccggcgaattattggaagtcagggaagaagaagccggttgggaaggcgcgattgaaagactcctgcataattttggcctctcgatgcttgtgcccgaaaagcactatccggctgtcatgagatgggtggaccagacgatgctgggaataagactggtctattaccgggtatccgaaacgtcacagcctgtttccggtcagccgcatcctgcggccgtatcggaaaagctgaacattaagccgaatacctcctttggcatttggctgaccagggaactccgccagcgtttctcccatgtttgctgcgaaggcagggagcaattcagccgcgaatcgctggccattacccaggccggacagattaagtcaaaaggcaaccggcatgaaaaagacgatcgatacgcaattgatgaccgccgccgttacatcctgggattttccaatcagaaaaaaattgaggtcttagaggcaaatgagcaggaactcaaagcagagatccgattctaccgggacgaaatcgacaatattcgcaagcagcaaaaggaaagccaggagcggttaaacgctgccgtcactatggaaggaatcaccggttttgccgacattgatacccgttccaaggaaaaagaaatcgatgaaaaagaagagcgaagaaagagaatagaacaaggaagcgatgtgctgcaagaactgcagcaccggttgactgaactggaggaaatgaagaaaactcaggaagatgttttaaaaaaggctggcaaaaaggagacaacgcttgaaaacaggctgggaagccttactcaagataaggagcgggcggatgcaaccgctgcggaaactgcgccggcaatgaaggaagaggaatatccctttttagaaaaaaacaaaggcacggctttgcaaaataagaaagtaaccctggaaagcagaatcgcgctggaacgggattaccgggactggcttgagaaagaacgcggcatattggcaagggagattagtcagctaagaggaaaaattatcaaggccatgtccgaatacaacaatcagtacgccgaagaaacaagagaagtggatccaagtatggaaagccttccggaatataaccgcatgctggcgcaactggaaagcgacggattgccccggtttgaaaagcggtttaagcaattattgcatgaaaacacgatcaatcagattgccttattccaggccaaattaaagcaggaacaagatactattaaaagtcggattgaacaaatcaacggctctttgagcgccattgactatgacgaaggccgctatatccgtctggaacatgacgaaacctatgacagcgatatcaaggctttccgggtacagctgaaagcctgtacggaaggggccttgaccggatccagcgatgatcaatacgcggagacgaagttcctgcaggtgaaagctatcattgaacgtttccggggcaggcccggcgagacggaaagcgatgcgcgctggactaaaaaggtgattgacgtacgcaactggtttttattcgccgcttcggaacggtggcgcgaaactgatgaggaatatgagcattatacggattcgggcggaaaatcaggcggtcagaaagaaaaattggcttatacgattctcgcggctagtctggtctaccatttcggcttggagggacaggattcccggccgcaatccttccgttttgtcgtcatcgacgaggcttttctgaagagctcggacgagtcggcgcggtttgggctggaactgtttaaaaagctggatctacagctgctgattgtcacgccgttgcttaagatccccaccattgctcacttcattgctcatgtaggctttgtgcatcatgatgatatcagacatcggtccatgctgcgaaatatctccattgaagaatacgagcaggaacggaaggcccgggaggtagcgcgctatgtccaccgggtggtctga

SEQ ID NO: 42625 - DNA, 1179 bp, Acetonema longum DSM 6540
atgtccaccgggtggtctgatccgcaatggatccgggaagaactgagaaagaaatgggattctggcaagattctgcaggcgctgctcatagaggaggatttatttcctctccgtttaccgctgaaaagaccgaaaagcaacgatgtgaacgaaaactttgctgaaatttcccgttggattagacagcttagggatcatagcaagcagaatacgggttttggctatgaactgatcgagaaggaaatggtgcatcgccagtccggtcgcaatcttctgccgacccatgccgttgttccgacagtgcgggatgccctgcgcctgatgaaaaaagagcgggaagcggacagattcctggagattctcgggagattgtcggcggaatggcccgcattactggaatgggccggtagacaccctcataaggtactggctgtcggcgacgactggacaggcatattggctgtcttgaaatggttttcactgaatcccaattgccaattatatatgcggcaattggatattcccggcattgacaccaagtttattgaacagcgaaagggaattttaacggaactactgaatatcgttttgccggaagagacaattaaccacagcgccacttcttttgagcaacgattcggattgcgggtcaagccggtccagataagaatgcgattgctggatcaggcgcaatatattcagggtctttctgatctgacaattccggtggagcagctgatactgctaaaacctgatgtaacccgggtctttattaccgagaatgaaatcaacggactatgctttccggacgccggaagcagtctggtgatcttcggactgggatacagtgtggatgtattgaaggctgttacctggttacaggagaaagaaatctattattggggcgatattgatacccacggattggccattttggaccaagtccgaagtttcctgccgcagacttgttcgatgctcatggatgaaaacaccctgctcaagtaccgcgatctctggagcgtggaagataaaccttttttggggaaagtcactcggttaacctcggatgaaaatcagctactctgttcacttcaaaacaataggtggggcaagggcgtccggttagagcaagagcgagtttcttttcagcaggtgaagcagttcctttcaactctttaa

SEQ ID NO: 42626 - DNA, 1749 bp, Cupriavidus necator N-1
atgggtgacggcccggccgcagacgcaggccctggtgctggcgggtggctcgatgccgccgagcgggtcccggtgacgtcccgtcccccatcgtatttgggccaagtccaaatgccgtaccgattccggctcataaggcaactaccgggtcgccagggcgcagcccccacagggtgcgccggcgccaggcgtaatggaatccctgaagcaggtcgcgcggcggggcagtgcagtgcggggtggtatcgtacgattttgttcgctgcgtcgatggtacgcaggtgcaatgccagagtattaagggggacatcagccgccatggtggattcggggtatccgcagttctttcgtccgttgacgctgaagaggcgagggctgatcgctgcctgcatccgcgcattctatgcgcggctttatggttctcatgccgactaccgttccatccttgggcgcgaggacttgcgtgacctctttgtccagaccatgcagtccgccacgctgccggccgaccctaccggtgaagacggcgaagacggattcgccgccggtgacctggccgacgaccagaagctggcaagtgccatcgtgcgcctccttgtcgcggacggctggctcgaaaccgccgaggatcgcgtccggctggttaccgcctaccgcttcacccgagccggcaagatcttcgcacaggcgctgacgctggccgaccgcccacgcgaacggacccgtcagcgcaacatgcgctcctgcaagaatgcactgagtgccttcatcgagcgccgcgatgtggaggacctgctcgacgcctacgagtatgccgatcgggtcattgccgacctctccgaagatatcgagctcttctacgacctggctcgcaaaatactgctcgatgcacatgtgcagggcaattgggatgggttcatcgaattcgtagagcgacgttttcgtgatgagttctcgccccgcctggtctatgacaatgccgagcgccaccggctggacatcggggcgctaatcgaacgtcttaacgagttgagcgcggcggagatgcaggccattgacgatgacctggccaaccacgcggcatgggccgcgcagtccgcgcctgacggggctatcttgagatggatgcttgatcggatcgacgagatggtgaccgcggcctgccggaccaagcagccggaattgttccgggctatggaaagctatgtccgccgccatgtggtcttgttgtcgcagagtctgttcatgggggcatcgggcagcggggcggcattgtccaccctgatccgccgcctgggggatatcccggagcgggatcagcgcgcgtggctggagcggcagggagcggcgctcgcaccggtaagcgtggcgctgtatgatcccgccgctgtgcagccgagaaaggccgccgagcgtaaccgggcacaggccgtgagcatcgttccggagatcacgcgggaggagcgtttgcgtcaattcgtacggcaagcggaggagcgggccttctccctgtcgcatcaagaggtcgtggattacttgctcggttccatgcgcggcacgggcgcgctgcgcctgtccgagttgccggtcgacgatgccatccaggcgttatcgttgttgcgggcagtcgaggcagcacgggaccaagagggactggacgtggagcggctagacgccgagccgctggacaatgccatcatgtcgggcactgactatgcaatcaggaggcgacacattggccatggatga

SEQ ID NO: 42627 - DNA, 693 bp, Cupriavidus necator N-1
ttggccatggatgaaattacgattgggcaactggtggaagcggaactgaaggcgggaggcgtcaggccggaggcgttccggcagattctcggccgcctgttcgggctgtccatcctgcaccgcgaggacagcgccatcgagcgtcaactctacgacgacgccgtgcgtatcgagggcctgctcaatgcgtacttcgacgtgggcgggttccggctgctgcacgagcggcatcagagttattttcggctttacccgccgggggcgcgcgtgccgggactgcccgccgaggacgatgctatcgcggtggatgccgtgcgggcgaagctctctgccgatttcgtggcatgctgcctggtgcttcgcttgctgtacaacgaaagcctgcggcaaggctcgatcaacgagcgcaacgaagcgctcgtcaccgtggaatacctgaatgccacgctgactgcgcaggtgcgccgctcactgccggccaagactgcgcgggagaagctcttcgccgacctgaagcgtgcccgcctgatcgactaccgggcggattccgaggtggaagatgctgacgctctggtcgccattcgtgggacgatcctgcagttcgtggcggattcctccattgatgccctgctggccgaaacaccgacgcccgtgtcggccgtcacgtcgccggagcctgacaatgaagcttga

SEQ ID NO: 42628 - DNA, 3672 bp, Cupriavidus necator N-1
atgaagcttgagaagctcatcctggtcaactggggcttcgtggtgtcccgggaatacccctttggccacaccaccttgctgtcgggttcgaccggggtggggaagtcctctttccaggacgcaatccagctggtcatgaccggcggcaagcagcatatcaacgttttcaactcggcgcaggacgagagcggcgcctcgcgcgcgggcggcaaggtgaggcggacgctcgcgtcctacgcggtaggcatgcgcgacaacctctgcgtccggccgtatgggtcgcacacctatgtcgtcgccgtcttcgcacccgatgacggggagtccgccgagccattcagcgccgtggtggccgtggaagccgccgtgtccggtacacgcgagcaaggccgcagcgtcgatgtggcacgcaagctctactttgtgctgccgggcagccgcgtgctggaggcggatttcatcgagtcgcgcaaaggcaattcgattacggcagtaaaggtcgaggatatctatcatcggctgcgccagcgctatccgcgcgtcctgccgttcgagaacagcatcgaagactatctgtgcaagctctatgccgagtttcgcggcggcggcaagacgctggtcgggccgcgcgaggcggaagcggcggcgcgggcttttgtccagtccattgcccgcaaaaccgtcggctcggtggacgagctgatccgggagcaggtgctggccgagcctgatttctccgatcagatcgggcatatcgcgtcgctcatgcagaacgtgcaacgtctgcgcaagatcgccaccgaattactggcgtgtcgcgaacggttggcagtgctgaaggcacacgcagatgcgttccttgccgcattcgaagaggccatggaggccgaactgggcgaagcgctgcgccgacagcaggatgtcgaggaggagatccaaagactggaggcctgccggcgcatcgccctggccgaagtcgaaaagcagcaggcgcttgccgaccgacacgcgcaggcgttaaagcgcgccacggaattgcatggcactgcgaaggggcggctcaacggcaatccggtggcgcaggagcgtgagcgcctcggccgcgagatggccatggccactgaaagccgaacccgaatcgcgctggacgtcctggccgccctgacgggcttgcgaggcgtgctggatgaattggctgccttggctaaacagccagcagcgcacacctgcgcttacgcgccccatgtagagcgtctggtcgtcgatgccgcggcaatcgatgccgccgacggccaggccgccgcgcgtgaactcgcggcaatgctgacaggcgcgcagatcgacccggcgagcttgcggcgcgaccggttcgccagactggatgccgccctggctcccattgcgcagcggctgcagggcgccgacgggctgtatggggcagtggtacagcagcaggcgcgggagtcggatcgcgctaccgccctgcaaggggaaatcgatgacctgaagcggcgccggcaagggctggaagatggccactttgacttgccggcgcatgtggaggccgcggtccgatatctcgaagccaagatgccgggcgcccatcccagggtgctttgtaaccttgtccagccgcgggagggctcgcgctggcagaacgccatcgaagggctcttgggcggcaaccgcttcgtgatcctggtgaccgcgcagtatgaggcgagcgccatccgggcgctgcgacacgagctgccggcgactaggcaagggcgggaggcttccgtggtgcagggggaactggccaaacggcgggcggaaaaccaggcgctaacgcccgatgccatgttgcaggagctggtgattgccgatgaaaccgcgcgcgcctatctggttgcaagctacggccgttatgtcaaggtagcggatgcgcaggcactgcgaggcgcgccacaggcactgaccgtggacggcatggccagcggcggattcaagatgttttcgtcatgggtggaggacggcgaacttgccttcggtgcagaggcgcggcgcaagcgcgtggtgaggcttgcccggcaaatcgacgaaaagacgcgggaaagggacgcacatctcgcaagcggcgcagagttggccgcatggggcgcgcgtctgctcggcctgaagcttgtgcctgtcgcgccgatgctggacgagctgggtgaaacgcagcgcgggctgagtagtctcggggcgcagctcgccagcttggatgactccgatctcatcgtcctggagcgccgcgtggcgcgtgcggagcagctcttggacggccaccaccgcctatccaatgccgcgtcacgcttagcgggcgaagcggcggggcaggcgcgtggcttcgaagggaacatcgctgacgccgaagctaagcttgtggagtgccgggacgccgtgagacaggtaaacgcccgcgtggctgagctgatccgactcaatccgcacttcgatccggtacggcttgaccagcgcgcgcggcaagcggccacggagcagacttcagcgtccttcgatggacggcggcgtcagcaagccggtctctaccgtcaggagcgcgaggcattcgagcggaaactggaggcgcataatctcttgtcttcctcgttcgatgagcgggttgactttcagccttgccactcaacgcagggcgagtatgagtggcaagcctatggcggcatacccgctgcccggcggcaaatctcggccatgttagaacggctcgaccaagtgcgcatcctcaacaacaccagcgagttggggggcgccgagaagagtttcaacaataccttcagtacgcatttcgcgctggccgtacgcaccgcggtggagcagggcatcgacccgctcaagcggctcaacgagaagctcaagcgcctggcattcggcgaagaccgtttcgagatcgaatacgggcagatggtcaaggagtacaaaaaatacttcgacctgttccaggaactgaaccggctggccgagacacaaacgccggtggacttgttctcggccgccgaaggcgtgctgtccgccgacagcgtcatggcgctggatgacatcaagctgctattgctcgacaccaaccgcgaccacgcgttgcggcgactgaaggacatagcggattaccgcaactatcgccaatatgacatccgcaagtactcggaggatggacgcgaggcgtccttggcaagaatggcgacgttctcgggaggcgagctaatgacgccggcctatctagtacgggccgcggtgctggcccaggcatttcgccagttcgagaagacgccgagcctgaagctcatgatgatcgacgaggccttcgacaagatggacgagggccgcaccgctgccgtgatgcgctatctcaatgagaaccttggcctgcaactggtggttgccatgccatcccgcgcgtccggccctctgctcgagttgttcagtttcgagcatcgtttttccctgatgaaggtggagggtctggcaggcgaactcgataagattaccgaggtggacagctctttgttgaaggccgaccggctacatgccctctggactgaacgccgggaggcggtgcggcgtgaagcggcggggcagttcgacttgcaagaagcacgcaagcaattggtctcggacatggggacatga

SEQ ID NO: 42629 - DNA, 1533 bp, Xylella fastidiosa EB92.1; identical to SEQ ID NO: 41854

SEQ ID NO: 42630 - DNA, 714 bp, Xylella fastidiosa EB92.1; identical to SEQ ID NO: 41642
